United States Patent Application Publication US 2011/0183924 A1 - sequence listing, part 165

SEQ ID NO: 423016 - DNA, 3466 bp, Homo sapiens
  misc_feature (825)..(825): n is a, c, g, or t
aacaacatcctgggattgggacccactttctgggcactgctggccagtcccaaaatggaacataaggaagtggttcttctacttcttttatttctgaaatcaggtcaaggagagcctctggatgactatgtgaatacccagggggcttcactgttcagtgtcactaagaagcagctgggagcaggaagtatagaagaatgtgcagcaaaatgtgaggaggacgaagaattcacctgcagggcattccaatatcacagtaaagagcaacaatgtgtgataatggctgaaaacaggaagtcctccataatcattaggatgagagatgtagttttatttgaaaagaaagtgtatctctcagagtgcaagactgggaatggaaagaactacagagggacgatgtccaaaacaaaaaatggcatcacctgtcaaaaatggagttccacttctccccacagacctagattctcacctgctacacacccctcagagggactggaggagaactactgcaggaatccagacaacgatccgcaggggccctggtgctatactactgatccagaaaagagatatgactactgcgacattcttgagtgtgaagaggaatgtatgcattgcagtggagaaaactatgacggcaaaatttccaagaccatgtctggactggaatgccaggcctgggactctcagagcccacacgctcatggatacattccttccaaatttccaaacaagaacctgaagaagaattactgtcgtaaccccgatagggagctgcggccttggtgtttcaccaccgaccccaacaagcgctgggaactttgngacatcccccgctgcacaacacctccaccatcttctggtcccacctaccagtgtctgaagggaacaggtgaaaactatcgcgggaatgtggctgttaccgtgtccgggcacacctgtcagcactggagtgcacagacccctcacacacataacaggacaccagaaaacttcccctgcaaaaatttggatgaaaactactgccgcaatcctgacggaaaaagggccccatggtgccatacaaccaacagccaagtgcggtgggagtactgtaagataccgtcctgtgactcctccccagtatccacggaacaattggctcccacagcaccacctgagctaacccctgtggtccaggactgctaccatggtgatggacagagctaccgaggcacatcctccaccaccaccacaggaaagaagtgtcagtcttggtcatctatgacaccacaccggcaccagaagaccccagaaaactacccaaatgctggcctgacaatgaactactgcaggaatccagatgccgataaaggcccctggtgttttaccacagaccccagcgtcaggtgggagtactgcaacctgaaaaaatgctcaggaacagaagcgagtgttgtagcacctccgcctgttgtcctgcttccagatgtagagactccttccgaagaagactgtatgtttgggaatgggaaaggataccgaggcaagagggcgaccactgttactgggacgccatgccaggactgggctgcccaggagccccatagacacagcattttcactccagagacaaatccacgggcgggtctggaaaaaaattactgccgtaaccctgatggtgatgtaggtggtccctggtgctacacgacaaatccaagaaaactttacgactactgtgatgtccctcagtgtgcggccccttcatttgattgtgggaagcctcaagtggagccgaagaaatgtcctggaagggttgtaggggggtgtgtggcccacccacattcctggccctggcaagtcagtcttagaacaaggtttggaatgcacttctgtggaggcaccttgatatccccagagtgggtgttgactgctgcccactgcttggagaagtccccaaggccttcatcctacaaggtcatcctgggtgcacaccaagaagtgaatctcgaaccgcatgttcaggaaatagaagtgtctaggctgttcttggagcccacacgaaaagatattgccttgctaaagctaagcagtcctgccgtcatcactgacaaagtaatcccagcttgtctgccatccccaaattatgtggtcgctgaccggaccgaatgtttcatcactggctggggagaaacccaaggtacttttggagctggccttctcaaggaagcccagctccctgtgattgagaataaagtgtgcaatcgctatgagtttctgaatggaagagtccaatccaccgaactctgtgctgggcatttggccggaggcactgacagttgccagggtgacagtggagggcctctggtttgcttcgagaaggacaaatacattttacaaggagtcacttcttggggtcttggctgtgcacgccccaataagcctggtgtctatgttcgtgtttcaaggtttgttacttggattgagggagtgatgagaaataattaattggacgggagacagagtgacgcactgactcacctagaggctgggacgtgggtagggatttagcatgctggaaataactggcagtaatcaaacgaagacactgtccccagctaccagctacgccaaacctcggcattttttgtgttattttctgactgctggattctgtagtaaggtgacatagctatgacatttgttaaaattttcatgctctttgttcaccccaccaattttaaatgggcagatggggggatttagctgcttttgataaggaacagctgcacaaaggactgagcaggctgcaaggtcacagaggggagagccaagaagttgtccacgcatttacctcatcagctaacgagggcttgacatgcatttttactgtctttattcctgacactgagatgaatgttttcaaagctgcaacatgtatggggagtcatgcaaaccgattctgttattgggaatgaaatctgtcaccgactgcttgacttgagcccaggggacacagagcagagagctgtatatgatggagtgaaccggtccatggatgtgtaacacaagaccaactgagagtctgaatgttattctggggcacacgtgagtctaggattggtgccaagagcatgtaaatgaacaacaagcaaatattgaaggtggaccacttatttcccattgctaattgcctgcccggttttgaaacagtctgcagtacacacggtgacaggagaatgacctgtgggagagatacatgtttagaaggaagagaaaggacaaaggcacacgttttaccatttaaaatattgttaccaaacaaaaatatccattcaaaatacaatttaacaatgcaacagtcatcttacagcagagaaatgcagagaaaagcaaaactgcaagtgactgtgaataaagggtgaatgtagtctcaaatcctcaaagagctgtgtttatttcattgacaaatagattatttgtattc

SEQ ID NO: 423017 - DNA, 2688 bp, Homo sapiens
  misc_feature (825)..(825): n is a, c, g, or t
aacaacatcctgggattgggacccactttctgggcactgctggccagtcccaaaatggaacataaggaagtggttcttctacttcttttatttctgaaatcaggtcaaggagagcctctggatgactatgtgaatacccagggggcttcactgttcagtgtcactaagaagcagctgggagcaggaagtatagaagaatgtgcagcaaaatgtgaggaggacgaagaattcacctgcagggcattccaatatcacagtaaagagcaacaatgtgtgataatggctgaaaacaggaagtcctccataatcattaggatgagagatgtagttttatttgaaaagaaagtgtatctctcagagtgcaagactgggaatggaaagaactacagagggacgatgtccaaaacaaaaaatggcatcacctgtcaaaaatggagttccacttctccccacagacctagattctcacctgctacacacccctcagagggactggaggagaactactgcaggaatccagacaacgatccgcaggggccctggtgctatactactgatccagaaaagagatatgactactgcgacattcttgagtgtgaagaggaatgtatgcattgcagtggagaaaactatgacggcaaaatttccaagaccatgtctggactggaatgccaggcctgggactctcagagcccacacgctcatggatacattccttccaaatttccaaacaagaacctgaagaagaattactgtcgtaaccccgatagggagctgcggccttggtgtttcaccaccgaccccaacaagcgctgggaactttgngacatcccccgctgcacaacacctccaccatcttctggtcccacctaccagtgtctgaagggaacaggtgaaaactatcgcgggaatgtggctgttaccgtgtccgggcacacctgtcagcactggagtgcacagacccctcacacacataacaggacaccagaaaacttcccctgcaaaaatttggatgaaaactactgccgcaatcctgacggaaaaataccgtcctgtgactcctccccagtatccacggaacaattggctcccacagcaccacctgagctaacccctgtggtccaggactgctaccatggtgatggacagagctaccgaggcacatcctccaccaccaccacaggaaagaagtgtcagtcttggtcatctatgacaccacaccggcaccagaagaccccagaaaactacccaaatgctggcctgacaatgaactactgcaggaatccagatgccgataaaggcccctggtgttttaccacagaccccagcgtcaggtgggagtactgcaacctgaaaaaatgctcaggaacagaagcgagtgttgtagcacctccgcctgttgtcctgcttccagatgtagagactccttccgaagaagactgtatgtttgggaatgggaaaggataccgaggcaagagggcgaccactgttactgggacgccatgccaggactgggctgcccaggagccccatagacacagcattttcactccagagacaaatccacgggcgggtctggaaaaaaattactgccgtaaccctgatggtgatgtaggtggtccctggtgctacacgacaaatccaagaaaactttacgactactgtgatgtccctcagtgtgcggccccttcatttgattgtgggaagcctcaagtggagccgaagaaatgtcctggaagggttgtaggggggtgtgtggcccacccacattcctggccctggcaagtcagtcttagaacaaggtttggaatgcacttctgtggaggcaccttgatatccccagagtgggtgttgactgctgcccactgcttggagaagtccccaaggccttcatcctacaaggtcatcctgggtgcacaccaagaagtgaatctcgaaccgcatgttcaggaaatagaagtgtctaggctgttcttggagcccacacgaaaagatattgccttgctaaagctaagcagtcctgccgtcatcactgacaaagtaatcccagcttgtctgccatccccaaattatgtggtcgctgaccggaccgaatgtttcatcactggctggggagaaacccaaggtacttttggagctggccttctcaaggaagcccagctccctgtgattgagaataaagtgtgcaatcgctatgagtttctgaatggaagagtccaatccaccgaactctgtgctgggcatttggccggaggcactgacagttgccagggtgacagtggagggcctctggtttgcttcgagaaggacaaatacattttacaaggagtcacttcttggggtcttggctgtgcacgccccaataagcctggtgtctatgttcgtgtttcaaggtttgttacttggattgagggagtgatgagaaataattaattggacgggagacagagtgacgcactgactcacctagaggctgggacgtgggtagggatttagcatgctggaaataactggcagtaatcaaacgaagacactgtccccagctaccagctacgccaaacctcggcattttttgtgttattttctgactgctggattctgtagtaaggtgacatagctatgacatttgttaaaaataaactctgtacttaactttgatttgagtaaattttggttttggtcttcaac

SEQ ID NO: 423018 - DNA, 2698 bp, Homo sapiens
  misc_feature (825)..(825): n is a, c, g, or t
aacaacatcctgggattgggacccactttctgggcactgctggccagtcccaaaatggaacataaggaagtggttcttctacttcttttatttctgaaatcaggtcaaggagagcctctggatgactatgtgaatacccagggggcttcactgttcagtgtcactaagaagcagctgggagcaggaagtatagaagaatgtgcagcaaaatgtgaggaggacgaagaattcacctgcagggcattccaatatcacagtaaagagcaacaatgtgtgataatggctgaaaacaggaagtcctccataatcattaggatgagagatgtagttttatttgaaaagaaagtgtatctctcagagtgcaagactgggaatggaaagaactacagagggacgatgtccaaaacaaaaaatggcatcacctgtcaaaaatggagttccacttctccccacagacctagattctcacctgctacacacccctcagagggactggaggagaactactgcaggaatccagacaacgatccgcaggggccctggtgctatactactgatccagaaaagagatatgactactgcgacattcttgagtgtgaagaggaatgtatgcattgcagtggagaaaactatgacggcaaaatttccaagaccatgtctggactggaatgccaggcctgggactctcagagcccacacgctcatggatacattccttccaaatttccaaacaagaacctgaagaagaattactgtcgtaaccccgatagggagctgcggccttggtgtttcaccaccgaccccaacaagcgctgggaactttgngacatcccccgctgcacaacacctccaccatcttctggtcccacctaccagtgtctgaagggaacaggtgaaaactatcgcgggaatgtggctgttaccgtgtccgggcacacctgtcagcactggagtgcacagacccctcacacacataacaggacaccagaaaacttcccctgcaaaaatttggatgaaaactactgccgcaatcctgacggaaaaagggccccatggtgccatacaaccaacagccaagtgcggtgggagtactgtaagataccgtcctgtgactcctccccagtatccacggaacaattggctcccacagcaccacctgagctaacccctgtggtccaggactgctaccatggtgatggacagagctaccgaggcacatcctccaccaccaccacaggaaagaagtgtcagtcttggtcatctatgacaccacaccggcaccagaagaccccagaaaactacccaaatgcgcccctggtgttttaccacagaccccagcgtcaggtgggagtactgcaacctgaaaaaatgctcaggaacagaagcgagtgttgtagcacctccgcctgttgtcctgcttccagatgtagagactccttccgaagaagactgtatgtttgggaatgggaaaggataccgaggcaagagggcgaccactgttactgggacgccatgccaggactgggctgcccaggagccccatagacacagcattttcactccagagacaaatccacgggcgggtctggaaaaaaattactgccgtaaccctgatggtgatgtaggtggtccctggtgctacacgacaaatccaagaaaactttacgactactgtgatgtccctcagtgtgcggccccttcatttgattgtgggaagcctcaagtggagccgaagaaatgtcctggaagggttgtaggggggtgtgtggcccacccacattcctggccctggcaagtcagtcttagaacaaggtttggaatgcacttctgtggaggcaccttgatatccccagagtgggtgttgactgctgcccactgcttggagaagtccccaaggccttcatcctacaaggtcatcctgggtgcacaccaagaagtgaatctcgaaccgcatgttcaggaaatagaagtgtctaggctgttcttggagcccacacgaaaagatattgccttgctaaagctaagcagtcctgccgtcatcactgacaaagtaatcccagcttgtctgccatccccaaattatgtggtcgctgaccggaccgaatgtttcatcactggctggggagaaacccaaggtacttttggagctggccttctcaaggaagcccagctccctgtgattgagaataaagtgtgcaatcgctatgagtttctgaatggaagagtccaatccaccgaactctgtgctgggcatttggccggaggcactgacagttgccagggtgacagtggagggcctctggtttgcttcgagaaggacaaatacattttacaaggagtcacttcttggggtcttggctgtgcacgccccaataagcctggtgtctatgttcgtgtttcaaggtttgttacttggattgagggagtgatgagaaataattaattggacgggagacagagtgacgcactgactcacctagaggctgggacgtgggtagggatttagcatgctggaaataactggcagtaatcaaacgaagacactgtccccagctaccagctacgccaaacctcggcattttttgtgttattttctgactgctggattctgtagtaaggtgacatagctatgacatttgttaaaaataaactctgtacttaactttgatttgagtaaattttggttttggtcttcaac

SEQ ID NO: 423019 - DNA, 2689 bp, Homo sapiens
  misc_feature (825)..(825): n is a, c, g, or t
aacaacatcctgggattgggacccactttctgggcactgctggccagtcccaaaatggaacataaggaagtggttcttctacttcttttatttctgaaatcaggtcaaggagagcctctggatgactatgtgaatacccagggggcttcactgttcagtgtcactaagaagcagctgggagcaggaagtatagaagaatgtgcagcaaaatgtgaggaggacgaagaattcacctgcagggcattccaatatcacagtaaagagcaacaatgtgtgataatggctgaaaacaggaagtcctccataatcattaggatgagagatgtagttttatttgaaaagaaagtgtatctctcagagtgcaagactgggaatggaaagaactacagagggacgatgtccaaaacaaaaaatggcatcacctgtcaaaaatggagttccacttctccccacagacctagattctcacctgctacacacccctcagagggactggaggagaactactgcaggaatccagacaacgatccgcaggggccctggtgctatactactgatccagaaaagagatatgactactgcgacattcttgagtgtgaagaggaatgtatgcattgcagtggagaaaactatgacggcaaaatttccaagaccatgtctggactggaatgccaggcctgggactctcagagcccacacgctcatggatacattccttccaaatttccaaacaagaacctgaagaagaattactgtcgtaaccccgatagggagctgcggccttggtgtttcaccaccgaccccaacaagcgctgggaactttgngacatcccccgctgcacaacacctccaccatcttctggtcccacctaccagtgtctgaagggaacaggtgaaaactatcgcgggaatgtggctgttaccgtgtccgggcacacctgtcagcactggagtgcacagacccctcacacacataacaggacaccagaaaacttcccctgcaaaaatttggatgaaaactactgccgcaatcctgacggaaaaagggccccatggtgccatacaaccaacagccaagtgcggtgggagtactgtaagataccgtcctgtgactcctccccagtatccacggaacaattggctcccacagcaccacctgagctaacccctgtggtccaggactgctaccatggtgatggacagagctaccgaggcacatcctccaccaccaccacaggaaagaagtgtcagtcttggtcatctatgacaccacaccggcaccagaagaccccagaaaactacccaaatgctggcctgacaatgaactactgcaggaatccagatgccgataaaggcccctggtgttttaccacagaccccagcgtcaggtgggagtactgcaacctgaaaaaatgctcaggaacagaagcgagtgttgtagcacctccgcctgttgtcctgcttccagatgtagagactccttccgaagaagactgtatgtttgggaatgggaaaggataccgaggcaagagggcgaccactgttactgggacgccatgccaggactgggctgcccaggagccccatagacacagcattttcactccagagacaaatccacgggcgggtctggaaaaaaattactgccgtaaccctgatggtgatgtaggtggtccctggtgctacacgacaaatccaagaaaactttacgactactgtgatgtccctcagtgtgcggccccttcatttgattgtgggaagcctcaagtggagccgaagaaatgtcctggaagggttgtaggggggtgtgtggcccacccacattcctggccctggcaagtcagtcttagaacaaggtttggaatgcacttctgtggaggcaccttgatatccccagagtgggtgttgactgctgcccactgcttggagaagtccccaaggccttcatcctacaaggtcatcctgggtgcacaccaagaagtgaatctcgaaccgcatgttcaggaaatagaagtgtctaggctgttcttggagcccacacgtaatcccagcttgtctgccatccccaaattatgtggtcgctgaccggaccgaatgtttcatcactggctggggagaaacccaaggtacttttggagctggccttctcaaggaagcccagctccctgtgattgagaataaagtgtgcaatcgctatgagtttctgaatggaagagtccaatccaccgaactctgtgctgggcatttggccggaggcactgacagttgccagggtgacagtggagggcctctggtttgcttcgagaaggacaaatacattttacaaggagtcacttcttggggtcttggctgtgcacgccccaataagcctggtgtctatgttcgtgtttcaaggtttgttacttggattgagggagtgatgagaaataattaattggacgggagacagagtgacgcactgactcacctagaggctgggacgtgggtagggatttagcatgctggaaataactggcagtaatcaaacgaagacactgtccccagctaccagctacgccaaacctcggcattttttgtgttattttctgactgctggattctgtagtaaggtgacatagctatgacatttgttaaaaataaactctgtacttaactttgatttgagtaaattttggttttggtcttcaac

SEQ ID NO: 423020 - DNA, 1519 bp, Homo sapiens
aacaacatcctgggattgggacccactttctgggcactgctggccagtcccaaaatggaacataaggaagtggttcttctacttcttttatttctgaaatcaggtcaaggagagcctctggatgactatgtgaatacccagggggcttcactgttcagtcgtcaggtgggagtactgcaacctgaaaaaatgctcaggaacagaagcgagtgttgtagcacctccgcctgttgtcctgcttccagatgtagagactccttccgaagaagactgtatgtttgggaatgggaaaggataccgaggcaagagggcgaccactgttactgggacgccatgccaggactgggctgcccaggagccccatagacacagcattttcactccagagacaaatccacgggcgggtctggaaaaaaattactgccgtaaccctgatggtgatgtaggtggtccctggtgctacacgacaaatccaagaaaactttacgactactgtgatgtccctcagtgtgcggccccttcatttgattgtgggaagcctcaagtggagccgaagaaatgtcctggaagggttgtaggggggtgtgtggcccacccacattcctggccctggcaagtcagtcttagaacaaggtttggaatgcacttctgtggaggcaccttgatatccccagagtgggtgttgactgctgcccactgcttggagaagtccccaaggccttcatcctacaaggtcatcctgggtgcacaccaagaagtgaatctcgaaccgcatgttcaggaaatagaagtgtctaggctgttcttggagcccacacgaaaagatattgccttgctaaagctaagcagtcctgccgtcatcactgacaaagtaatcccagcttgtctgccatccccaaattatgtggtcgctgaccggaccgaatgtttcatcactggctggggagaaacccaaggtacttttggagctggccttctcaaggaagcccagctccctgtgattgagaataaagtgtgcaatcgctatgagtttctgaatggaagagtccaatccaccgaactctgtgctgggcatttggccggaggcactgacagttgccagggtgacagtggagggcctctggtttgcttcgagaaggacaaatacattttacaaggagtcacttcttggggtcttggctgtgcacgccccaataagcctggtgtctatgttcgtgtttcaaggtttgttacttggattgagggagtgatgagaaataattaattggacgggagacagagtgacgcactgactcacctagaggctgggacgtgggtagggatttagcatgctggaaataactggcagtaatcaaacgaagacactgtccccagctaccagctacgccaaacctcggcattttttgtgttattttctgactgctggattctgtagtaaggtgacatagctatgacatttgttaaaaataaactctgtacttaactttgatttgagtaaattttggttttggtcttcaac

SEQ ID NO: 423021 - DNA, 2083 bp, Homo sapiens
  misc_feature (825)..(825): n is a, c, g, or t
  misc_feature (1941)..(1941): n is a, c, g, or t
  misc_feature (2078)..(2079): n is a, c, g, or t
aacaacatcctgggattgggacccactttctgggcactgctggccagtcccaaaatggaacataaggaagtggttcttctacttcttttatttctgaaatcaggtcaaggagagcctctggatgactatgtgaatacccagggggcttcactgttcagtgtcactaagaagcagctgggagcaggaagtatagaagaatgtgcagcaaaatgtgaggaggacgaagaattcacctgcagggcattccaatatcacagtaaagagcaacaatgtgtgataatggctgaaaacaggaagtcctccataatcattaggatgagagatgtagttttatttgaaaagaaagtgtatctctcagagtgcaagactgggaatggaaagaactacagagggacgatgtccaaaacaaaaaatggcatcacctgtcaaaaatggagttccacttctccccacagacctagattctcacctgctacacacccctcagagggactggaggagaactactgcaggaatccagacaacgatccgcaggggccctggtgctatactactgatccagaaaagagatatgactactgcgacattcttgagtgtgaagaggaatgtatgcattgcagtggagaaaactatgacggcaaaatttccaagaccatgtctggactggaatgccaggcctgggactctcagagcccacacgctcatggatacattccttccaaatttccaaacaagaacctgaagaagaattactgtcgtaaccccgatagggagctgcggccttggtgtttcaccaccgaccccaacaagcgctgggaactttgngacatcccccgctgcacaacacctccaccatcttctggtcccacctaccagtgtctgaagggaacaggtgaaaactatcgcgggaatgtggctgttaccgtgtccgggcacacctgtcagcactggagtgcacagacccctcacacacataacaggacaccagaaaacttcccctgcaaaaatttggatgaaaactactgccgcaatcctgacggaaaaagggccccatggtgccatacaaccaacagccaagtgcggtgggagtactgtaagataccgtcctgtgactcctccccagtatccacggaacaattggctcccacagcaccacctgagctaacccctgtggtccaggactgctaccatggtgatggacagagctaccgaggcacatcctccaccaccaccacaggaaagaagtgtcagtcttggtcatctatgacaccacaccggcaccagaagaccccagaaaactacccaaatgctggcctgacaatgaactactgcaggaatccagatgccgataaaggcccctggtgttttaccacagaccccagcgtcaggtgggagtactgcaacctgaaaaaatgctcaggaacagaagcgagtgttgtagcacctccgcctgttgtcctgcttccagatgtagagactccttccgaagaagactgtatgtttgggaatgggaaaggataccgaggcaagagggcgaccactgttactgggacgccatgccaggactgggctgcccaggagccccatagacacagcattttcactccagagacaaatccacgggcgggtctggaaaaaaattactgccgtaaccctgatggtgatgtaggtggtccctggtgctacacgacaaatccaagaaaactttacgactactgtgatgtccctcagtgtgcggccccttcatttgattgtgggaagcctcaagtggagccgaagaaatgtcctggaagggttgtaggggggtgtgtggcccacccacattcctggccctggcaagtcagtcttagaacaaggtttggaatgcacttctgtggaggcaccttgatatccccagagtgggtgttgactgctgcccactgcttggagaagtcccaggcntcatctacaggtcatctgggtgccacatgttgtaagagcagcgcgccacgaagaccatgtgcacaattgcgacgcagtacggtggaacagctgggctgaccccagtatatatttgtcctgttggggaggaccgcttnncgct

SEQ ID NO: 423022 - DNA, 2393 bp, Homo sapiens
  misc_feature (825)..(825): n is a, c, g, or t
aacaacatcctgggattgggacccactttctgggcactgctggccagtcccaaaatggaacataaggaagtggttcttctacttcttttatttctgaaatcaggtcaaggagagcctctggatgactatgtgaatacccagggggcttcactgttcagtgtcactaagaagcagctgggagcaggaagtatagaagaatgtgcagcaaaatgtgaggaggacgaagaattcacctgcagggcattccaatatcacagtaaagagcaacaatgtgtgataatggctgaaaacaggaagtcctccataatcattaggatgagagatgtagttttatttgaaaagaaagtgtatctctcagagtgcaagactgggaatggaaagaactacagagggacgatgtccaaaacaaaaaatggcatcacctgtcaaaaatggagttccacttctccccacagacctagattctcacctgctacacacccctcagagggactggaggagaactactgcaggaatccagacaacgatccgcaggggccctggtgctatactactgatccagaaaagagatatgactactgcgacattcttgagtgtgaagaggaatgtatgcattgcagtggagaaaactatgacggcaaaatttccaagaccatgtctggactggaatgccaggcctgggactctcagagcccacacgctcatggatacattccttccaaatttccaaacaagaacctgaagaagaattactgtcgtaaccccgatagggagctgcggccttggtgtttcaccaccgaccccaacaagcgctgggaactttgngacatcccccgctgcacaacacctccaccatcttctggtcccacctaccagtgtctgaagggaacaggtgaaaactatcgcgggaatgtggctgttaccgtgtccgggcacacctgtcagcactggagtgcacagacccctcacacacataacaggacaccagaaaacttcccctgcaaaaatttggatgaaaactactgccgcaatcctgacggaaaaagggccccatggtgccatacaaccaacagccaagtgcggtgggagtactgtaagataccgtcctgtgactcctccccagtatccacggaacaattggctcccacagcaccacctgagctaacccctgtggtccaggactgctaccatggtgatggacagagctaccgaggcacatcctccaccaccaccacaggaaagaagtgtcagtcttggtcatctatgacaccacaccggcaccagaagaccccagaaaactacccaaatgctggcctgacaatgaactactgcaggaatccagatgccgataaaggcccctggtgttttaccacagaccccagcgtcaggtgggagtactgcaacctgaaaaaatgctcaggaacagaagcgagtgttgtagcacctccgcctgttgtcctgcttccagatgtagagactccttccgaagaagactgtatgtttgggaatgggaaaggataccgaggcaagagggcgaccactgttactgggacgccatgccaggactgggctgcccaggagccccatagacacagcattttcactccagagacaaatccacgggcgggtctggaaaaaaattactgccgtaaccctgatggtgatgtaggtggtccctggtgctacacgacaaatccaagaaaactttacgactactgtgatgtccctcagtgtggtaggttgccttctttttggtaaggaaactgcttacttaatatggatttgcaacaaaaaaggaaaagggcttctgagcagactgcttctggggaggagatagctgccctctccatcagaccccactcttcatcatgggcatcttgaatctgccctactattggccacatttgttagaggaacacctgcccatcgccccaggcacacataaataaaataaatgtaaaattcccaaagagcaagcttagaggtaatctagtcagccccaggatggtcccactgaatgctgccatgtctagcgtgggatgcatgaaaaatttagagtcattcggatgaaaaactttccctttccacagctgagaagtaagaaagaaaatacaaacagcaggaaacaggtaagcatgtaacgcacattgtaaacctcagatggccatcctaggaattcaatgaaaggtagtgcagctctttagccccagatggcctttcttataagtttactactcacaagtcacattagtgacatagcttagagactgcttgttgggttccatcctcattgctctgagactcttgttgggagtatgaggcttggatcaggggaaggggagttgacattagttcttaaagaattggaataacaaatccatgggtatttctga

SEQ ID NO: 423023 - DNA, 2174 bp, Homo sapiens
  misc_feature (825)..(825): n is a, c, g, or t
aacaacatcctgggattgggacccactttctgggcactgctggccagtcccaaaatggaacataaggaagtggttcttctacttcttttatttctgaaatcaggtcaaggagagcctctggatgactatgtgaatacccagggggcttcactgttcagtgtcactaagaagcagctgggagcaggaagtatagaagaatgtgcagcaaaatgtgaggaggacgaagaattcacctgcagggcattccaatatcacagtaaagagcaacaatgtgtgataatggctgaaaacaggaagtcctccataatcattaggatgagagatgtagttttatttgaaaagaaagtgtatctctcagagtgcaagactgggaatggaaagaactacagagggacgatgtccaaaacaaaaaatggcatcacctgtcaaaaatggagttccacttctccccacagacctagattctcacctgctacacacccctcagagggactggaggagaactactgcaggaatccagacaacgatccgcaggggccctggtgctatactactgatccagaaaagagatatgactactgcgacattcttgagtgtgaagaggaatgtatgcattgcagtggagaaaactatgacggcaaaatttccaagaccatgtctggactggaatgccaggcctgggactctcagagcccacacgctcatggatacattccttccaaatttccaaacaagaacctgaagaagaattactgtcgtaaccccgatagggagctgcggccttggtgtttcaccaccgaccccaacaagcgctgggaactttgngacatcccccgctgcacaacacctccaccatcttctggtcccacctaccagtgtctgaagggaacaggtgaaaactatcgcgggaatgtggctgttaccgtgtccgggcacacctgtcagcactggagtgcacagacccctcacacacataacaggacaccagaaaacttcccctgcaaaaatttggatgaaaactactgccgcaatcctgacggaaaaagggccccatggtgccatacaaccaacagccaagtgcggtgggagtactgtaagataccgtcctgtgactcctccccagtatccacggaacaattggctcccacagcaccacctgagctaacccctgtggtccaggactgctaccatggtgatggacagagctaccgaggcacatcctccaccaccaccacaggaaagaagtgtcagtcttggtcatctatgacaccacaccggcaccagaagaccccagaaaactacccaaatgctggcctgacaatgaactactgcaggaatccagatgccgataaaggcccctggtgttttaccacagaccccagcgtcaggtgggagtactgcaacctgaaaaaatgctcaggaacagaagcgagtgttgtagcacctccgcctgttgtcctgcttccagatgtagagactccttccgaagaagactgtatgtttgggaatgggaaaggataccgaggcaagagggcgaccactgttactgggacgccatgccaggactgggctgcccaggagccccatagacacagcattttcactccagagacaaatccacgggcgggtctggaaaaaaattactgccgtaaccctgatggtgatgtaggtggtccctggtgctacacgacaaatccaagaaaactttacgactactgtgatgtccctcagtgtgcggccccttcatttgattgtgggaagcctcaagtggagccgaagaaatgtcctggaagggttgtaggggggtgtgtggcccacccacattcctggccctggcaagtcagtcttagaacaaggtttggaatgcacttctgtggaggcaccttgatatccccagagtgggtgttgactgctgcccactgcttggagaagtccccaaggccttcatcctacaaggtcatcctgggtgcacaccaagaagtgaatctcgaaccgcatgttcaggaaatagaagtgtctaggctgttcttggagcccacacgaaaagatattgccttgctaaagctaagcaggactgctggattctgtagtaaggtgacatagctatgacatttgttaaaaataaactctgtacttaactttgatttgagtaaattttggttttggtcttcaac

SEQ ID NO: 423024 - DNA, 2028 bp, Homo sapiens
  misc_feature (825)..(825): n is a, c, g, or t
  misc_feature (1880)..(1880): n is a, c, g, or t
aacaacatcctgggattgggacccactttctgggcactgctggccagtcccaaaatggaacataaggaagtggttcttctacttcttttatttctgaaatcaggtcaaggagagcctctggatgactatgtgaatacccagggggcttcactgttcagtgtcactaagaagcagctgggagcaggaagtatagaagaatgtgcagcaaaatgtgaggaggacgaagaattcacctgcagggcattccaatatcacagtaaagagcaacaatgtgtgataatggctgaaaacaggaagtcctccataatcattaggatgagagatgtagttttatttgaaaagaaagtgtatctctcagagtgcaagactgggaatggaaagaactacagagggacgatgtccaaaacaaaaaatggcatcacctgtcaaaaatggagttccacttctccccacagacctagattctcacctgctacacacccctcagagggactggaggagaactactgcaggaatccagacaacgatccgcaggggccctggtgctatactactgatccagaaaagagatatgactactgcgacattcttgagtgtgaagaggaatgtatgcattgcagtggagaaaactatgacggcaaaatttccaagaccatgtctggactggaatgccaggcctgggactctcagagcccacacgctcatggatacattccttccaaatttccaaacaagaacctgaagaagaattactgtcgtaaccccgatagggagctgcggccttggtgtttcaccaccgaccccaacaagcgctgggaactttgngacatcccccgctgcacaacacctccaccatcttctggtcccacctaccagtgtctgaagggaacaggtgaaaactatcgcgggaatgtggctgttaccgtgtccgggcacacctgtcagcactggagtgcacagacccctcacacacataacaggacaccagaaaacttcccctgcaaaaatttggatgaaaactactgccgcaatcctgacggaaaaagggccccatggtgccatacaaccaacagccaagtgcggtgggagtactgtaagataccgtcctgtgactcctccccagtatccacggaacaattggctcccacagcaccacctgagctaacccctgtggtccaggactgctaccatggtgatggacagagctaccgaggcacatcctccaccaccaccacaggaaagaagtgtcagtcttggtcatctatgacaccacaccggcaccagaagaccccagaaaactacccaaatgctggcctgacaatgaactactgcaggaatccagatgccgataaaggcccctggtgttttaccacagaccccagcgtcaggtgggagtactgcaacctgaaaaaatgctcaggaacagaagcgagtgttgtagcacctccgcctgttgtcctgcttccagatgtagagactccttccgaagaagactgtatgtttgggaatgggaaaggataccgaggcaagagggcgaccactgttactgggacgccatgccaggactgggctgcccaggagccccatagacacagcattttcactccagagacaaatccacgggcgggtctggaaaaaaattactgccgtaaccctgatggtgatgtaggtggtccctggtgctacacgacagtgggaagcctcaagtggagccgaagaaatgtcctggaagggttgtaggggggtgtgtggcccacccacattcctggccctggcaagtcagtcttagaacaaggtttggaatgcacttctgtggaggcaccttgatatccccagagtgggtgttgactgctgcccactgcttggagaagtcccaggcntcatctacaggtcatctgggtgccacaggagtgatctcgacgctgtcggaatgaatgttggcgtctggagcccgaagtgctgttactagagctgcgctctggaccagtgtggtccattggctacggcggttccgggggacgttgctgc

SEQ ID NO: 423025 - DNA, 1912 bp, Homo sapiens
  misc_feature (825)..(825): n is a, c, g, or t
  misc_feature (1809)..(1809): n is a, c, g, or t
  misc_feature (1857)..(1857): n is a, c, g, or t
aacaacatcctgggattgggacccactttctgggcactgctggccagtcccaaaatggaacataaggaagtggttcttctacttcttttatttctgaaatcaggtcaaggagagcctctggatgactatgtgaatacccagggggcttcactgttcagtgtcactaagaagcagctgggagcaggaagtatagaagaatgtgcagcaaaatgtgaggaggacgaagaattcacctgcagggcattccaatatcacagtaaagagcaacaatgtgtgataatggctgaaaacaggaagtcctccataatcattaggatgagagatgtagttttatttgaaaagaaagtgtatctctcagagtgcaagactgggaatggaaagaactacagagggacgatgtccaaaacaaaaaatggcatcacctgtcaaaaatggagttccacttctccccacagacctagattctcacctgctacacacccctcagagggactggaggagaactactgcaggaatccagacaacgatccgcaggggccctggtgctatactactgatccagaaaagagatatgactactgcgacattcttgagtgtgaagaggaatgtatgcattgcagtggagaaaactatgacggcaaaatttccaagaccatgtctggactggaatgccaggcctgggactctcagagcccacacgctcatggatacattccttccaaatttccaaacaagaacctgaagaagaattactgtcgtaaccccgatagggagctgcggccttggtgtttcaccaccgaccccaacaagcgctgggaactttgngacatcccccgctgcacaacacctccaccatcttctggtcccacctaccagtgtctgaagggaacaggtgaaaactatcgcgggaatgtggctgttaccgtgtccgggcacacctgtcagcactggagtgcacagacccctcacacacataacaggacaccagaaaacttcccctgcaaaaatttggatgaaaactactgccgcaatcctgacggaaaaagggccccatggtgccatacaaccaacagccaagtgcggtgggagtactgtaagataccgtcctgtgactcctccccagtatccacggaacaattggctcccacagcaccacctgagctaacccctgtggtccaggactgctaccatggtgatggacagagctaccgaggcacatcctccaccaccaccacaggaaagaagtgtcagtcttggtcatctatgacaccacaccggcaccagaagaccccagaaaactacccaaatgctggcctgacaatgaactactgcaggaatccagatgccgataaaggcccctggtgttttaccacagaccccagcgtcaggtgggagtactgcaacctgaaaaaatgctcaggaacagaagcgagtgttgtagcacctccgcctgttgtcctgcttccagatgtagagactccttccgaagaagactgtatgtttgggaatgggaaaggataccgaggcaagagggcgaccactgttactgggacgccatgccaggactgggctgcccaggagccccatagacacagcattttcactccagagacaaatccacgggcgggtctggaaaaaaataatccaagaaaactttacgactactgtgatgtccctcagtgtgcggccccttcatttgattgtgggaagcctcaagtggagccgaagaaatgtcctggaagggttgtaggggggtgtgtggcccacccacattcctggccctggcaagtcagtcttagaacaaggttngatgactctgtgagcacctgatatccgagtggtgtgctgtgcactgtngagagtccaaagctatctcaagcatctggtgcacagagtgattgaccgtgtagaa

SEQ ID NO: 423026 - DNA, 1086 bp, Homo sapiens
gtatttttagtagagacgaggtttcactgtgttagccaggatggtctcaatttcctgaccttgggatccacccacctcagtctcccaaagtgcggggattacagacgtgagccaccgtgcccggccgcactacaggtatttaaccaggagctgaactccttgactccactccttgattttttaggacctaagtgtgaaacaggctacctcatcatggaccccaataggtcagactttgacgggccgtgacaataaccaggtaaatcgtctgaggcaacagcagaccatggctatgacgccactccaagcaggatggtcgggcccggaggactgaacatggcctcagcagtcacctcggcagttgccatgccaggaaagacgccccacagcccactggagagacagaagaatctgtgtgaatcttctttacctggcctgaggcatcaattcaggcacagcagaacactggccaggaaactgaacgtgacctgaatgtcttccaggctgagacaggtcctgagtgcaatcccagagggcacacgtggtcccctagaaacaacgaattcacaaggtcaggtgccccagccgggcacgcacgcctcaggttgtgaggttaacagggatccaaggtggcttcccatcgtcgggcctctgtccagtctggatcattgggtttaggccttgacttcagagggcctgcctgggactgagttccaaaccattctgtttatccatgacatgagtttgttagtcccaccttatcaagtgtggacagtctctggaggagttctgcacagagcccaggagccaaggcagtcctctgcctctcctcgtcagcaccgtgaggaagccgaggtgtgggctcagcagacggtccaagtccacagccgccacagtccatggaaaggcagcaagaggacctcttgtgtttggttttttaggaggaggagaaagcttttaggagcaggtctgaaaaataaagatcattattattttttccctttccctgagcctcccagatgccagttttgttttgtttttctgttacctgtgtgtcccatgtagtaatcaaaacttaagaacaaa

SEQ ID NO: 423027 - DNA, 1825 bp, Homo sapiens
atttctctctttttaaaatctttttaaaagggaattggctgcttaaagccaaagtaatgataacgtatttggagtttatttagaagtaaagtgtgatgacgataacacttaagtgtgaatttttaaatatagttgagtagactgcatcatctgagttagaagcctattccttcagggctcggggtagcttgaatttgtagcaggcacatgacagaaattgtatgtattgtggatctgcatgtgtgctgagtattccctatttctttgatcccttttcccccattttctgctctgctcccccctgaggctgtcttctagagactggggtttcttcataggtttgaacagtgggagataccagaggtgggaggagaaaaagttatttattaccgttcccttcctcctgcctggaccatggtaggcttctgtgttcccgtaaggatacagcttcctttgggaagccccatctatggctgtagatctctcggtttcagttgacaccattccctctccatgatcttcagacttaactactactgggtgcttccccaacccactggttgggtgtctttaattgtgaacacatatttgtaaatagtgcctttattaattgttcttgagttaatattctgagtgtgccatttattttctgtgccatctgttaaatgatgagcatttaataaaattgtgataatcagttatcagtacaagtgccgcatagtgcataggctgaaatgtctcaagattccccacactacatatcagtattttctatctgtatctggacaatgcagtagaaattataacaaatacaaagttctttgtgcttttctgctgcatatgtcagtggctctggagattgttaccatctgctacatatataaatagacttgcagttattactaagctcctcttcagtaatagaaagacttatgaagtcttttactacctctgggttagccaaacaaccttcaaaaagcattgttatttaggttaaatatctgtggacaagaaacaagataatcagttactgagtgaagaaagacgggaatgatgtcccatacttcccagctctctaaagtgttatgctgtacaattaaaatacccctgacccatcatctgctaccattcgttgtgggataattcatgtaatctctaacctgtgggcaagtctttacccttcagtagtcaagattacgttagagacttcgtccacgaatccacaccacctttcccatcagttctcaccggaaatatgctgccaaaaagaaaatcagcttttctaagatcaagccagagttgcttctcttacaaccttacggcgctaatgcattaagttgaagtcgactgccaaagaggcccagcagagggcagcacccccatcatttttttgaatttctcccttaggaattttgccttcctttgtcttctgtccaccaggccttctctccagctggacacaaacctcctttgacgggaaataattgccgttaggcttcacagtagtgctttttcctttcacttggatttgcattttaacctgcatttcgaagatttttatacatgttttctatttccgacaatgccaggaggcttcattgacgttgtagtctgtgttaataaacttgtgtatcactctgctctgatcttttaggaattaacttgcaaatgaaatgaatatgttgggactttggcataatttgaatatagcattgtgtgagttgtgattgtctcttcctaattgtgctgtaataacctgtgtatgagaataaaatgatttccaccatcaggattctcccatgcccccctttattttgccatagac

SEQ ID NO: 423028 - DNA, 1786 bp, Homo sapiens
atttctctctttttaaaatctttttaaaagggaattggctgcttaaagccaaagtaatgataacgtatttggagtttatttagaagtaaagtgtgatgacgataacacttaagtgtgaatttttaaatatagttgagtagactgcatcatctgagttagaagcctattccttcagggctcggggtagcttgaatttgtagcaggcacatgacagaaattgtatgtattgtggatctgcatgtgtgctgagtattccctatttctttgatcccttttcccccattttctgctctgctcccccctgaggctgtcttctagagactggggtttcttcataggtttgaacagtgggagataccagaggtgggaggagaaaaagttatttattaccgttcccttcctcctgcctggaccatggtaggcttctgtgttcccgtaaggatacagcttcctttgggaagccccatctatggctgtagatctctcggtttcagttgacaccattccctctccatgatcttcagacttaactactactgggtgcttccccaacccactggttgggtgtctttaattgtgaacacatatttgtaaatagtgcctttattaattgttcttgagttaatattctgagtgtgccatttattttctgtgccatctgttaaatgatgagcatttaataaaattgtgataatcagttatcagtacaagtgccgcatagtgcataggctgaaatgtctcaagattccccacactacatatcagtattttctatctgtatctggacaatgcagtagaaattataacaaatacaaagttctttgtgcttttctgctgcatatgtcagtggctctggagattgttaccatctgctacatatataaatagacttgcagttattactaagctcctcttcagtaatagaaagacttatgaagtcttttactacctctgggttagccaaacaaccttcaaaaagcattgttatttaggttaaatatctgtggacaagaaacaagataatcagttactgagtgaagaaagacgggaatgatgtcccatacttcccagctctctaaagtgttatgctgtacaattaaaatacccctgacccatcatctgctaccattcgttgtgggataattcatgtaatctctaacctgtgggcaagtctttacccttcagtagtcaagattacgttagagacttcgtccacgaatccacaccacctttcccatcagttctcaccggaaatatgctgccaaaaagaaaatcagcttttctaagatcaagccagagttgcttctcttacaaccttacggcgctaatgcattaagttgaagtcgactgccaaagaggcccagcagagggcagcacccccatcatttttttgaatttctcccttaggaattttgccttcctttgtcttctgtccaccaggccttctctccagctggacacaaacctcctttgacgggaaataattgccgttaggcttcacagtagtgctttttcctttcacttggatttgcattttaacctgcatttcgaagatttttatacatgttttctatttccgacaatgccaggaggcttcattgacgttgtagtctgtgttaataaacttgtgtatcactctgctctgatcttttaggaattaacttgcaaatgaaatgaatatgttgggactttggcataatttgaatatagcattgtgtgagttgtgattgtctcttcctaattgtgctgtaataacctgtgtatgagaataaaatgatttccacca

SEQ ID NO: 423029 - DNA, 2223 bp, Homo sapiens
  misc_feature (783)..(783): n is a, c, g, or t
tagttctgcgcgttcacgtccccgatcgggccgtgtccgccgcggccctgcgaggtccgaggggcaatagccctctggaacaagacaattcatgtgagataagaaagaagagcccacaagaccaaggatgtattctcagtttacagaccactgaccagaggccactccagggtgtcaggactaagagaagtcacaaaacagcagatttcccaagagcagcggaaaatgatccagtcacagatatcatttgaggatgtggctgtggatttcacgctggaggaatggcagctacttaatcctactcagaagaacttgtacagagatgtgatgttggagaactatagcaatctggttttcttggaagtctggctagataatcccaaaatgtggctccgagataatcaagacaaccttaaaagtatggagagaggccataaatatgatgtttttggaaaaatatttaattcaagcataaacattgttcatgtaggactgcgatcccataaatgtggcacaggagaaaaaagtttgaaatgtccttttgatttgcttattccaaaaaataattgtgaaagaaagaaaattgatgaactcaataagaaattattgttctgtatcaaacctggcagaacccatggtgggataaaatactgtgattgcagtacatgtagaaaatccagcaacgaagagccatggctcactgctaatcacataacacacacaggagtctatttatgcatggaatgtggcagattttttaacaagaagtcacaacttgttatncaccagagaactcatacaggagagaagccctatcaatgcagtgagtgtggaaaagccttttcacagaagtcactgctcacggttcatcaaagaactcactcaggagaaaaaccgcatgggtgcagcgaatgtcagaaagcttttagtaggaagtcactcctcattttacatcagagaattcatactggagagaagccgtatggatgcagtgaatgtggaaaagccttcagtaggaagtcgcagcttaaaagacatcagataacgcacacaatagagaaaccctacagttgcagtgagtgtgggaaagcattctcccagaaattaaaactcatcacacatcagagagcgcacacaggagagaaaccctatccatgtagtcactgtggaaaagccttcttttggaagtcgcagctgattactcatcagaggacccacacagggaagaaaccttacggatgtggtgagtgtcaaaaagccttcagcaggaactcacttctcattaggcatcagaggattcatacaggagagaagccctacgaatgcaacgaatgtggtgaagccttcatcagaaaaccacagctgattaaacatcagataactcacacaggttaaatatctgtggacaagaaacaagataatcagttactgagtgaagaaagacgggaatgatgtcccatacttcccagctctctaaagtgttatgctgtacaattaaaatacccctgacccatcatctgctaccattcgttgtgggataattcatgtaatctctaacctgtgggcaagtctttacccttcagtagtcaagattacgttagagacttcgtccacgaatccacaccacctttcccatcagttctcaccggaaatatgctgccaaaaagaaaatcagcttttctaagatcaagccagagttgcttctcttacaaccttacggcgctaatgcattaagttgaagtcgactgccaaagaggcccagcagagggcagcacccccatcatttttttgaatttctcccttaggaattttgccttcctttgtcttctgtccaccaggccttctctccagctggacacaaacctcctttgacgggaaataattgccgttaggcttcacagtagtgctttttcctttcacttggatttgcattttaacctgcatttcgaagatttttatacatgttttctatttccgacaatgccaggaggcttcattgacgttgtagtctgtgttaataaacttgtgtatcactctgctctgatcttttaggaattaacttgcaaatgaaatgaatatgttgggactttggcataatttgaatatagcattgtgtgagttgtgattgtctcttcctaattgtgctgtaataacctgtgtatgagaataaaatgatttccaccatcaggattctcccatgcccccctttattttgccatagac

SEQ ID NO: 423030 - DNA, 1089 bp, Homo sapiens
tagttctgcgcgttcacgtccccgatcgggccgtgtccgccgcggccctgcgaggtccgaggggcaatagccctctggaacaagacaattcatgtgagataagaaagaagagcccacaagaccaaggatgtattctcagtttacagaccactgaccagaggccactccagggtgtcaggactaagagaagtcacaaaacagcagatttcccaagagcagcggcccaataggtcagactttgacgggccgtgacaataaccaggtaaatcgtctgaggcaacagcagaccatggctatgacgccactccaagcaggatggtcgggcccggaggactgaacatggcctcagcagtcacctcggcagttgccatgccaggaaagacgccccacagcccactggagagacagaagaatctgtgtgaatcttctttacctggcctgaggcatcaattcaggcacagcagaacactggccaggaaactgaacgtgacctgaatgtcttccaggctgagacaggtcctgagtgcaatcccagagggcacacgtggtcccctagaaacaacgaattcacaaggtcaggtgccccagccgggcacgcacgcctcaggttgtgaggttaacagggatccaaggtggcttcccatcgtcgggcctctgtccagtctggatcattgggtttaggccttgacttcagagggcctgcctgggactgagttccaaaccattctgtttatccatgacatgagtttgttagtcccaccttatcaagtgtggacagtctctggaggagttctgcacagagcccaggagccaaggcagtcctctgcctctcctcgtcagcaccgtgaggaagccgaggtgtgggctcagcagacggtccaagtccacagccgccacagtccatggaaaggcagcaagaggacctcttgtgtttggttttttaggaggaggagaaagcttttaggagcaggtctgaaaaataaagatcattattattttttccctttccctgagcctcccagatgccagttttgttttgtttttctgttacctgtgtgtcccatgtagtaatcaaaacttaagaacaaa

SEQ ID NO: 423031 - DNA, 805 bp, Homo sapiens
tagttctgcgcgttcacgtccccgatcgggccgtgtccgccgcggccctgcgaggtccgagggactcattctgatgaaggaaagagcgtccctgtgcagctgcgtgtccttcagttctttggctctgattccgtgtctggcttcatctaagtggcctggtccatgggcagtgaagaaatgtaaagtgcaatagccctctggaacaagacaattcatgtgagataagaaagaagagcccacaagaccaaggatgtattctcagtttacagaccactgaccagaggccactccagggtgtcaggactaagagaagtcacaaaacagcagatttcccaagagcagcggaaaatgatccagtcacaggtgggttatcggtttatcctctgtttcatgaaaatgatccagtcacaggtgggttatcggtttatcctctgtttcatgaaaatgatccagtcacaggtgggttatcggtttatcctctgtttcatgaaaatgatccagtcacaggtgggttatcggtttatcctctgtttcatgaaaatgatccagtcacaggtgggttatcggtttatcctctgtttcgtgggtgttatgaggcttacagaaatctctgcaacacacagaagggtctaaatacatttaaataagagaaaatataaacttgggaaagaagatgtccaaagaagcacaaagtagattatagaaacatacaaaagtctcagctgggcatggtggctcatgcctgtaatcccagccctttgggaggccgaggagggcagatcatttgaggtcaggagtttgagac

SEQ ID NO: 423032 - DNA, 1142 bp, Homo sapiens
tagttctgcgcgttcacgtccccgatcgggccgtgtccgccgcggccctgcgaggtccgaggggcaatagccctctggaacaagacaattcatgtgagataagaaagaagagcccacaagaccaaggatgtattctcagtttacagaccactgaccagaggccactccagggtgtcaggactaagagaagtcacaaaacagcagatttcccaagagcagcggaaaatgatccagtcacaggacctaagtgtgaaacaggctacctcatcatggaccccaataggtcagactttgacgggccgtgacaataaccaggtaaatcgtctgaggcaacagcagaccatggctatgacgccactccaagcaggatggtcgggcccggaggactgaacatggcctcagcagtcacctcggcagttgccatgccaggaaagacgccccacagcccactggagagacagaagaatctgtgtgaatcttctttacctggcctgaggcatcaattcaggcacagcagaacactggccaggaaactgaacgtgacctgaatgtcttccaggctgagacaggtcctgagtgcaatcccagagggcacacgtggtcccctagaaacaacgaattcacaaggtcaggtgccccagccgggcacgcacgcctcaggttgtgaggttaacagggatccaaggtggcttcccatcgtcgggcctctgtccagtctggatcattgggtttaggccttgacttcagagggcctgcctgggactgagttccaaaccattctgtttatccatgacatgagtttgttagtcccaccttatcaagtgtggacagtctctggaggagttctgcacagagcccaggagccaaggcagtcctctgcctctcctcgtcagcaccgtgaggaagccgaggtgtgggctcagcagacggtccaagtccacagccgccacagtccatggaaaggcagcaagaggacctcttgtgtttggttttttaggaggaggagaaagcttttaggagcaggtctgaaaaataaagatcattattattttttccctttccctgagcctcccagatgccagttttgttttgtttttctgttacctgtgtgtcccatgtagtaatcaaaacttaagaacaaa

SEQ ID NO: 423033 - DNA, 2714 bp, Homo sapiens
cggacttagaaagctagaagaccctgatgatagcagccctggaaaaatattttctaccctgaagagaccgcaagtggaaacgaaagacagaattgcttacgaatatgtattgctggattttactctacaagcttcatcaaacccagaagtcatcaagataaattcaattctggatatagtaacaaaagtggaaaactattatcttaaaggatatattgtcggggctattcatcctgttatacaacctgtggggcagcgaaaacacctacctgcaagttacctatacagagtggtgctattgcgcttgaaattaagcccaaagaattcggcagcacccagtggacaaagacgcccaaggctcgtgattgaggaatgtcccctaacttctgaggcacaaacaaatgacgcagcaaaagaactgatagaaaagattaatgtcgctgctaaaagaggaatgaaatttgttggattcatatcacagcattattctccatctaaattctgcaatggaaccaaccatgatggagatatagaatcgatgctacatgtgagacacggttcagatgaaaactgtagaagttggaatgaagggacgttaagtgggcagtcatctgaaagcggaattgaggaagaacttcatcatgaaagtggacagtatcaaatggaacaaaatggcagccctacttcctctaaatcaagaaagggagaagcctcagataacaaattgtatacagtcttcaatgcttttgatgatgattcaacctcctgggcctatcaggaaggcatcctgtcaatgaaagtaacaagaaaaggatcagtcattagtacacttgatgctgattggctggagttaactaccttttattataaacaaggcttgtctttaattgattcttttgtattctgggaaacatctaaaggggaacatttgcctaaatctttggaaggattttttatctatgaagaagaaggttctggagttccaggttctagtaggaaaggaaatgatgccatcgtagtagaacaatggactgttattgagggatgtgaaatcaaaacagattatggccctctgctgcacactctggctgaattcggatggcttctgacaagcgtgttgcccacacctgtattgagacatgacagtgaagggaatttggctacaaagcagatcgtattccttcagaggccagttatgtggaattcagctgctcaaacaccagataagaaagccagccgccacataaaaggtgaagacaagaataaagccactagtagaagcatcggattagacacaacctcgtcacaacctgcagagagcagacacctgcctgaggagtgccgcctttctccctcccgggaatgctggacaaaggagggaaggctggcacagcacaacagcttctctgggttcagcagcagtgacaacgtcctccgggaattagacgacggacagtttgatcaggaagatggagtgactcaggtcacttgtatgtgagccatgaggtgaagcaaaggaaggccctgtaaataattgttaaaatcattgccaactgaccttattgtattactttctctgcatttatgtaatatttttgaatttttccagacccagcctttcctctaatctatgtaaactttggcacaacctcccagacaaggaagaataaccaacatatttatacatttagaatcatgtttacacttctctcaactaaaacatctggttaaacagatgttccattcggttattacacaataatctatttcagcttctcatgaatgtacaaagtagactttcttacaattcctggtaaggagactgaatatctcaatcagtattttacccaattagagagagttctcaggaagttacagtcttatttaagctgaaaaataacctctctctctctttttttttctctctctctcatacacacacacagctaattagtgcaaataaatatctatttcccaaatataataattaatccacattttgtctttaactatagcatgtatatacaaagcaagcccctatgtgttaaaatattttttgaaaaaaatcttttttatgtatctttgcttttaaagggtcatgtcaccaaccctgtactgattcattgtacataaatgttgttgctcctaaaagcctaaaaatgcagacagcaaagcagcatctcttaaaattcaatatgaaaagaacccataatctcaatacataaataccttagtagagagtaagatttaatttttttttattttaaagtccaaatactatgaagaggaaaaatatcaacttcaatttgaaactgaagtcttttacatctgtctagatttgaattctgcttttattttgacttgttaaatcctgaagaatgttgaaacctagaattttcaatctggcaggagtagaaagatgctcatagcacacgcgatatgtatgataacatattttgtttcatcttgcttttctttccccttctaatagaggtggctttgccttgacccagcctttaacaatctttaaaattctacaaaataaaggattttcatttatctatgaaaggcttactttgaaagatggaacctccaagtgaattacaacttattctatcattgatgaattcagcctattatatatttttattaacattgatgttgacattgtaagatcattttaataataaaacatcatttttattgaaaaaaag

SEQ ID NO: 423034 - DNA, 1896 bp, Homo sapiens
gtttttccttcagtttcctatatgagttatttaaggatttagatggttttatgagccacttagtatttacaacccttcttaattgtaccctcttcctcacaggggaacatttgcctaaatctttggaaggattttttatctatgaagaagaaggttctggagttccaggttctagtaggaaaggaaatgatgccatcgtagtagaacaatggactgttattgagggatgtgaaatcaaaacagattatggccctctgctgcacactctggctgaattcggatggcttctgacaagcgtgttgcccacacctgtattgagacatgacagtgaagggaatttggctacaaagcagatcgtattccttcagaggccagttatgtggaattcagctgctcaaacaccagataagaaagccagccgccacataaaaggtgaagacaagaataaagccactagtagaagcatcggattagacacaacctcgtcacaacctgcagagagcagacacctgcctgaggagtgccgcctttctccctcccgggaatgctggacaaaggagggaaggctggcacagcacaacagcttctctgggttcagcagcagtgacaacgtcctccgggaattagacgacggacagtttgatcaggaagatggagtgactcaggtcacttgtatgtgagccatgaggtgaagcaaaggaaggccctgtaaataattgttaaaatcattgccaactgaccttattgtattactttctctgcatttatgtaatatttttgaatttttccagacccagcctttcctctaatctatgtaaactttggcacaacctcccagacaaggaagaataaccaacatatttatacatttagaatcatgtttacacttctctcaactaaaacatctggttaaacagatgttccattcggttattacacaataatctatttcagcttctcatgaatgtacaaagtagactttcttacaattcctggtaaggagactgaatatctcaatcagtattttacccaattagagagagttctcaggaagttacagtcttatttaagctgaaaaataacctctctctctctttttttttctctctctctcatacacacacacagctaattagtgcaaataaatatctatttcccaaatataataattaatccacattttgtctttaactatagcatgtatatacaaagcaagcccctatgtgttaaaatattttttgaaaaaaatcttttttatgtatctttgcttttaaagggtcatgtcaccaaccctgtactgattcattgtacataaatgttgttgctcctaaaagcctaaaaatgcagacagcaaagcagcatctcttaaaattcaatatgaaaagaacccataatctcaatacataaataccttagtagagagtaagatttaatttttttttattttaaagtccaaatactatgaagaggaaaaatatcaacttcaatttgaaactgaagtcttttacatctgtctagatttgaattctgcttttattttgacttgttaaatcctgaagaatgttgaaacctagaattttcaatctggcaggagtagaaagatgctcatagcacacgcgatatgtatgataacatattttgtttcatcttgcttttctttccccttctaatagaggtggctttgccttgacccagcctttaacaatctttaaaattctacaaaataaaggattttcatttatctatgaaaggcttactttgaaagatggaacctccaagtgaattacaacttattctatcattgatgaattcagcctattatatatttttattaacattgatgttgacattgtaagatcattttaataataaaacatcatttttattgaaaaaaag

SEQ ID NO: 423035 - DNA, 2653 bp, Homo sapiens
cggacttagaaagctagaagaccctgatgatagcagccctggaaaaatattttctaccctgaagagaccgcaagtggaaacgaaagacagaattgcttacgaatatgtattgctggattttactctacaagcttcatcaaacccagaagtcatcaagataaattcaattctggatatagtaacaaaagtggaaaactattatcttaaaggatatattgtcggggctattcatcctgttatacaacctgtggggcagcgaaaacacctacctgcaagttacctatacagagtggtgctattgcgcttgaaattaagcccaaagaattcggcagcacccagtggacaaagacgcccaaggctcgtgattgaggaatgtcccctaacttctgaggcacaaacaaatgacgcagcaaaagaactgatagaaaagattaatgtcgctgctaaaagaggaatgaaatttgttggattcatatcacagcattattctccatctaaattctgcaatggaaccaaccatgatggagatatagaatcgatgctacatgtgagacacggttcagatgaaaactgtagaagttggaatgaagggacgttaagtgggcagtcatctgaaagcggaattgaggaagaacttcatcatgaaagtggacagtatcaaatggaacaaaatggcagccctacttcctctaaatcaagaaagggagaagcctcagataacaaattgtatacagtcttcaatgcttttgatgatgattcaacctcctgggcctatcaggaaggcatcctgtcaatgaaagtaacaagaaaaggatcagtcattagtacacttgatgctgattggctggagttaactaccttttattataaacaaggcttgtctttaattgattcttttgtattctgggaaacatctaaaggggaacatttgcctaaatctttggaaggattttttatctatgaagaagaaggttctggagttccaggttctagtaggaaaggaaatgatgccatcgtagtagaacaatggactgttattgagttctgacaagcgtgttgcccacacctgtattgagacatgacagtgaagggaatttggctacaaagcagatcgtattccttcagaggccagttatgtggaattcagctgctcaaacaccagataagaaagccagccgccacataaaaggtgaagacaagaataaagccactagtagaagcatcggattagacacaacctcgtcacaacctgcagagagcagacacctgcctgaggagtgccgcctttctccctcccgggaatgctggacaaaggagggaaggctggcacagcacaacagcttctctgggttcagcagcagtgacaacgtcctccgggaattagacgacggacagtttgatcaggaagatggagtgactcaggtcacttgtatgtgagccatgaggtgaagcaaaggaaggccctgtaaataattgttaaaatcattgccaactgaccttattgtattactttctctgcatttatgtaatatttttgaatttttccagacccagcctttcctctaatctatgtaaactttggcacaacctcccagacaaggaagaataaccaacatatttatacatttagaatcatgtttacacttctctcaactaaaacatctggttaaacagatgttccattcggttattacacaataatctatttcagcttctcatgaatgtacaaagtagactttcttacaattcctggtaaggagactgaatatctcaatcagtattttacccaattagagagagttctcaggaagttacagtcttatttaagctgaaaaataacctctctctctctttttttttctctctctctcatacacacacacagctaattagtgcaaataaatatctatttcccaaatataataattaatccacattttgtctttaactatagcatgtatatacaaagcaagcccctatgtgttaaaatattttttgaaaaaaatcttttttatgtatctttgcttttaaagggtcatgtcaccaaccctgtactgattcattgtacataaatgttgttgctcctaaaagcctaaaaatgcagacagcaaagcagcatctcttaaaattcaatatgaaaagaacccataatctcaatacataaataccttagtagagagtaagatttaatttttttttattttaaagtccaaatactatgaagaggaaaaatatcaacttcaatttgaaactgaagtcttttacatctgtctagatttgaattctgcttttattttgacttgttaaatcctgaagaatgttgaaacctagaattttcaatctggcaggagtagaaagatgctcatagcacacgcgatatgtatgataacatattttgtttcatcttgcttttctttccccttctaatagaggtggctttgccttgacccagcctttaacaatctttaaaattctacaaaataaaggattttcatttatctatgaaaggcttactttgaaagatggaacctccaagtgaattacaacttattctatcattgatgaattcagcctattatatatttttattaacattgatgttgacattgtaagatcattttaataataaaacatcatttttattgaaaaaaag

SEQ ID NO: 423036 - DNA, 448 bp, Homo sapiens
catcaacaagaatgatgtgccaggaacctacaaagagttacaaaacagggagaagggagttcatttgtatttgggtggagaggggaatgtggaggtagctctgagctggtcgttgaagatgagcaggattttgaagagctggggaaaaggacattcctggaggcagaaaggcagcatgtgctagaccagagggacaggaaacacccatctttttaactctcctggtcaccaatgtcttgtgtttcagaagaaagccagccgccacataaaaggtgaagacaagaataaagccactagtagaagcatcggattagacacaacctcgtcacaacctgcagagagcagacacctgcctgaggagtgccgcctttctccctcccgggaatgctggacaaaggagggaaggctggcacagcacaacagcttctctgggttcagcagcagtgac

SEQ ID NO: 423037 - DNA, 1575 bp, Homo sapiens
aaaaacgccatgggttaaatataaaatacatttaaaatggggaataagtttgagatattaaacattgacatattatccattggatcatttttagtttttgaggatttgggtttttttttttttgagttctgtttgtacagattgacatatcataacttctgttctttcttcaaggtcttccaaaggacaagatacttaaaaattttcaaatagaataaaactcattctattttgcaattctgttttgcagtatggatccattggaatcttttataagtataagctacattatgggacctttaatgatcctatttttcctctttcttgaagtattttacaatttcttcaccctaggaattattttaacaattatttgcaagagtgctgaagatgactaaaacaataagaaagcagaaaaatgatggaatcattgagaaggttgatgtaataataaagtaaataatcactattctcttattctttagttttcttattgtgttgcctaaagtattgcatcatttaagaaggtgtaaaagaagtctaaaggcacaatctttaggtttgtttgttacagctttcattgaacaaaaatgagaattcagaatttttcactttctactataatggcaaagagaataattgacagagaagacttttcacaattattagacaaatcagaagatcagtgcaaagagccaaatagaagcactgtaggccgtaatgatgtgggtgaaattaataatataagtgaaatctcaagactgagtctttggatgatgatactctagatcttctcaaacaccttaattttgatgagtgagcaatctgtttttaaggacaaaaaagaaacaggtattctcttccagttaatcattctgcagcaaggactctatcatgtagtagttttcagcaagaatctggaccatctcttttagctaaacgaatgcatgaccctatttcattcatcttttatgatgcttgtttatcagcattgacttcatactgcttttaagtggagaaatgctgaaggctggtatgaatataaaagtgattaaaaggaaatagattatgcagaagtagaaaaattcattggattcatcattgtaattggtgtttataaatctaaaattgaaaatgttttgcagtcatggaccaaagaagataactgttctcttttcaacacaattgggagccatcagtggttttagaagtgttgcaatttgacagaacaaatgcaagaaagaagaactagattaataagctagcgcctgttagaaatattttttgaaatctgaaatcaatatttataagataaatatgttccaagttcaccaaaagcagtagatgagcagttagttgcatccaaaagatgttacccatttcaggtatagatgccttcaagtccaggaatagttttgggttatcattaaaatgaaaatttagagtgaagtttttttacaatttaattattcctctgcaaagttttgctaagatgacttaaatataaaagattgaaaagattcgttgtatctagattgtaagtgataatgcctgtttttccttaatggaagcatt

SEQ ID NO: 423038 - DNA, 107 bp, Homo sapiens
aaaaaaaaaaaaaaaagaaaagaaaaaagaaaaaaaaggattccatttgaactaggaacattctctttgagtagcccaaaggagaaaaggaagtattaatgataata

SEQ ID NO: 423039 - DNA, 1915 bp, Homo sapiens
  misc_feature (667)..(667): n is a, c, g, or t
  misc_feature (860)..(860): n is a, c, g, or t
agcttttctggaaaacatctaatgtataaaacagtatattttttatctcacaattaaacttttcctgtacatcatttgattttatggctttaaaaaaatcattaaaggtgccaagtaatgattagagaaatgagttgttggggtcatattgttggcggaagaggagctgggatgaaggcgtgttccgggcctgctgaagttgtcacatagcatctcgcccacagttggatcgatcaacccgggaggtggagctgggcttggaatacggatccccgactatgaacctggcagggcaaagcctgaagtttgaaaatggccagtggatagcaggtgagctgcacttcctgccattttgtcaaacaagattgtaggaggaaatccccctttaactggttctgtccttcctccagagacaggggttagtggcggtgtggaccggagggaggttcagcgccttcgcaggcggaaccagcagttggaggaagagaacaatctcttgcggctgaaagtggacatcttattagacatggtgaggcaggtgatggggaagagaggcctagcttctccttttggggaggctccacctcgagtcacttaatccaacagatatctcctcaatgccagtttggccaggtacgttgctttgcatccaaagccacacgcaagnaacaagacacagttcctgccctcacagtgtagaggcaggtggaccgaccgtaagcataattacataaggacccagttggagtctgcacaggatctgcacagcacacgagggagaagttatttctgtcaagtcgggagagcttcccagaggaagggatatctgagctgaatgtggaaggataatggcaggaatngaggttagatgaaggcattccaggaagaggggtagagccggctcatggcttggaagtgtctcataccaagtaggcattaatcagtgcccagtacagaccagctgaggggctcacactgcattagtgttggtttcttgtggctgttaaaaatccagcaacccactgggcctagaggagcctgtgaaggttcagaggcaggagagcatacactgtagtggttaagagcacacactccagagcaaaatggcctgggttcctcacccagctctgctactgactaactgctctgtaacttaatttcttcagcaataaatggcataatagctaattgtggtggtgcacccctgtagtcccagctacttgggaggctaagacaggaggatggcttaacctcaggagtttgagagcagccttggctgcaaagtaagatgccatctttttttttttttttaaaaaggactaggctgggcatgatggctcatgcctgtaatcttagcattttgggatcacaggcatgagccaccacgcccggcctggatgtttttttttaaaaatgagcataatcgtagtatctacctcatagtgagttagtacaagaaaagcacccagcctggccgacagagcgagaccgtgtctcagaaaacaaacaaaccaaaaaacaaaaacaaaaaaaccctaaggaggaaagtggcattctatttccagcattttttcccctcatccccattatgggagctacagcttagaatcaatttcagctctaatcccttagccttacaatcaccagtatctgcctttgacgtcctctgagacctgctctccttcgtgcagggagtgccatgccctcgtgggtgacagcgtgctgacagagtggactgtgaatattcttcaagtacttgtggtcctgggtcatcaggggttgcattctacccagttacagagggtttcccatcgaggaggccagcagcatcagagaagtggcagggggcctttcctccgtgtgtagggccggccttgctaacccgaaacatttcctagaaatgtgctgcttgcta

SEQ ID NO: 423040 - DNA, 1162 bp, Homo sapiens
atgcgggtggcgggcaggcggcaggaggcgggtgggtcaaggtaactctgggctacagagtccttgctgggggttcggggagcgcttggaccccggcttctgggacgcgtcaggagaagggagcactggctttgctttcatcaggccaaagatgcctttctttgggaatacgttcagtccgaagaagacacctcctcggaagtcggcatctctctccaacctgcattctttggatcgatcaacccgggaggtggagctgggcttggaatacggatccccgactatgaacctggcagggcaaagcctgaagtttgaaaatggccagtggatagcagagacaggggttagtggcggtgtggaccggagggaggttcagcgccttcgcaggcggaaccagcagttggaggaagagaacaatctcttgcggctgaaagtggacatcttattagacatgctttcagagtccactgctgaatcccacttaatggagaaggaactggatgaactgaggatcagccggaagagaaaatgaagaccccagagacatttattggggagtaggatgtggctgagtgctttttttttggccagactagcggattcagtcctggaagagagtatcatataatgagacccacaggcactggcacccttgggttggcaatagaaggtgacatggaatggagaaaaccaagattccagatggggatagtaactagaaggtgcttcagatgcactgcctgcgggtgccagtctgaaaaccagaccgcacagaggcctggggctgctgatgagctttttggtgctctccacacacaagctcgcaaacacacatgtcccagaatagctctgttgggttgtgttgggagaagcggctggagttcattctctcacccccttatgttggtgtttggcgtgtgacagcagttctacagagctctgtgttggggtcatggatgagcggctctcttggctcttaaaggcaggcctctctcttcttgcctttaaagaatcctccttcctcacacctggcctcctctggcttcagcttctcagcagcaagcaccagccttccacaacaacactatatttttatgctactttcctgtttgcactactacttttttattaaacgatgttaaataatcaaactgtgaccaaa

SEQ ID NO: 423041 - DNA, 1302 bp, Homo sapiens
atgcgggtggcgggcaggcggcaggaggcgggtgggtcaaggtaactctgggctacagagtccttgctgggggttcggggagcgcttggaccccggcttctgggacgcgtcagaatattatccagcaatgcaaatgaacaaactataactacacacagctgcatggataaatgtcagaaacatgacgttgagtgtgagaagccagatgcaaacgaggactcactgtgcaattctgtgcatgtacagtggccaggagaagggagcactggctttgctttcatcaggccaaagatgcctttctttgggaatacgttcagtccgaagaagacacctcctcggaagtcggcatctctctccaacctgcattctttggatcgatcaacccgggaggtggagctgggcttggaatacggatccccgactatgaacctggcagggcaaagcctgaagtttgaaaatggccagtggatagcagagacaggggttagtggcggtgtggaccggagggaggttcagcgccttcgcaggcggaaccagcagttggaggaagagaacaatctcttgcggctgaaagtggacatcttattagacatgctttcagagtccactgctgaatcccacttaatggagaaggaactggatgaactgaggatcagccggaagagaaaatgaagaccccagagacatttattggggagtaggatgtggctgagtgctttttttttggccagactagcggattcagtcctggaagagagtatcatataatgagacccacaggcactggcacccttgggttggcaatagaaggtgacatggaatggagaaaaccaagattccagatggggatagtaactagaaggtgcttcagatgcactgcctgcgggtgccagtctgaaaaccagaccgcacagaggcctggggctgctgatgagctttttggtgctctccacacacaagctcgcaaacacacatgtcccagaatagctctgttgggttgtgttgggagaagcggctggagttcattctctcacccccttatgttggtgtttggcgtgtgacagcagttctacagagctctgtgttggggtcatggatgagcggctctcttggctcttaaaggcaggcctctctcttcttgcctttaaagaatcctccttcctcacacctggcctcctctggcttcagcttctcagcagcaagcaccagccttccacaacaacactatatttttatgctactttcctgtttgcactactacttttttattaaacgatgttaaataatcaaactgtgaccaaa

SEQ ID NO: 423042 - DNA, 1046 bp, Homo sapiens
atgcgggtggcgggcaggcggcaggaggcgggtgggtcaaggtaactctgggctacagagtccttgctgggggttcggggagcgcttggaccccggcttctgggacgcgtcagttggatcgatcaacccgggaggtggagctgggcttggaatacggatccccgactatgaacctggcagggcaaagcctgaagtttgaaaatggccagtggatagcagagacaggggttagtggcggtgtggaccggagggaggttcagcgccttcgcaggcggaaccagcagttggaggaagagaacaatctcttgcggctgaaagtggacatcttattagacatgctttcagagtccactgctgaatcccacttaatggagaaggaactggatgaactgaggatcagccggaagagaaaatgaagaccccagagacatttattggggagtaggatgtggctgagtgctttttttttggccagactagcggattcagtcctggaagagagtatcatataatgagacccacaggcactggcacccttgggttggcaatagaaggtgacatggaatggagaaaaccaagattccagatggggatagtaactagaaggtgcttcagatgcactgcctgcgggtgccagtctgaaaaccagaccgcacagaggcctggggctgctgatgagctttttggtgctctccacacacaagctcgcaaacacacatgtcccagaatagctctgttgggttgtgttgggagaagcggctggagttcattctctcacccccttatgttggtgtttggcgtgtgacagcagttctacagagctctgtgttggggtcatggatgagcggctctcttggctcttaaaggcaggcctctctcttcttgcctttaaagaatcctccttcctcacacctggcctcctctggcttcagcttctcagcagcaagcaccagccttccacaacaacactatatttttatgctactttcctgtttgcactactacttttttattaaacgatgttaaataatcaaactgtgaccaaa

SEQ ID NO: 423043 - DNA, 1287 bp, Homo sapiens
caaaccatagcaccaggatcgttagtagccacatgataaaatgtatgtcttcaagatttgaagacaatggcataaggtcagtgatccagctgcttgtacccctgactttttctgaccctaggagaagggagcactggctttgctttcatcaggccaaagatgcctttctttgggaatacgttcagtccgaagaagacacctcctcggaagtcggcatctctctccaacctgcattctgtgccaagtaatgattagagaaatgagttgttggggtcatattgttggcggaagaggagctgggatgaaggcgtgttccgggcctgctgaagttgtcacatagcatctcgcccacagttggatcgatcaacccgggaggtggagctgggcttggaatacggatccccgactatgaacctggcagggcaaagcctgaagtttgaaaatggccagtggatagcagagacaggggttagtggcggtgtggaccggagggaggttcagcgccttcgcaggcggaaccagcagttggaggaagagaacaatctcttgcggctgaaagtggacatcttattagacatgctttcagagtccactgctgaatcccacttaatggagaaggaactggatgaactgaggatcagccggaagagaaaatgaagaccccagagacatttattggggagtaggatgtggctgagtgctttttttttggccagactagcggattcagtcctggaagagagtatcatataatgagacccacaggcactggcacccttgggttggcaatagaaggtgacatggaatggagaaaaccaagattccagatggggatagtaactagaaggtgcttcagatgcactgcctgcgggtgccagtctgaaaaccagaccgcacagaggcctggggctgctgatgagctttttggtgctctccacacacaagctcgcaaacacacatgtcccagaatagctctgttgggttgtgttgggagaagcggctggagttcattctctcacccccttatgttggtgtttggcgtgtgacagcagttctacagagctctgtgttggggtcatggatgagcggctctcttggctcttaaaggcaggcctctctcttcttgcctttaaagaatcctccttcctcacacctggcctcctctggcttcagcttctcagcagcaagcaccagccttccacaacaacactatatttttatgctactttcctgtttgcactactacttttttattaaacgatgttaaataatcaaactgtgaccaaa

SEQ ID NO: 423044 - DNA, 1168 bp, Homo sapiens
caaaccatagcaccaggatcgttagtagccacatgataaaatgtatgtcttcaagatttgaagacaatggcataaggtcagtgatccagctgcttgtacccctgactttttctgaccctaggagaagggagcactggctttgctttcatcaggccaaagatgcctttctttgggaatacgttcagtccgaagaagacacctcctcggaagtcggcatctctctccaacctgcattctgtgccaagtaatgattagagaaatgagttgttggggtcatattgttggcggaagaggagctgggatgaaggcgtgttccgggcctgctgaagttgtcacatagcatctcgcccacagttggatcgatcaacccgggaggtggagctgggcttggaatacggatccccgactatgaacctggcagggcaaagcctgaagtttgaaaatggccagtggatagcagctttcagagtccactgctgaatcccacttaatggagaaggaactggatgaactgaggatcagccggaagagaaaatgaagaccccagagacatttattggggagtaggatgtggctgagtgctttttttttggccagactagcggattcagtcctggaagagagtatcatataatgagacccacaggcactggcacccttgggttggcaatagaaggtgacatggaatggagaaaaccaagattccagatggggatagtaactagaaggtgcttcagatgcactgcctgcgggtgccagtctgaaaaccagaccgcacagaggcctggggctgctgatgagctttttggtgctctccacacacaagctcgcaaacacacatgtcccagaatagctctgttgggttgtgttgggagaagcggctggagttcattctctcacccccttatgttggtgtttggcgtgtgacagcagttctacagagctctgtgttggggtcatggatgagcggctctcttggctcttaaaggcaggcctctctcttcttgcctttaaagaatcctccttcctcacacctggcctcctctggcttcagcttctcagcagcaagcaccagccttccacaacaacactatatttttatgctactttcctgtttgcactactacttttttattaaacgatgttaaataatcaaactgtgaccaaa

SEQ ID NO: 423045 - DNA, 2054 bp, Homo sapiens
  misc_feature (717)..(717): n is a, c, g, or t
  misc_feature (910)..(910): n is a, c, g, or t
caaaccatagcaccaggatcgttagtagccacatgataaaatgtatgtcttcaagatttgaagacaatggcataaggtcagtgatccagctgcttgtacccctgactttttctgaccctaggagaagggagcactggctttgctttcatcaggccaaagatgcctttctttgggaatacgttcagtccgaagaagacacctcctcggaagtcggcatctctctccaacctgcattctgtgccaagtaatgattagagaaatgagttgttggggtcatattgttggcggaagaggagctgggatgaaggcgtgttccgggcctgctgaagttgtcacatagcatctcgcccacagttggatcgatcaacccgggaggtggagctgggcttggaatacggatccccgactatgaacctggcagggcaaagcctgaagtttgaaaatggccagtggatagcagagacaggggttagtggcggtgtggaccggagggaggttcagcgccttcgcaggcggaaccagcagttggaggaagagaacaatctcttgcggctgaaagtggacatcttattagacatggtgaggcaggtgatggggaagagaggcctagcttctccttttggggaggctccacctcgagtcacttaatccaacagatatctcctcaatgccagtttggccaggtacgttgctttgcatccaaagccacacgcaagnaacaagacacagttcctgccctcacagtgtagaggcaggtggaccgaccgtaagcataattacataaggacccagttggagtctgcacaggatctgcacagcacacgagggagaagttatttctgtcaagtcgggagagcttcccagaggaagggatatctgagctgaatgtggaaggataatggcaggaatngaggttagatgaaggcattccaggaagaggggtagagccggctcatggcttggaagtgtctcataccaagtaggcattaatcagtgcccagtacagaccagctgaggggctcacactgcattagtgttggtttcttgtggctgttaaaaatccagcaacccactgggcctagaggagcctgtgaaggttcagaggcaggagagcatacactgtagtggttaagagcacacactccagagcaaaatggcctgggttcctcacccagctctgctactgactaactgctctgtaacttaatttcttcagcaataaatggcataatagctaattgtggtggtgcacccctgtagtcccagctacttgggaggctaagacaggaggatggcttaacctcaggagtttgagagcagccttggctgcaaagtaagatgccatctttttttttttttttaaaaaggactaggctgggcatgatggctcatgcctgtaatcttagcattttgggaggccaaggtggacgggtcacaaggtcaggagttcgagaccagcctgacctcaagtgatctccctgtcttggcctcccaaagtgctgagatcacaggcatgagccaccacgcccggcctggatgtttttttttaaaaatgagcataatcgtagtatctacctcatagtgagttagtacaagaaaagcacccagcctggccgacagagcgagaccgtgtctcagaaaacaaacaaaccaaaaaacaaaaacaaaaaaaccctaaggaggaaagtggcattctatttccagcattttttcccctcatccccattatgggagctacagcttagaatcaatttcagctctaatcccttagccttacaatcaccagtatctgcctttgacgtcctctgagacctgctctccttcgtgcagggagtgccatgccctcgtgggtgacagcgtgctgacagagtggactgtgaatattcttcaagtacttgtggtcctgggtcatcaggggttgcattctacccagttacagagggtttcccatcgaggaggccagcagcatcagagaagtggcagggggcctttcctccgtgtgtagggccggccttgctaacccgaaacatttcctagaaatgtgctgcttgcta

SEQ ID NO: 423046 - DNA, 193 bp, Homo sapiens
atgcgggtggcgggcaggcggcaggaggcgggtgggtcaaggtaactctgggctacagagtccttgctgggggttcggggagcgcttggaccccggcttctgggacgcgtcaggtcgccgtgaagatgattgcatgagatcgtgcgtgtgaacgtttgttgacagctgttacttgagtccgacagccctgggg

SEQ ID NO: 423047 - DNA, 1243 bp, Homo sapiens
ctttgagaatccgatgaaaaccagagattccgcccttgttttcttagaattaaaaatattatccagcaatgcaaatgaacaaactataactacacacagctgcatggataaatgtcagaaacatgacgttgagtgtgagaagccagatgcaaacgaggactcactgtgcaattctgtgcatgtacagtggccaggagaagggagcactggctttgctttcatcaggccaaagatgcctttctttgggaatacgttcagtccgaagaagacacctcctcggaagtcggcatctctctccaacctgcattctttggatcgatcaacccgggaggtggagctgggcttggaatacggatccccgactatgaacctggcagggcaaagcctgaagtttgaaaatggccagtggatagcagagacaggggttagtggcggtgtggaccggagggaggttcagcgccttcgcaggcggaaccagcagttggaggaagagaacaatctcttgcggctgaaagtggacatcttattagacatgctttcagagtccactgctgaatcccacttaatggagaaggaactggatgaactgaggatcagccggaagagaaaatgaagaccccagagacatttattggggagtaggatgtggctgagtgctttttttttggccagactagcggattcagtcctggaagagagtatcatataatgagacccacaggcactggcacccttgggttggcaatagaaggtgacatggaatggagaaaaccaagattccagatggggatagtaactagaaggtgcttcagatgcactgcctgcgggtgccagtctgaaaaccagaccgcacagaggcctggggctgctgatgagctttttggtgctctccacacacaagctcgcaaacacacatgtcccagaatagctctgttgggttgtgttgggagaagcggctggagttcattctctcacccccttatgttggtgtttggcgtgtgacagcagttctacagagctctgtgttggggtcatggatgagcggctctcttggctcttaaaggcaggcctctctcttcttgcctttaaagaatcctccttcctcacacctggcctcctctggcttcagcttctcagcagcaagcaccagccttccacaacaacactatatttttatgctactttcctgtttgcactactacttttttattaaacgatgttaaataatcaaactgtgaccaaa

SEQ ID NO: 423048 - DNA, 1279 bp, Homo sapiens
atgcgggtggcgggcaggcggcaggaggcgggtgggtcaaggtaactctgggctacagagtccttgctgggggttcggggagcgcttggaccccggcttctgggacgcgtcaggagaagggagcactggctttgctttcatcaggccaaagatgcctttctttgggaatacgttcagtccgaagaagacacctcctcggaagtcggcatctctctccaacctgcattctgtgccaagtaatgattagagaaatgagttgttggggtcatattgttggcggaagaggagctgggatgaaggcgtgttccgggcctgctgaagttgtcacatagcatctcgcccacagttggatcgatcaacccgggaggtggagctgggcttggaatacggatccccgactatgaacctggcagggcaaagcctgaagtttgaaaatggccagtggatagcagagacaggggttagtggcggtgtggaccggagggaggttcagcgccttcgcaggcggaaccagcagttggaggaagagaacaatctcttgcggctgaaagtggacatcttattagacatgctttcagagtccactgctgaatcccacttaatggagaaggaactggatgaactgaggatcagccggaagagaaaatgaagaccccagagacatttattggggagtaggatgtggctgagtgctttttttttggccagactagcggattcagtcctggaagagagtatcatataatgagacccacaggcactggcacccttgggttggcaatagaaggtgacatggaatggagaaaaccaagattccagatggggatagtaactagaaggtgcttcagatgcactgcctgcgggtgccagtctgaaaaccagaccgcacagaggcctggggctgctgatgagctttttggtgctctccacacacaagctcgcaaacacacatgtcccagaatagctctgttgggttgtgttgggagaagcggctggagttcattctctcacccccttatgttggtgtttggcgtgtgacagcagttctacagagctctgtgttggggtcatggatgagcggctctcttggctcttaaaggcaggcctctctcttcttgcctttaaagaatcctccttcctcacacctggcctcctctggcttcagcttctcagcagcaagcaccagccttccacaacaacactatatttttatgctactttcctgtttgcactactacttttttattaaacgatgttaaataatcaaactgtgaccaaa

SEQ ID NO: 423049 - DNA, 1108 bp, Homo sapiens
atgcgggtggcgggcaggcggcaggaggcgggtgggtcaaggtaactctgggctacagagtccttgctgggggttcggggagcgcttggaccccggcttctgggacgcgtcaggagaagggagcactggctttgctttcatcaggccaaagatgcctttctttgggaatacgttcagtccgaagaagacacctcctcggaagtcggcatctctctccaacctgcattctttggatcgatcaacccgggaggtggagctgggcttggaatacggatccccgactatgaacctggcagggcaaagcctgaagtttgaaaatggccagtggatagcagagacaggggttagtggcggtgtggaccggagggaggttcagcgccttcgcaggcggaaccagcagttggaggaagagaacaatctcttgcggctgaaagtggacatcttattagacatgctttcagagtccactgctgaatcccacttaatggagaaggaactggatgaactgaggatcagccggaagagaaaatgaagaccccagagacatttattggggagtaggatgtggctgagtgctttttttttggccagactagcggattcagtcctggaagagagtatcatataatgagacccacaggcactggcacccttgggttggcaatagaaggtgacatggaatggagaaaaccaagattccagatggggatagtaactagaaggtgcttcagatgcactgcctgcgggtgccagtctgaaacacaagctcgcaaacacacatgtcccagaatagctctgttgggttgtgttgggagaagcggctggagttcattctctcacccccttatgttggtgtttggcgtgtgacagcagttctacagagctctgtgttggggtcatggatgagcggctctcttggctcttaaaggcaggcctctctcttcttgcctttaaagaatcctccttcctcacacctggcctcctctggcttcagcttctcagcagcaagcaccagccttccacaacaacactatatttttatgctactttcctgtttgcactactacttttttattaaacgatgttaaataatcaaactgtgaccaaa

SEQ ID NO: 423050 - DNA, 1382 bp, Homo sapiens
gtccgggtccttgcggccactgcggccactgaagcggcggcggcggctggcccaggaggaagaagtcgagcccaagctatttccggttccggtgtcagttcgaggcgccgccgccgccgccgcagccgccggagccgcaatgcctaaaggaggaagaaagggaggccacaaaggccgggcgaggcagtatacaagccctgaggagatcgacgcgcagctgcaggctgagaagcagaaggccagggaagaagaggagcaaaaagaaggtggagatggggctgcaggtgaccccaaaaaggagaagaaatctctagactcagatgagagtgaggatgaagaagatgactaccagcaaaagcgcaaaggcgttgaagggctcatcgacatcgagaaccccaaccgggtggcacagacaaccaaaaaggtcacacaactggatctggacgggccaaaggagctttcgaggagagaacgagaagagattgagaagcagaaggcaaaagagcgttacatgaaaatgcacttggccgggaagacagagcaagccaaggctgacctggcccggctggccatcatccggaaacagcgggaggaggctgcccggaagaaggaagaggaaaggaaagcaaaagacgatgccacattgtcaggaaaacgaatgcagtcactctccctgaataagtaactgcgacccgtgggaggagatgccggggacctgggccgcgctgccaggacctctgctgtgtctcgcccaccctgtgccctggcgccgctgcaacagcccctcatggccaggagccccccatggcctggggcctcctcttcatcttggcacagaaattgtttgggggatggggggggggactgggggaggggtagctgctatctttgagacagaaagatgcaggacagcatttcatatgtaaccatttgaatgtttttgctgtttttagaattcagagcccttgctggggggtgcctgggagatggggtaagaagagctttcatttgtctggtagatagatagcatgtaagggggtggttgtcccaggaggcagctgctgacaggtttgctacacacagccccggactgtgttgcctgggtgctcattcagagaggggctatcatctgggagcctgtgcccctgggtcctcgagggtcatggcttgtccctggtcagtcctgtctgactgacctcagggcctcacctctctgcccttccctgcccggttcctactcacctggctagggccagtgcccattttcagccctacccattgatcatttcaagaaacctctgtttactgtgtggcacccaggcaaaacatgctccacaaattcaacttgtatatttggcagattaaacttgacattatcgtaa

SEQ ID NO: 423051 - DNA, 1279 bp, Homo sapiens
  misc_feature (9)..(9): n is a, c, g, or t
cgtacccgngcccgtaattcccgggtaacagccgcaatgcctaaaggaggaagaaagggaggccacaaaggccgggcgaggcagtatacaagccctgaggagatcgacgcgcagctgcaggctgagaagcagaaggccagggaagaagaggagcaaaaagaaggtggagatggggctgcaggtgaccccaaaaaggagaagaaatctctagactcagatgagagtgaggatgaagaagatgactaccagcaaaagcgcaaaggcgttgaagggctcatcgacatcgagaaccccaaccgggtggcacagacaaccaaaaaggtcacacaactggatctggacgggccaaaggagctttcgaggagagaacgagaagagattgagaagcagaaggcaaaagagcgttacatgaaaatgcacttggccgggaagacagagcaagccaaggctgacctggcccggctggccatcatccggaaacagcgggaggaggctgcccggaagaaggaagaggaaaggaaagcaaaagacgatgccacattgtcaggaaaacgaatgcagtcactctccctgaataagtaactgcgacccgtgggaggagatgccggggacctgggccgcgctgccaggacctctgctgtgtctcgcccaccctgtgccctggcgccgctgcaacagcccctcatggccaggagccccccatggcctggggcctcctcttcatcttggcacagaaattgtttgggggatggggggggggactgggggaggggtagctgctatctttgagacagaaagatgcaggacagcatttcatatgtaaccatttgaatgtttttgctgtttttagaattcagagcccttgctggggggtgcctgggagatggggtaagaagagctttcatttgtctggtagatagatagcatgtaagggggtggttgtcccaggaggcagctgctgacaggtttgctacacacagccccggactgtgttgcctgggtgctcattcagagaggggctatcatctgggagcctgtgcccctgggtcctcgagggtcatggcttgtccctggtcagtcctgtctgactgacctcagggcctcacctctctgcccttccctgcccggttcctactcacctggctagggccagtgcccattttcagccctacccattgatcatttcaagaaacctctgtttactgtgtggcacccaggcaaaacatgctccacaaattcaacttgtatatttggcagattaaacttgacattatcgtaa

SEQ ID NO: 423052 - DNA, 374 bp, Homo sapiens
ggcctagagcctggactcattcattcaacaaacaaacgttgagtgaccgtttagtactagtcccaaaggtagatgcagacaacgtccttgctcttgagggtttacactacgggagatacaacaaagaagtaaacagacagtgtcatttcaagtaatgagaagtgttactaacaaaacagactgtgattgaggggacttggaaaagtgttgtggtggtgaagcaacttataaactgagatctgaaaaaacaagatgcagccagctatgtgaaaattggcgtgcagagcaattgagaaactggattagcaagtgcaaaggtcctgtggtgggaataagcttggcatgttcaaggaccagaagggggccagtgtagc

SEQ ID NO: 423053 - DNA, 1669 bp, Homo sapiens
gtccgggtccttgcggccactgcggccactgaagcggcggcggcggctggcccaggaggaagaagtcgagcccaagctatttccggttccggtgtcagttcgaggcgccgccgccgccgccgcagccgccggagccgcaatgcctaaaggaggaagaaagggaggccacaaaggccgggcgaggcagtatacaagccctgaggagatcgacgcgcagctgcaggctgagaagcagaaggccagggaagaagaggagcaaaaagaaggtggagatggggctgcaggtgaccccaaaaaggagaagaaatctctagactcagatgagagtgaggatgaagaagatgactaccagcaaaagcgcaaaggcgttgaagggctcatcgacatcgagaaccccaaccgggtggcacagacaaccaaaaaggtcacacaactggatctggacgggccaaaggagctttcgaggagagaacgagaagagattgagaagcagaaggcaaaagagcgttacatgaaaatgcacttggccgggaagacagagcaagccaaggctgacctggcccggctggccatcatccggaaacagcgggaggaggctgcccggaagaaggaagaggaaaggaaagcaaaagacgatgccacattgtcaggaaaacgaatgcagtcactctccctgaataagtaactgcgacccgtgggaggagatgccggggacctgggccgcgctgccaggacctctgctgtgtctcgcccaccctgtgccctggcgccgctgcaacagcccctcatggccaggagccccccatggcctggggcctcctcttcatcttggcacagaaattgtttgggggatggggggggggactgggggaggggtagctgctatctttgagacagaaagatgcaggacagcatttcatatgtaaccatttgaatgtttttgctgtttttagaattcagagcccttgctggggggtgcctgggagatggggtaagaagagctttcatttgtctggtagatagatagcatgtaagggggtggttgtcccaggaggcagctgctgacaggtttgctacacacagccccggactgtgttgcctgggtgctcattcagagaggggctatcatctgggagcctgtgcccctgggtcctcgagggtcatggcttgtccctggtcagtcctgtctgactgacctcagggcctcacctctctgcccttccctgcccggttcctactcacctggctagggccagtgcccattttcagccctacccattgatcatttcaagaaacctctgtttactgtgtggcacccaggcaaaacatgctccacaaattcaacttgtatatttggcagattaaacttgacattatcgtaaaaaaaaaaaaaaaaaaaacaaaaaaaacaaaaaaaaaacaaacaacaaacaacaccgcgagaggcattcttattagcgcggaggggcgcgacacaaacacgagggtatacagagaagagggcgccaacggggcgaccaaaaagggcggttccccagaggaaaccacaggtttgctgtggtccaaacagggggtgcaacctactaagggggaggtcccccccatatagaggagaggcggaataacaatccggaagaaaccccgggtgataaccccggcgataaagggg

SEQ ID NO: 423054 - DNA, 2406 bp, Homo sapiens
gtccgggtccttgcggccactgcggccactgaagcggcggcggcggctggcccaggaggaagaagtcgagcccaagctatttccggttccggtgtcagttcgaggcgccgccgccgccgccgcagccgccggagccgcaatgcctaaaggaggaagaaagggaggccacaaaggccgggcgaggcagtatacaagccctgaggagatcgacgcgcagctgcaggctgagaagcagaaggccagggaagaagaggagcaaaaagaaggtggagatggggctgcaggtgaccccaaaaaggagaagaaatctctagactcagatgagagtgaggatgaagaagatgactaccagcaaaagcgcaaaggcgttgaagggctcatcgacatcgagaaccccaaccgggtggcacagacaaccaaaaaggtcacacaactggatctggacgggccaaaggagctttcgaggagagaacgagaagagattgagaagcagaaggcaaaagagcgttacatgaaaatgcacttggccgggaagacagagcaagccaaggctgacctggcccggctggccatcatccggaaacagcgggaggaggctgcccggaagaaggaagaggaaaggaaagcaaaagacgatgccacattgtcaggaaaacgaatgcagtcactctccctgaataagtaactgcgacccgtgggaggagatgccggggacctgggccgcgctgccaggacctctgctgtgtctcgcccaccctgtgccctggcgccgctgcaacagcccctcatggccaggagccccccatggcctggggcctcctcttcatcttggcacagaaattgtttgggggatggggggggggactgggggaggggtagctgctatctttgagacagaaagatgcaggacagcatttcatatgtaaccatttgaatgtttttgctgtttttagaattcagagcccttgctggggggtgcctgggagatggggtaagaagagctttcatttgtctggtagatagatagcatgtaagggggtggttgtcccaggaggcagctgctgacaggtttgctacacacagccccggactgtgttgcctgggtgctcattcagagaggggctatcatctgggagcctgtgcccctgggtcctcgagggtcatggcttgtccctggtcagtcctgtctgactgacctcagggcctcacctctctgcccttccctgcccggttcctactcacctggctagggccagtgcccattttcagccctacccattgatcatttcaagaaacctctgtttactgtgtggcacccaggcaaaacatgctccacaaattcaacttgtatatttggcagattaaacttgacattatcgtaaaatctttgttttggcaatccatcctttggcttccgtgctcgagccgtttttacccagctgggtacggtgccacgttcaggcacgtgcacccggcaaggttcagggcacatacctacctggggcatgacatctgtcaggtggcaccgagcaggatgcggggatggaccctagataccacagcctgccccctcccctcctttagccaagtcaggatcttaggcctcagcaggcagggacccttccaggccacagtaggctgaagcagcaccaggatcctggcctggcctggcctgtaggtgtcccctggtggttataattctgtaactctaggggagaaggggaatagcactagcattggatgtcgccaaggcccacattttcctgagagaagccacaaaagatgtgcaaatgcccttcagcacaggacctggtgacatgacataaactccaagacagaacctcagtttacagcacacgaaaaaaatatcttgccaacattgtaatgacaaaataaattcccgtgaagttccacaaccaggccgggcatggtggctcatgcctgtaatcccagcactttgggaggtgaggtgggtggatcatctgaggtcaggagttcaagaccagcctggccaacatggagaaactccgtctctactaaaaatacaaaaattaaccaggcttggtggtgtatgcctgtaatcccagctacttgggaggctgaggcaggagaatcgcttgatcccaggaaggcagaggtggcagtgagctgagaacgcacaactgcactccagcctgggtgacgagcaaaactccatctcaaaacaaaagttccacaaccagcctggagtgtgtagcccctttgtccaggaatttgactagtcaatcagtgacacctggtactggcagttttgggagtggcagcccaggatggacagcagtggggagggaaccatttggcataaggccgttgggcttcaggatcaattttgttggcaagcagtaaaaataagctatctacctatgg

SEQ ID NO: 423055 - DNA, 1249 bp, Homo sapiens
aaactgcgggtctctgcaggaagaaagggaggccacaaaggccgggcgaggcagtatacaagccctgaggagatcgacgcgcagctgcaggctgagaagcagaaggccagggaagaagaggagcaaaaagaaggtggagatggggctgcaggtgaccccaaaaaggagaagaaatctctagactcagatgagagtgaggatgaagaagatgactaccagcaaaagcgcaaaggcgttgaagggctcatcgacatcgagaaccccaaccgggtggcacagacaaccaaaaaggtcacacaactggatctggacgggccaaaggagctttcgaggagagaacgagaagagattgagaagcagaaggcaaaagagcgttacatgaaaatgcacttggccgggaagacagagcaagccaaggctgacctggcccggctggccatcatccggaaacagcgggaggaggctgcccggaagaaggaagaggaaaggaaagcaaaagacgatgccacattgtcaggaaaacgaatgcagtcactctccctgaataagtaactgcgacccgtgggaggagatgccggggacctgggccgcgctgccaggacctctgctgtgtctcgcccaccctgtgccctggcgccgctgcaacagcccctcatggccaggagccccccatggcctggggcctcctcttcatcttggcacagaaattgtttgggggatggggggggggactgggggaggggtagctgctatctttgagacagaaagatgcaggacagcatttcatatgtaaccatttgaatgtttttgctgtttttagaattcagagcccttgctggggggtgcctgggagatggggtaagaagagctttcatttgtctggtagatagatagcatgtaagggggtggttgtcccaggaggcagctgctgacaggtttgctacacacagccccggactgtgttgcctgggtgctcattcagagaggggctatcatctgggagcctgtgcccctgggtcctcgagggtcatggcttgtccctggtcagtcctgtctgactgacctcagggcctcacctctctgcccttccctgcccggttcctactcacctggctagggccagtgcccattttcagccctacccattgatcatttcaagaaacctctgtttactgtgtggcacccaggcaaaacatgctccacaaattcaacttgtatatttggcagattaaacttgacattatcgtaa

SEQ ID NO: 423056 - DNA, 1332 bp, Homo sapiens
gtccgggtccttgcggccactgcggccactgaagcggcggcggcggctggcccaggaggaagaagtcgagcccaagctatttccggttccggtgtcagttcgaggcgccgccgccgccgccgcagccgccggagccgcaatgcctaaaggaggaagaaagggaggccacaaaggccgggcgaggcagtatacaagccctgaggagatcgacgcgcagctgcaggctgagaagcagaaggccagggaagaagaggagcaaaaagaaggtggagatggggctgcaggtgaccccaaaaaggagaagaaatctctagactcagatgagagtgaggatgaagaagatgactaccagcaaaagcgcaaaggcgttgaagggctcatcgacatcgagaaccccaaccgggtggcacagacaaccaaaaaggtcacacaactggatctggacgggccaaaggagctttcgaggagagaacgagaagagattgagaagcagaaggcaaaagagcgttacatgaaaatgcacttggccgggaagacagagcaagccaaggctgacctggcccggctggccatcatccggaaacagcgggaggaggctgcccggaagaaggaagaggaaaggaaagcaaaagacgatgccacattgtcaggaaaacgaatgcagtcactctccctgaataagtaactgcgacccgtgggaggagatgccggggacctgggccgcgctgccaggacctctgctgtgtctcgcccaccctgtgccctggcgccgctgcaacagcccctcatggccaggagccccccatggcctggggcctcctcttcatcttggcacagaaattgtttgggggatggggggggggactgggggaggggtagctgctatctttgagacagaaagatgcaggacagcatttcatatgtaaccatttgaatgtttttgctgtttttagaattcagagcccttgctggggggtgcctgggagatggggtaagaagagctttcatttgtctggtagatagatagcatgtaagggggtggttgtcccaggaggcagctgctgacaggtttgctacacacagccccggactgtgttgcctggtcgagggtcatggcttgtccctggtcagtcctgtctgactgacctcagggcctcacctctctgcccttccctgcccggttcctactcacctggctagggccagtgcccattttcagccctacccattgatcatttcaagaaacctctgtttactgtgtggcacccaggcaaaacatgctccacaaattcaacttgtatatttggcagattaaacttgacattatcgtaa

SEQ ID NO: 423057 - DNA, 1231 bp, Homo sapiens
gtccgggtccttgcggccactgcggccactgaagcggcggcggcggctggcccaggaggaagaagtcgagcccaagctatttccggttccggtgtcagttcgaggcgccgccgccgccgccgcagccgccggagccgcaatgcctaaaggaggaagaaagggaggccacaaaggccgggcgaggcagtatacaagccctgaggagatcgacgcgcagctgcaggctgagaagcagaaggccagggaagaagaggagcaaaaagaaggtggagatggggctgcaggtgaccccaaaaaggagaagaaatctctagactcagatgagagtgaggatgaagaagatgactaccagcaaaagcgcaaaggcgttgaagggctcatcgacatcgagaaccccaaccgggtggcacagacaaccaaaaaggtcacacaactggatctggacgggccaaaggagctttcgaggagagaacgagaagagattgagaagcagaaggcaaaagagcgttacatgaaaatgcacttggccgggaagacagagcaagccaaggctgacctggcccggctggccatcatccggaaacagcgggaggaggctgcccggaagaaggaagaggaaaggaaagcaaaagacgatgccacattgtcaggaaaacgaatgcagtcactctccctgaataagtaactgcgacccgtgggaggagatgccggggacctgggccgcgctgccaggacctctgctgtgtctcgcccaccctgtgccctggcgccgctgcaacagcccctcatggccaggagccccccatggcctggggcctcctcttcatcttggcacagaaattgtttgggggatggggggggggactgggggaggggtagctgctatctttgagacagaaagatgcaggacagcatttcatatgtaaccatttgaatgtttttgctgtttttagaattcagagcccttgctggggggtgcctgggagatggggtaagaagagctttcatttgtctggtagatagatagcatgtaagggggtggttgtcccaggaggcagctgctgacaggtttgctaccggttcctactcacctggctagggccagtgcccattttcagccctacccattgatcatttcaagaaacctctgtttactgtgtggcacccaggcaaaacatgctccacaaattcaacttgtatatttggcagattaaacttgacattatcgtaa

SEQ ID NO: 423058 - DNA, 1136 bp, Homo sapiens
gtccgggtccttgcggccactgcggccactgaagcggcggcggcggctggcccaggaggaagaagtcgagcccaagctatttccggttccggtgtcagttcgaggcgccgccgccgccgccgcagccgccggagccgcaatgcctaaaggaggaagaaagggaggccacaaaggccgggcgaggcagtatacaagccctgaggagatcgacgcgcagctgcaggctgagaagcagaaggccagggaagaagaggagcaaaaagaaggtggagatggggctgcaggtgaccccaaaaaggagaagaaatctctagactcagatgagagtgaggatgaagaagatgactaccagcaaaagcgcaaaggcgttgaagggctcatcgacatcgagaaccccaaccgggtggcacagacaaccaaaaaggtcacacaactggatctggacgggccaaaggagctttcgaggagagaacgagaagagattgagaagcagaaggcaaaagagcgttacatgaaaatgcacttggccgggaagacagagcaagccaaggctgacctggcccggctggccatcatccggaaacagcgggaggaggctgcccggaagaaggaagaggaaaggaaagcaaaagacgatgccacattgtcaggaaaacgaatgcagtcactctccctgaataagtaactgcgacccgtgggaggagatgccggggacctgggccgcgctgccaggacctctgctgtgtctcgcccaccctgtgccctggcgccgctgcaacagcccctcatggccaggagccccccatggcctggggcctcctcttcatcttggcacagaaattgtttgggggatggggggggggactgggggaggggtagctgctatctttgagacagaaagatgcaggacagcatttcatatgtaaccatttgaatgtttttgctgtttttagaattcagagcccttgctggggggtgcctgggagatggggtaagaagagctttcatttgtctggtagatagatagcatgtaagggggtggttgtcccaggaggcagctgctgacaggtttgctaaaaacatgctccacaaattcaacttgtatatttggcagattaaacttgacattatcgtaa

SEQ ID NO: 423059 - DNA, 1004 bp, Homo sapiens
tgtagtcaaagggatattgaggccaatgctaagtcagcaaactccattaaactaactggatctggacgggccaaaggagctttcgaggagagaacgagaagagattgagaagcagaaggcaaaagagcgttacatgaaaatgcacttggccgggaagacagagcaagccaaggctgacctggcccggctggccatcatccggaaacagcgggaggaggctgcccggaagaaggaagaggaaaggaaagcaaaagacgatgccacattgtcaggaaaacgaatgcagtcactctccctgaataagtaactgcgacccgtgggaggagatgccggggacctgggccgcgctgccaggacctctgctgtgtctcgcccaccctgtgccctggcgccgctgcaacagcccctcatggccaggagccccccatggcctggggcctcctcttcatcttggcacagaaattgtttgggggatggggggggggactgggggaggggtagctgctatctttgagacagaaagatgcaggacagcatttcatatgtaaccatttgaatgtttttgctgtttttagaattcagagcccttgctggggggtgcctgggagatggggtaagaagagctttcatttgtctggtagatagatagcatgtaagggggtggttgtcccaggaggcagctgctgacaggtttgctacacacagccccggactgtgttgcctgggtgctcattcagagaggggctatcatctgggagcctgtgcccctgggtcctcgagggtcatggcttgtccctggtcagtcctgtctgactgacctcagggcctcacctctctgcccttccctgcccggttcctactcacctggctagggccagtgcccattttcagccctacccattgatcatttcaagaaacctctgtttactgtgtggcacccaggcaaaacatgctccacaaattcaacttgtatatttggcagattaaacttgacattatcgtaa

SEQ ID NO: 423060 - DNA, 1165 bp, Homo sapiens
atcctcccagtactgacactgaaaacttgtgatcagaagaacaccaacaagtgctccctgggctgaggaccctttcttgcctccccaccccggaaggctgaacctgagggagacaacgtgcagagggagtgagcaggggagaaatagcagaggggcttgagggtcacataggtagatggtaaagagaatgaggagaaaaaggagaaaagggaaaagcagaaaggaaaaaaaaggaagagagaggaagggagagaacgagaagagattgagaagcagaaggcaaaagagcgttacatgaaaatgcacttggccgggaagacagagcaagccaaggctgacctggcccggctggccatcatccggaaacagcgggaggaggctgcccggaagaaggaagaggaaaggaaagcaaaagacgatgccacattgtcaggaaaacgaatgcagtcactctccctgaataagtaactgcgacccgtgggaggagatgccggggacctgggccgcgctgccaggacctctgctgtgtctcgcccaccctgtgccctggcgccgctgcaacagcccctcatggccaggagccccccatggcctggggcctcctcttcatcttggcacagaaattgtttgggggatggggggggggactgggggaggggtagctgctatctttgagacagaaagatgcaggacagcatttcatatgtaaccatttgaatgtttttgctgtttttagaattcagagcccttgctggggggtgcctgggagatggggtaagaagagctttcatttgtctggtagatagatagcatgtaagggggtggttgtcccaggaggcagctgctgacaggtttgctacacacagccccggactgtgttgcctgggtgctcattcagagaggggctatcatctgggagcctgtgcccctgggtcctcgagggtcatggcttgtccctggtcagtcctgtctgactgacctcagggcctcacctctctgcccttccctgcccggttcctactcacctggctagggccagtgcccattttcagccctacccattgatcatttcaagaaacctctgtttactgtgtggcacccaggcaaaacatgctccacaaattcaacttgtatatttggcagattaaacttgacattatcgtaa

SEQ ID NO: 423061 - DNA, 966 bp, Homo sapiens
ctctagcaggatccctgcatatctgggacgggccaaaggagctttcgaggagagaacgagaagagattgagaagcagaaggcaaaagagcgttacatgaaaatgcacttggccgggaagacagagcaagccaaggctgacctggcccggctggccatcatccggaaacagcgggaggaggctgcccggaagaaggaagaggaaaggaaagcaaaagacgatgccacattgtcaggaaaacgaatgcagtcactctccctgaataagtaactgcgacccgtgggaggagatgccggggacctgggccgcgctgccaggacctctgctgtgtctcgcccaccctgtgccctggcgccgctgcaacagcccctcatggccaggagccccccatggcctggggcctcctcttcatcttggcacagaaattgtttgggggatggggggggggactgggggaggggtagctgctatctttgagacagaaagatgcaggacagcatttcatatgtaaccatttgaatgtttttgctgtttttagaattcagagcccttgctggggggtgcctgggagatggggtaagaagagctttcatttgtctggtagatagatagcatgtaagggggtggttgtcccaggaggcagctgctgacaggtttgctacacacagccccggactgtgttgcctgggtgctcattcagagaggggctatcatctgggagcctgtgcccctgggtcctcgagggtcatggcttgtccctggtcagtcctgtctgactgacctcagggcctcacctctctgcccttccctgcccggttcctactcacctggctagggccagtgcccattttcagccctacccattgatcatttcaagaaacctctgtttactgtgtggcacccaggcaaaacatgctccacaaattcaacttgtatatttggcagattaaacttgacattatcgtaa

SEQ ID NO: 423062 - DNA, 2186 bp, Homo sapiens
gtccgggtccttgcggccactgcggccactgaagcggcggcggcggctggcccaggaggaagaagtcgagcccaagctatttccggttccggtgtcagttcgaggcgccgccgccgccgccgcagccgccggagccgcaatgcctaaaggaggaagaaagggaggccacaaaggccgggcgaggcagtatacaagccctgaggagatcgacgcgcagctgcaggctgagaagcagaaggccagggaagaagaggagcaaaaagaaggtggagatggggctgcaggtgaccccaaaaaggagaagaaatctctagactcagatgagagtgaggatgaagaagatgactaccagcaaaagcgcaaaggcgttgaagggctcatcgacatcgagaaccccaaccgggtggcacagacaaccaaaaaggtcacacaactggatctggacgggccaaaggagctttcgaggagagaacgagaagagattgagaagcagaaggcaaaagagcgttacatgaaaatgcacttggccgggaagacagagcaagccaaggctgacctggcccggctggccatcatccggaaacagcgggaggaggctgcccggaagaaggaagaggaaaggaaagcaaaagacgatgccacattgtcaggaaaacgaatgcagtcactctccctgaataagtaactgcgacccgtgggaggagatgccggggacctgggccgcgctgccaggacctctgctgtgtctcgcccaccctgtgccctggcgccgctgcaacagcccctcatggccaggagcccccaaaaaggagaagaaatctctagactcagatgagagtgaggatgaagaagatgactaccagcaaaagcgcaaaggcgttgaagggctcatcgacatcgagaaccccaaccgggtggcacagacaccaaaaatcgagggtcatggcttgtccctggtcagtcctgtctgactgacctcagggcctcacctctctgcccttccctgcccggttcctactcacctggctagggccagtgcccattttcagccctacccattgatcatttcaagaaacctctgtttactgtgtggcacccaggcaaaacatgctccacaaattcaacttgtatatttggcagattaaacttgacattatcgtaaaatctttgttttggcaatccatcctttggcttccgtgctcgagccgtttttacccagctgggtacggtgccacgttcaggcacgtgcacccggcaaggttcagggcacatacctacctggggcatgacatctgtcaggtggcaccgagcaggatgcggggatggaccctagataccacagcctgccccctcccctcctttagccaagtcaggatcttaggcctcagcaggcagggacccttccaggccacagtaggctgaagcagcaccaggatcctggcctggcctggcctgtaggtgtcccctggtggttataattctgtaactctaggggagaaggggaatagcactagcattggatgtcgccaaggcccacattttcctgagagaagccacaaaagatgtgcaaatgcccttcagcacaggacctggtgacatgacataaactccaagacagaacctcagtttacagcacacgaaaaaaatatcttgccaacattgtaatgacaaaataaattcccgtgaagttccacaaccaggccgggcatggtggctcatgcctgtaatcccagcactttgggaggtgaggtgggtggatcatctgaggtcaggagttcaagaccagcctggccaacatggagaaactccgtctctactaaaaatacaaaaattaaccaggcttggtggtgtatgcctgtaatcccagctacttgggaggctgaggcaggagaatcgcttgatcccaggaaggcagaggtggcagtgagctgagaacgcacaactgcactccagcctgggtgacgagcaaaactccatctcaaaacaaaagttccacaaccagcctggagtgtgtagcccctttgtccaggaatttgactagtcaatcagtgacacctggtactggcagttttgggagtggcagcccaggatggacagcagtggggagggaaccatttggcataaggccgttgggcttcaggatcaattttgttggcaagcagtaaaaataagctatctacctatgg

SEQ ID NO: 423063 - DNA, 673 bp, Homo sapiens
gtccgggtccttgcggccactgcggccactgaagcggcggcggcggctggcccaggaggaagaagtcgagcccaagctatttccggttccggtgtcagttcgaggcgccgccgccgccgccgcagccgccggagccgcaatgcctaaaggaggaagaaagggaggccacaaaggccgggcgaggcagtatacaagccctgaggagatcgacgcgcagctgcaggctgagaagcagaaggccagggaagaagaggagcaaaaagaaggtggagatgggatggggtaagaagagctttcatttgtctggtagatagatagcatgtaagggggtggttgtcccaggaggcagctgctgacaggtttgctacacacagccccggactgtgttgcctgggtgctcattcagagaggggctatcatctgggagcctgtgcccctgggtcctcgagggtcatggcttgtccctggtcagtcctgtctgactgacctcagggcctcacctctctgcccttccctgcccggttcctactcacctggctagggccagtgcccattttcagccctacccattgatcatttcaagaaacctctgtttactgtgtggcacccaggcaaaacatgctccacaaattcaacttgtatatttggcagattaaacttgacattatcgtaa

SEQ ID NO: 423064 - DNA, 453 bp, Homo sapiens
taacgagcatcagtaagcggagcggtcacgcctgctgggggtatgttgtgtcgggagatggggtaagaagagctttcatttgtctggtagatagatagcatgtaagggggtggttgtcccaggaggcagctgctgacaggtttgctacacacagccccggactgtgttgcctgggtgctcattcagagaggggctatcatctgggagcctgtgcccctgggtcctcgagggtcatggcttgtccctggtcagtcctgtctgactgacctcagggcctcacctctctgcccttccctgcccggttcctactcacctggctagggccagtgcccattttcagccctacccattgatcatttcaagaaacctctgtttactgtgtggcacccaggcaaaacatgctccacaaattcaacttgtatatttggcagattaaacttgacattatcgtaa

SEQ ID NO: 423065 - DNA, 489 bp, Homo sapiens
gtccgggtccttgcggccactgcggccactgaagcggcggcggcggctggcccaggaggaagaagtcgagcccaagctatttccggttccggtgtcagttcgaggcgccgccgccgccgccgcagccgccggagccgcaatgcctaaaggaggaagaaagggaggccacaaaggccgggcgaggcagtatacaagccctgaggagatcgacgcgcagctgcaggctgagaagcagaaggccagggaagaagaggagcaaaaagaaggtggagatggggctgcaggtgaccccaaaaaggagaagaaatctctagactcagatgagagaaaggaaagaaggaaggaaagaaggaagaagagagagaaggaaggaaaagaaggaaggaaggaaagaaagaaagaaagaaagagagagagagaaagaaagaaagaaagagagagagagagagaaagaaagaaagaaagaaagaaagaaagaaagaaggaagg

SEQ ID NO: 423066 - DNA, 430 bp, Homo sapiens
ttcctggactatgggaatggcctctaagctgtggtgctaagtgcataggctgcctgtgtctggcccaggtcccattccctgggggccagggtcacagtaggacccttgtcatccttggttccagccttccagaggcttgatttctcaagatccacagtctggggggtgatagggtcacagtcttggggatttgttttgcatttttgattctgcaggttgtccatttctgaaacaggaagaagaggagcaaaaagaaggtggagatggggctgcaggtgaccccaaaaaggagaagaaatctctagactcagatgagagtgaggatgaagaagatgactaccaggtactgagttcttttgagggcctagagcctggactcattcattcaacaaacaaacgttgagtgaccgtttagtactagtcccaaagg

SEQ ID NO: 423067 - DNA, 3893 bp, Homo sapiens
ggctgtagttagtaaggagccggatgattgcctcagcaggtgtgaagcgtgtgctttagtttcgtgggaggcctggcatccccgagagggaggggaaaggtaaccactcctttgtggaggtcgccagggtcattgtcgtggatttgcacagtcggctgggcggtgcaatggcggaaagaaaaggaacagccaaagtggactttttgaagaagattgagaaagaaatccaacagaaatgggatactgagagagtgtttgaggtcaatgcatctaatttagagaaacagaccagcaagggcaagtattttgtaaccttcccatatccatatatgaatggacgccttcatttgggacacacgttttctttatccaaatgtgagtttgctgtagggtaccagcgattgaaaggaaaatgttgtctgtttccctttggcctgcactgtactggaatgcctattaaggcatgtgctgataagttgaaaagagaaatagagctgtatggttgcccccctgattttccagatgaagaagaggaagaggaagaaaccagtgttaaaacagaagatataataattaaggataaagctaaaggaaaaaagagtaaagctgctgctaaagctggatcttctaaataccagtggggcattatgaaatcccttggcctgtctgatgaagagatagtaaaattttctgaagcagaacattggcttgattatttcccgccactggctattcaggatttaaaaagaatgggtttgaaggtagactggcgtcgttccttcatcaccactgatgttaatccttactatgattcatttgtcagatggcaatttttaacattaagagaaagaaacaaaattaaatttgggaagcggtatacaatttactctccgaaagatggacagccttgcatggatcatgatagacaaactggagagggtgttggacctcaggaatatactttactcaaattgaaggtgcttgagccatacccatctaaattaagtggcctgaaaggtaaaaatattttcttggtggctgctactctcagacctgagaccatgtttgggcagacaaattgttgggttcgtcctgatatgaagtacattggatttgagacggtgaatggtgatatattcatctgtacccaaaaagcagccaggaatatgtcataccagggctttaccaaagacaatggcgtggtgcctgttgttaaggaattaatgggggaggaaattcttggtgcatcactttctgcacctttaacatcatacaaggtgatctatgttctcccaatgctaactattaaggaggataaaggcactggtgtggttacaagtgttccttccgactcccctgatgatattgctgccctcagagacttgaagaaaaagcaagccttacgagcaaaatatggaattagagatgacatggtcttgccatttgagccggtgccagtcattgaaatcccaggttttggaaatctttctgctgtaaccatttgtgatgagttgaaaattcagagccagaatgaccgggaaaaacttgcagaagcaaaggagaagatatatctaaaaggattttatgagggtatcatgttggtggatggatttaaaggacagaaggttcaagatgtaaagaagactattcagaaaaagatgattgacgctggagatgcacttatttacatggaaccagagaaacaagtgatgtccaggtcgtcagatgaatgtgttgtggctctgtgtgaccagtggtacttggattatggagaagagaattggaagaaacagacatctcagtgcttgaagaacctggaaacattctgtgaggagaccaggaggaattttgaagccaccttaggttggctacaagaacatgcttgctcaagaacttatggtctaggcactcacctgccttgggatgagcagtggctgattgaatcactttctgactccactatttacatggcattttacacagttgcacacctattgcaggggggtaacttgcatggacaggcagagtctccgctgggcattagaccgcaacagatgaccaaggaagtttgggattatgttttcttcaaggaggctccatttcctaagactcagattgcaaaggaaaaattagatcagttaaagcaggagtttgaattctggtatcctgttgatcttcgcgtctctggcaaggatcttgttccaaatcatctttcatattacctttataatcatgtggctatgtggccggaacaaagtgacaaatggcctacagctgtgagagcaaatggacatctcctcctgaactctgagaagatgtcaaaatccacaggcaacttcctcactttgacccaagctattgacaaattttcagcagatggaatgcgtttggctctggctgatgctggtgacactgtagaagatgccaactttgtggaagccatggcagatgcaggtattctccgtctgtacacctgggtagagtgggtgaaagaaatggttgccaactgggacagcctaagaagtggtcctgccagcactttcaatgatagagtttttgccagtgaattgaatgcaggaattataaaaacagatcaaaactatgaaaagatgatgtttaaagaagctttgaaaacagggttttttgagtttcaggccgcaaaagataagtaccgtgaattggctgtggaagggatgcacagagaacttgtgttccggtttattgaagttcagacacttctcctcgctccattctgtccacatttgtgtgagcacatctggacactcctgggaaagcctgactcaattatgaatgcttcatggcctgtggcaggtcctgttaatgaagttttaatacactcctcacagtatcttatggaagtaacacatgaccttagactacgactcaagaactatatgatgccagctaaagggaagaagactgacaaacaacccctgcagaagccctcacattgcaccatctatgtggcaaagaactatccaccttggcaacataccaccctgtctgttctacgtaaacactttgaggccaataacggaaaactgcctgacaacaaagtcattgctagtgaactaggcagtatgccagaactgaagaaatacatgaagaaagtcatgccatttgttgccatgattaaggaaaatctggagaagatggggcctcgtattctggatttgcaattagaatttgatgaaaaggctgtgcttatggagaatatagtctatctgactaattcgcttgagctagaacacatagaagtcaagtttgcctccgaagcagaagataaaatcagggaagactgctgtcctgggaaaccacttaatgtttttagaatagaacctggtgtgtccgtttctctggtgaatccccagccatccaatggccacttctcaaccaaaattgaaatcaggcaaggagataactgtgattccataatcaggcgtttaatgaaaatgaatcgaggaattaaagacctttccaaagtgaaactgatgagatttgatgatccactgttggggcctcgacgagttcctgtcctgggaaaggagtacaccgagaagacccccatttctgagcatgctgttttcaatgtggacctcatgagcaagaaaattcatctgactgagaatgggataagggtggatattggcgatacaataatctatctggttcattaaactcatgcacattggagatttatcctggtttcttaggaatactactactctgattgtgtctactgattggctatcagaaccttaggctggacctaaatagattgatttcatttctaaccatccaattctgcatgtattcataattctatcaagtcatctttgattcctggacctaataaattttttttccctttc

SEQ ID NO: 423068 - DNA, 517 bp, Homo sapiens
  misc_feature (435)..(435): n is a, c, g, or t
  misc_feature (460)..(460): n is a, c, g, or t
ggactatagtagtaacctgcactttatcttagcaagcctttatgagtctattagctttacctcaaaattttaagccagaactatcatctttgtttttttattttctatctttaaacatttatctgtgaagtgacaaatggcctacagctgtgagagcaaatggacatctcctcctgaactctgagaaggtaaggcttattgcatcttaaaagtttaaaattctgtggaaggcttttcagatttaggttgttgcacttttttttaaatgtatgtaagaaataatgtgtcctcaggtgatccacctgccttggcctcccaaagtgctgggattataggcgtgagccaccatgcctggcccatttggtcttttatctacaattttatttttattaattattcaagaataatttaagagcttcctaaataagtagcttngtaaatgttatagcccccttcttanaaatgtggattctatagatgaaatgtctctcaggttcctcatgcgttacatattacg

SEQ ID NO: 423069 - DNA, 642 bp, Homo sapiens
gcgtattgtctgattggtgttgatcattttgttgatgatcttgttgaccatgtgcgtgaattacagatgcaacatgcattgttagaatcgtgtgatggtcttttgtgatactgaatttgtacatatcccagtctctgtatgtatctgcatagacaaagggatacaccggtgtttccctttgtctgcactgtactggaatgcctattaaggcatgtgctgataagttgaaaagagaaatagagctgtatggttgcccccctgattttccagatgaagaagaggaagaggaagaaaccagtgttaaaacagaagatataataattaaggataaagctaaaggaaaaaagagtaaagctgctgctaaagctggatcttctaaataccagtggggcattatgaaatcccttggcctgtctgatgaagagatagtaaaattttctgaagcagaacattggcttgattatttcccgccactggctattcaggatttaaaaagaatgggtttgaaggtagactggcgtcgttccttcatcaccactgatgttaatccttactatgattcatttgtcagatggcaatttttaacattaagagaaagaaacaaaattaaatttgggaagcggtatacttgttatacttgag

SEQ ID NO: 423070 - DNA, 361 bp, Homo sapiens
ggactatagtagtaacctgcactttatcttagcaagcctttatgagtctattagctttacctcaaaattttaagccagaactatcatctttgtttttttattttctatctttaaacatttatctgtgaagtgacaaatggcctacagctgtgagagcaaatggacatctcctcctgaactctgagaaggtaaggcttattgcatcttaaaagtttaaaattctgtggaaggcttttcagatttaggttgttgcacttttttttaaatgtatgtaagaaataatgtgtcctcaagtgatccacccgcctcagcctcccaaagtgctgggattacaggcgtgagccaccatgcctggccatat

SEQ ID NO: 423071 - DNA, 4765 bp, Homo sapiens
ggctgtagttagtaaggagccggatgattgcctcagcaggtgtgaagcgtgtgctttagtttcgtgggaggcctggcatccccgagagggaggggaaaggtaaccactcctttgtggaggtcgccagggtcattgtcgtggatttgcacagtcggctgggcggtgcaatggcggaaagaaaaggaacagccaaagtggactttttgaagaagattgagaaagaaatccaacagaaatgggatactgagagagtgtttgaggtcaatgcatctaatttagagaaacagaccagcaagggcaagtattttgtaaccttcccatatccatatatgaatggacgccttcatttgggacacacgttttctttatccaaatgtgagtttgctgtagggtaccagcgattgaaaggaaaatgttgtctgtttccctttggcctgcactgtactggaatgcctattaaggcatgtgctgataagttgaaaagagaaatagagctgtatggttgcccccctgattttccagatgaagaagaggaagaggaagaaaccagtgttaaaacagaagatataataattaaggataaagctaaaggaaaaaagagtaaagctgctgctaaagctggatcttctaaataccagtggggcattatgaaatcccttggcctgtctgatgaagagatagtaaaattttctgaagcagaacattggcttgattatttcccgccactggctattcaggatttaaaaagaatgggtttgaaggtagactggcgtcgttccttcatcaccactgatgttaatccttactatgattcatttgtcagatggcaatttttaacattaagagaaagaaacaaaattaaatttgggaagcggtatacaatttactctccgaaagatggacagccttgcatggatcatgatagacaaactggagagggtgttggacctcaggaatatactttactcaaattgaaggtgcttgagccatacccatctaaattaagtggcctgaaaggtaaaaatattttcttggtggctgctactctcagacctgagaccatgtttgggcagacaaattgttgggttcgtcctgatatgaagtacattggatttgagacggtgaatggtgatatattcatctgtacccaaaaagcagccaggaatatgtcataccagggctttaccaaagacaatggcgtggtgcctgttgttaaggaattaatgggggaggaaattcttggtgcatcactttctgcacctttaacatcatacaaggtgatctatgttctcccaatgctaactattaaggaggataaaggcactggtgtggttacaagtgttccttccgactcccctgatgatattgctgccctcagagacttgaagaaaaagcaagccttacgagcaaaatatggaattagagatgacatggtcttgccatttgagccggtgccagtcattgaaatcccaggttttggaaatctttctgctgtaaccatttgtgatgagttgaaaattcagagccagaatgaccgggaaaaacttgcagaagcaaaggagaagatatatctaaaaggattttatgagggtatcatgttggtggatggatttaaaggacagaaggttcaagatgtaaagaagactattcagaaaaagatgattgacgctggagatgcacttatttacatggaaccagagaaacaagtgatgtccaggtcgtcagatgaatgtgttgtggctctgtgtgaccagtggtacttggattatggagaagagaattggaagaaacagacatctcagtgcttgaagaacctggaaacattctgtgaggagaccaggaggaattttgaagccaccttaggttggctacaagaacatgcttgctcaagaacttatggtctaggcactcacctgccttgggatgagcagtggctgattgaatcactttctgactccactatttacatggcattttacacagttgcacacctattgcaggggggtaacttgcatggacaggcagagtctccgctgggcattagaccgcaacagatgaccaaggaagtttgggattatgttttcttcaaggaggctccatttcctaagactcagattgcaaaggaaaaattagatcagttaaagcaggagtttgaattctggtatcctgttgatcttcgcgtctctggcaaggatcttgttccaaatcatctttcatattacctttataatcatgtggctatgtggccggaacaaagtgacaaatggcctacagctgtgagagcaaatggacatctcctcctgaactctgagaagatgtcaaaatccacaggcaacttcctcactttgacccaagctattgacaaattttcagcagatggaatgcgtttggctctggctgatgctggtgacactgtagaagatgccaactttgtggaagccatggcagatgcaggtattctccgtctgtacacctgggtagagtgggtgaaagaaatggttgccaactgggacagcctaagaagtggtcctgccagcactttcaatgatagagtttttgccagtgaattgaatgcaggaattataaaaacagatcaaaactatgaaaagatgatgtttaaagaagctttgaaaacagggttttttgagtttcaggccgcaaaagataagtaccgtgaattggctgtggaagggatgcacagagaacttgtgttccggtttattgaagttcagacacttctcctcgctccattctgtccacatttgtgtgagcacatctggacactcctgggaaagcctgactcaattatgaatgcttcatggcctgtggcaggtcctgttaatgaagttttaatacactcctcacagtatcttatggaagtaacacatgaccttagactacgactcaagaactatatgatgccagctaaagggaagaagactgacaaacaacccctgcagaagccctcacattgcaccatctatgtggcaaagaactatccaccttggcaacataccaccctgtctgttctacgtaaacactttgaggccaataacggaaaactgcctgacaacaaagtcattgctagtgaactaggcagtatgccagaactgaagaaatacatgaagaaagtcatgccatttgttgccatgattaaggaaaatctggagaagatggggcctcgtattctggatttgcaattagaatttgatgaaaaggctgtgcttatggagaatatagtctatctgactaattcgcttgagctagaacacatagaagtcaagtttgcctccgaagcagaagataaaatcagggaagactgctgtcctgggaaaccacttaatgtttttagaatagaacctggtgtgtccgtttctctggtgaatccccagccatccaatggccacttctcaaccaaaattgaaatcaggcaaggagataactgtgattccataatcaggcgtttaatgaaaatgaatcgaggaattaaagacctttccaaagtgaaactgatgagatttgatgatccactgttggggcctcgacgagttcctgtcctgggaaaggagtacaccgagaagacccccatttctgagcatgctgttttcaatgtggacctcatgagcaagaaaattcatctgactgagaatgggataagggtggatattggcgatacaataatctatctggttcattaaactcatgcacattggagatttatcctggtttcttaggaatactactactctgattgtgtctactgattggctatcagaaccttaggctggacctaaatagattgatttcatttctaaccatccaattctgcatgtattcataattctatcaagtcatctttgattcctggacctaataaattttttttccctttctttgggtgtccaagagaaatggtttttgccaaactctttttaaaaaacaaattgttgctatttcctagaagtttctggtttttaagatgaacataaaagtgtcagtatgcttcttttatgaggtgtactttatactttgatgaaggctaaggtgtacctaacagctttttatagtatattcatttatggagttagctgtattttttttaaaaaaagaaaagtagtaaattagcagctttttttttttaaatgaagagaacttcatgatgatttaaaagaactaatgagaatattttgacttgacttcaattactaagtattttgtataaagaacaaataggtcctgcattttataagactttttaaagctttaattattcaactaagaaccaataatggcttcttcaaggctaatatcaatagtttataagcagtatatttcacctacactaaatatgggcattttaaaagaagattccccccttcccccccagaaatctgcatttactaaatttgtcttaagtccaattgtgtttaaaggtcatgctggtcgggtgtggtggctcacacctataatcccagcactttgggaggccaaggtgggcagtcacctgaggtcaggagtttgagaccagcctgaccaacatggtgaaaccccgtctctactaaaaatacaaaaattagcttggcatggtggcgggtacctgtaatcccagctgcttgggagtgtgaggcaggagaatcgcttgaacctgggagaccgaggttgcagtgagctgaaaccgtgccattgcactccagcttaggcaacaagagtgaaactctgtctcaatcaatccatcaatcaatcaataaaatagaggtcatgctga

SEQ ID NO: 423072 - DNA, 3819 bp, Homo sapiens
ggctgtagttagtaaggagccggatgattgcctcagcaggtgtgaagcgtgtgctttagtttcgtgggaggcctggcatccccgagagggaggggaaaggaaagaaaaggaacagccaaagtggactttttgaagaagattgagaaagaaatccaacagaaatgggatactgagagagtgtttgaggtcaatgcatctaatttagagaaacagaccagcaagggcaagtattttgtaaccttcccatatccatatatgaatggacgccttcatttgggacacacgttttctttatccaaatgtgagtttgctgtagggtaccagcgattgaaaggaaaatgttgtctgtttccctttggcctgcactgtactggaatgcctattaaggcatgtgctgataagttgaaaagagaaatagagctgtatggttgcccccctgattttccagatgaagaagaggaagaggaagaaaccagtgttaaaacagaagatataataattaaggataaagctaaaggaaaaaagagtaaagctgctgctaaagctggatcttctaaataccagtggggcattatgaaatcccttggcctgtctgatgaagagatagtaaaattttctgaagcagaacattggcttgattatttcccgccactggctattcaggatttaaaaagaatgggtttgaaggtagactggcgtcgttccttcatcaccactgatgttaatccttactatgattcatttgtcagatggcaatttttaacattaagagaaagaaacaaaattaaatttgggaagcggtatacaatttactctccgaaagatggacagccttgcatggatcatgatagacaaactggagagggtgttggacctcaggaatatactttactcaaattgaaggtgcttgagccatacccatctaaattaagtggcctgaaaggtaaaaatattttcttggtggctgctactctcagacctgagaccatgtttgggcagacaaattgttgggttcgtcctgatatgaagtacattggatttgagacggtgaatggtgatatattcatctgtacccaaaaagcagccaggaatatgtcataccagggctttaccaaagacaatggcgtggtgcctgttgttaaggaattaatgggggaggaaattcttggtgcatcactttctgcacctttaacatcatacaaggtgatctatgttctcccaatgctaactattaaggaggataaaggcactggtgtggttacaagtgttccttccgactcccctgatgatattgctgccctcagagacttgaagaaaaagcaagccttacgagcaaaatatggaattagagatgacatggtcttgccatttgagccggtgccagtcattgaaatcccaggttttggaaatctttctgctgtaaccatttgtgatgagttgaaaattcagagccagaatgaccgggaaaaacttgcagaagcaaaggagaagatatatctaaaaggattttatgagggtatcatgttggtggatggatttaaaggacagaaggttcaagatgtaaagaagactattcagaaaaagatgattgacgctggagatgcacttatttacatggaaccagagaaacaagtgatgtccaggtcgtcagatgaatgtgttgtggctctgtgtgaccagtggtacttggattatggagaagagaattggaagaaacagacatctcagtgcttgaagaacctggaaacattctgtgaggagaccaggaggaattttgaagccaccttaggttggctacaagaacatgcttgctcaagaacttatggtctaggcactcacctgccttgggatgagcagtggctgattgaatcactttctgactccactatttacatggcattttacacagttgcacacctattgcaggggggtaacttgcatggacaggcagagtctccgctgggcattagaccgcaacagatgaccaaggaagtttgggattatgttttcttcaaggaggctccatttcctaagactcagattgcaaaggaaaaattagatcagttaaagcaggagtttgaattctggtatcctgttgatcttcgcgtctctggcaaggatcttgttccaaatcatctttcatattacctttataatcatgtggctatgtggccggaacaaagtgacaaatggcctacagctgtgagagcaaatggacatctcctcctgaactctgagaagatgtcaaaatccacaggcaacttcctcactttgacccaagctattgacaaattttcagcagatggaatgcgtttggctctggctgatgctggtgacactgtagaagatgccaactttgtggaagccatggcagatgcaggtattctccgtctgtacacctgggtagagtgggtgaaagaaatggttgccaactgggacagcctaagaagtggtcctgccagcactttcaatgatagagtttttgccagtgaattgaatgcaggaattataaaaacagatcaaaactatgaaaagatgatgtttaaagaagctttgaaaacagggttttttgagtttcaggccgcaaaagataagtaccgtgaattggctgtggaagggatgcacagagaacttgtgttccggtttattgaagttcagacacttctcctcgctccattctgtccacatttgtgtgagcacatctggacactcctgggaaagcctgactcaattatgaatgcttcatggcctgtggcaggtcctgttaatgaagttttaatacactcctcacagtatcttatggaagtaacacatgaccttagactacgactcaagaactatatgatgccagctaaagggaagaagactgacaaacaacccctgcagaagccctcacattgcaccatctatgtggcaaagaactatccaccttggcaacataccaccctgtctgttctacgtaaacactttgaggccaataacggaaaactgcctgacaacaaagtcattgctagtgaactaggcagtatgccagaactgaagaaatacatgaagaaagtcatgccatttgttgccatgattaaggaaaatctggagaagatggggcctcgtattctggatttgcaattagaatttgatgaaaaggctgtgcttatggagaatatagtctatctgactaattcgcttgagctagaacacatagaagtcaagtttgcctccgaagcagaagataaaatcagggaagactgctgtcctgggaaaccacttaatgtttttagaatagaacctggtgtgtccgtttctctggtgaatccccagccatccaatggccacttctcaaccaaaattgaaatcaggcaaggagataactgtgattccataatcaggcgtttaatgaaaatgaatcgaggaattaaagacctttccaaagtgaaactgatgagatttgatgatccactgttggggcctcgacgagttcctgtcctgggaaaggagtacaccgagaagacccccatttctgagcatgctgttttcaatgtggacctcatgagcaagaaaattcatctgactgagaatgggataagggtggatattggcgatacaataatctatctggttcattaaactcatgcacattggagatttatcctggtttcttaggaatactactactctgattgtgtctactgattggctatcagaaccttaggctggacctaaatagattgatttcatttctaaccatccaattctgcatgtattcataattctatcaagtcatctttgattcctggacctaataaattttttttccctttc

SEQ ID NO: 423073 - DNA, 3810 bp, Homo sapiens
acgaagtattagagcgcccgatgatcatgctgcgcttattactcttgcctggcgcgttaacgtgattgcacagtcggtgcggtgcatggggaaagaaaaggaacagccaaagtggactttttgaagaagattgagaaagaaatccaacagaaatgggatactgagagagtgtttgaggtcaatgcatctaatttagagaaacagaccagcaagggcaagtattttgtaaccttcccatatccatatatgaatggacgccttcatttgggacacacgttttctttatccaaatgtgagtttgctgtagggtaccagcgattgaaaggaaaatgttgtctgtttccctttggcctgcactgtactggaatgcctattaaggcatgtgctgataagttgaaaagagaaatagagctgtatggttgcccccctgattttccagatgaagaagaggaagaggaagaaaccagtgttaaaacagaagatataataattaaggataaagctaaaggaaaaaagagtaaagctgctgctaaagctggatcttctaaataccagtggggcattatgaaatcccttggcctgtctgatgaagagatagtaaaattttctgaagcagaacattggcttgattatttcccgccactggctattcaggatttaaaaagaatgggtttgaaggtagactggcgtcgttccttcatcaccactgatgttaatccttactatgattcatttgtcagatggcaatttttaacattaagagaaagaaacaaaattaaatttgggaagcggtatacaatttactctccgaaagatggacagccttgcatggatcatgatagacaaactggagagggtgttggacctcaggaatatactttactcaaattgaaggtgcttgagccatacccatctaaattaagtggcctgaaaggtaaaaatattttcttggtggctgctactctcagacctgagaccatgtttgggcagacaaattgttgggttcgtcctgatatgaagtacattggatttgagacggtgaatggtgatatattcatctgtacccaaaaagcagccaggaatatgtcataccagggctttaccaaagacaatggcgtggtgcctgttgttaaggaattaatgggggaggaaattcttggtgcatcactttctgcacctttaacatcatacaaggtgatctatgttctcccaatgctaactattaaggaggataaaggcactggtgtggttacaagtgttccttccgactcccctgatgatattgctgccctcagagacttgaagaaaaagcaagccttacgagcaaaatatggaattagagatgacatggtcttgccatttgagccggtgccagtcattgaaatcccaggttttggaaatctttctgctgtaaccatttgtgatgagttgaaaattcagagccagaatgaccgggaaaaacttgcagaagcaaaggagaagatatatctaaaaggattttatgagggtatcatgttggtggatggatttaaaggacagaaggttcaagatgtaaagaagactattcagaaaaagatgattgacgctggagatgcacttatttacatggaaccagagaaacaagtgatgtccaggtcgtcagatgaatgtgttgtggctctgtgtgaccagtggtacttggattatggagaagagaattggaagaaacagacatctcagtgcttgaagaacctggaaacattctgtgaggagaccaggaggaattttgaagccaccttaggttggctacaagaacatgcttgctcaagaacttatggtctaggcactcacctgccttgggatgagcagtggctgattgaatcactttctgactccactatttacatggcattttacacagttgcacacctattgcaggggggtaacttgcatggacaggcagagtctccgctgggcattagaccgcaacagatgaccaaggaagtttgggattatgttttcttcaaggaggctccatttcctaagactcagattgcaaaggaaaaattagatcagttaaagcaggagtttgaattctggtatcctgttgatcttcgcgtctctggcaaggatcttgttccaaatcatctttcatattacctttataatcatgtggctatgtggccggaacaaagtgacaaatggcctacagctgtgagagcaaatggacatctcctcctgaactctgagaagatgtcaaaatccacaggcaacttcctcactttgacccaagctattgacaaattttcagcagatggaatgcgtttggctctggctgatgctggtgacactgtagaagatgccaactttgtggaagccatggcagatgcaggtattctccgtctgtacacctgggtagagtgggtgaaagaaatggttgccaactgggacagcctaagaagtggtcctgccagcactttcaatgatagagtttttgccagtgaattgaatgcaggaattataaaaacagatcaaaactatgaaaagatgatgtttaaagaagctttgaaaacagggttttttgagtttcaggccgcaaaagataagtaccgtgaattggctgtggaagggatgcacagagaacttgtgttccggtttattgaagttcagacacttctcctcgctccattctgtccacatttgtgtgagcacatctggacactcctgggaaagcctgactcaattatgaatgcttcatggcctgtggcaggtcctgttaatgaagttttaatacactcctcacagtatcttatggaagtaacacatgaccttagactacgactcaagaactatatgatgccagctaaagggaagaagactgacaaacaacccctgcagaagccctcacattgcaccatctatgtggcaaagaactatccaccttggcaacataccaccctgtctgttctacgtaaacactttgaggccaataacggaaaactgcctgacaacaaagtcattgctagtgaactaggcagtatgccagaactgaagaaatacatgaagaaagtcatgccatttgttgccatgattaaggaaaatctggagaagatggggcctcgtattctggatttgcaattagaatttgatgaaaaggctgtgcttatggagaatatagtctatctgactaattcgcttgagctagaacacatagaagtcaagtttgcctccgaagcagaagataaaatcagggaagactgctgtcctgggaaaccacttaatgtttttagaatagaacctggtgtgtccgtttctctggtgaatccccagccatccaatggccacttctcaaccaaaattgaaatcaggcaaggagataactgtgattccataatcaggcgtttaatgaaaatgaatcgaggaattaaagacctttccaaagtgaaactgatgagatttgatgatccactgttggggcctcgacgagttcctgtcctgggaaaggagtacaccgagaagacccccatttctgagcatgctgttttcaatgtggacctcatgagcaagaaaattcatctgactgagaatgggataagggtggatattggcgatacaataatctatctggttcattaaactcatgcacattggagatttatcctggtttcttaggaatactactactctgattgtgtctactgattggctatcagaaccttaggctggacctaaatagattgatttcatttctaaccatccaattctgcatgtattcataattctatcaagtcatctttgattcctggacctaataaattttttttccctttc

SEQ ID NO: 423074 - DNA, 3755 bp, Homo sapiens
ggctgtagttagtaaggagccggatgattgcctcagcaggtgtgaagcgtgtgctttagtttcgtgggaggcctggcatccccgagagggaggggaaaggtaaccactcctttgtggaggtcgccagggtcattgtcgtggatttgcacagtcggctgggcggtgcaatggcggaaagaaaaggaacagccaaagtggactttttgaagaagattgagaaagaaatccaacagaaatgggatactgagagagtgtttgaggtcaatgcatctaatttagagaaacagaccagcaagggcaagtattttgtaaccttcccatatccatatatgaatggacgccttcatttgggacacacgttttctttatccaaatgtgagtttgctgtagggtaccagcgattgaaaggaaaatgttgtctgtttccctttggcctgcactgtactggaatgcctattaagagtaaagctgctgctaaagctggatcttctaaataccagtggggcattatgaaatcccttggcctgtctgatgaagagatagtaaaattttctgaagcagaacattggcttgattatttcccgccactggctattcaggatttaaaaagaatgggtttgaaggtagactggcgtcgttccttcatcaccactgatgttaatccttactatgattcatttgtcagatggcaatttttaacattaagagaaagaaacaaaattaaatttgggaagcggtatacaatttactctccgaaagatggacagccttgcatggatcatgatagacaaactggagagggtgttggacctcaggaatatactttactcaaattgaaggtgcttgagccatacccatctaaattaagtggcctgaaaggtaaaaatattttcttggtggctgctactctcagacctgagaccatgtttgggcagacaaattgttgggttcgtcctgatatgaagtacattggatttgagacggtgaatggtgatatattcatctgtacccaaaaagcagccaggaatatgtcataccagggctttaccaaagacaatggcgtggtgcctgttgttaaggaattaatgggggaggaaattcttggtgcatcactttctgcacctttaacatcatacaaggtgatctatgttctcccaatgctaactattaaggaggataaaggcactggtgtggttacaagtgttccttccgactcccctgatgatattgctgccctcagagacttgaagaaaaagcaagccttacgagcaaaatatggaattagagatgacatggtcttgccatttgagccggtgccagtcattgaaatcccaggttttggaaatctttctgctgtaaccatttgtgatgagttgaaaattcagagccagaatgaccgggaaaaacttgcagaagcaaaggagaagatatatctaaaaggattttatgagggtatcatgttggtggatggatttaaaggacagaaggttcaagatgtaaagaagactattcagaaaaagatgattgacgctggagatgcacttatttacatggaaccagagaaacaagtgatgtccaggtcgtcagatgaatgtgttgtggctctgtgtgaccagtggtacttggattatggagaagagaattggaagaaacagacatctcagtgcttgaagaacctggaaacattctgtgaggagaccaggaggaattttgaagccaccttaggttggctacaagaacatgcttgctcaagaacttatggtctaggcactcacctgccttgggatgagcagtggctgattgaatcactttctgactccactatttacatggcattttacacagttgcacacctattgcaggggggtaacttgcatggacaggcagagtctccgctgggcattagaccgcaacagatgaccaaggaagtttgggattatgttttcttcaaggaggctccatttcctaagactcagattgcaaaggaaaaattagatcagttaaagcaggagtttgaattctggtatcctgttgatcttcgcgtctctggcaaggatcttgttccaaatcatctttcatattacctttataatcatgtggctatgtggccggaacaaagtgacaaatggcctacagctgtgagagcaaatggacatctcctcctgaactctgagaagatgtcaaaatccacaggcaacttcctcactttgacccaagctattgacaaattttcagcagatggaatgcgtttggctctggctgatgctggtgacactgtagaagatgccaactttgtggaagccatggcagatgcaggtattctccgtctgtacacctgggtagagtgggtgaaagaaatggttgccaactgggacagcctaagaagtggtcctgccagcactttcaatgatagagtttttgccagtgaattgaatgcaggaattataaaaacagatcaaaactatgaaaagatgatgtttaaagaagctttgaaaacagggttttttgagtttcaggccgcaaaagataagtaccgtgaattggctgtggaagggatgcacagagaacttgtgttccggtttattgaagttcagacacttctcctcgctccattctgtccacatttgtgtgagcacatctggacactcctgggaaagcctgactcaattatgaatgcttcatggcctgtggcaggtcctgttaatgaagttttaatacactcctcacagtatcttatggaagtaacacatgaccttagactacgactcaagaactatatgatgccagctaaagggaagaagactgacaaacaacccctgcagaagccctcacattgcaccatctatgtggcaaagaactatccaccttggcaacataccaccctgtctgttctacgtaaacactttgaggccaataacggaaaactgcctgacaacaaagtcattgctagtgaactaggcagtatgccagaactgaagaaatacatgaagaaagtcatgccatttgttgccatgattaaggaaaatctggagaagatggggcctcgtattctggatttgcaattagaatttgatgaaaaggctgtgcttatggagaatatagtctatctgactaattcgcttgagctagaacacatagaagtcaagtttgcctccgaagcagaagataaaatcagggaagactgctgtcctgggaaaccacttaatgtttttagaatagaacctggtgtgtccgtttctctggtgaatccccagccatccaatggccacttctcaaccaaaattgaaatcaggcaaggagataactgtgattccataatcaggcgtttaatgaaaatgaatcgaggaattaaagacctttccaaagtgaaactgatgagatttgatgatccactgttggggcctcgacgagttcctgtcctgggaaaggagtacaccgagaagacccccatttctgagcatgctgttttcaatgtggacctcatgagcaagaaaattcatctgactgagaatgggataagggtggatattggcgatacaataatctatctggttcattaaactcatgcacattggagatttatcctggtttcttaggaatactactactctgattgtgtctactgattggctatcagaaccttaggctggacctaaatagattgatttcatttctaaccatccaattctgcatgtattcataattctatcaagtcatctttgattcctggacctaataaattttttttccctttc

SEQ ID NO: 423075 - DNA, 5621 bp, Homo sapiens
ggctgtagttagtaaggagccggatgattgcctcagcaggtgtgaagcgtgtgctttagtttcgtgggaggcctggcatccccgagagggaggggaaaggtaaccactcctttgtggaggtcgccagggtcattgtcgtggatttgcacagtcggctgggcggtgcaatggcggaaagaaaaggaacagccaaagtggactttttgaagaagattgagaaagaaatccaacagaaatgggatactgagagagtgtttgaggtcaatgcatctaatttagagaaacagaccagcaagggcaagtattttgtaaccttcccatatccatatatgaatggacgccttcatttgggacacacgttttctttatccaaatgtgagtttgctgtagggtaccagcgattgaaaggaaaatgttgtctgtttccctttggcctgcactgtactggaatgcctattaaggcatgtgctgataagttgaaaagagaaatagagctgtatggttgcccccctgattttccagatgaagaagaggaagaggaagaaaccagtgttaaaacagaagatataataattaaggataaagctaaaggaaaaaagagtaaagctgctgctaaagctggatcttctaaataccagtggggcattatgaaatcccttggcctgtctgatgaagagatagtaaaattttctgaagcagaacattggcttgattatttcccgccactggctattcaggatttaaaaagaatgggtttgaaggtagactggcgtcgttccttcatcaccactgatgttaatccttactatgattcatttgtcagatggcaatttttaacattaagagaaagaaacaaaattaaatttgggaagcggtatacaatttactctccgaaagatggacagccttgcatggatcatgatagacaaactggagagggtgttggacctcaggaatatactttactcaaattgaaggtgcttgagccatacccatctaaattaagtggcctgaaaggtaaaaatattttcttggtggctgctactctcagacctgagaccatgtttgggcagacaaattgttgggttcgtcctgatatgaagtacattggatttgagacggtgaatggtgatatattcatctgtacccaaaaagcagccaggaatatgtcataccagggctttaccaaagacaatggcgtggtgcctgttgttaaggaattaatgggggaggaaattcttggtgcatcactttctgcacctttaacatcatacaaggtgatctatgttctcccaatgctaactattaaggaggataaaggcactggtgtggttacaagtgttccttccgactcccctgatgatattgctgccctcagagacttgaagaaaaagcaagccttacgagcaaaatatggaattagagatgacatggtcttgccatttgagccggtgccagtcattgaaatcccaggttttggaaatctttctgctgtaaccatttgtgatgagttgaaaattcagagccagaatgaccgggaaaaacttgcagaagcaaaggagaagatatatctaaaaggattttatgagggtatcatgttggtggatggatttaaaggacagaaggttcaagatgtaaagaagactattcagaaaaagatgattgacgctggagatgcacttatttacatggaaccagagaaacaagtgatgtccaggtcgtcagatgaatgtgttgtggctctgtgtgaccagtggtacttggattatggagaagagaattggaagaaacagacatctcagtgcttgaagaacctggaaacattctgtgaggagaccaggaggaattttgaagccaccttaggttggctacaagaacatgcttgctcaagaacttatggtctaggcactcacctgccttgggatgagcagtggctgattgaatcactttctgactccactatttacatggcattttacacagttgcacacctattgcaggggggtaacttgcatggacaggcagagtctccgctgggcattagaccgcaacagatgaccaaggaagtttgggattatgttttcttcaaggaggctccatttcctaagactcagattgcaaaggaaaaattagatcagttaaagcaggagtttgaattctggtatcctgttgatcttcgcgtctctggcaaggatcttgttccaaatcatctttcatattacctttataatcatgtggctatgtggccggaacaaagtgacaaatggcctacagctgtgagagcaaatggacatctcctcctgaactctgagaagatgtcaaaatccacaggcaacttcctcactttgacccaagctattgacaaattttcagcagatggaatgcgtttggctctggctgatgctggtgacactgtagaagatgccaactttgtggaagccatggcagatgcaggtattctccgtctgtacacctgggtagagtgggtgaaagaaatggttgccaactgggacagcctaagaagtggtcctgccagcactttcaatgatagagtttttgccagtgaattgaatgcaggaattataaaaacagatcaaaactatgaaaagatgatgtttaaagaagctttgaaaacagggttttttgagtttcaggccgcaaaagataagtaccgtgaattggctgtggaagggatgcacagagaacttgtgttccggtttattgaagttcagacacttctcctcgctccattctgtccacatttgtgtgagcacatctggacactcctgggaaagcctgactcaattatgaatgcttcatggcctgtggcaggtcctgttaatgaagttttaatacactcctcacagtatcttatggaagtaacacatgaccttagactacgactcaagaactatatgatgccagctaaagggaagaagactgacaaacaacccctgcagaagccctcacattgcaccatctatgtggcaaagaactatccaccttggcaacataccaccctgtctgttctacgtaaacactttgaggccaataacggaaaactgcctgacaacaaagtcattgctagtgaactaggcagtatgccagaactgaagaaatacatgaagaaagtcatgccatttgttgccatgattaaggaaaatctggagaagatggggcctcgtattctggatttgcaattagaatttgatgaaaaggctgtgcttatggagaatatagtctatctgactaattcgcttgagctagaacacatagaagtcaagtttgcctccgaagcagaagataaaatcagggaagactgctgtcctgggaaaccacttaatgtttttagaatagaacctggtgtgtccgtttctctggtgaatccccagccatccaatggccacttctcaaccaaaattgaaatcaggcaaggagataactgtgattccataatcaggcgtttaatgaaaatgaatcgaggaattaaagacctttccaaagtgaaactgatgagatttgatgatccactgttggggcctcgacgagttcctgtcctgggaaaggagtacaccgagaagacccccatttctgagcatgctgttttcaatgtggacctcatgagcaagaaaattcatctgactgagaatgggataagggtggatattggcgatacaataatctatctggttcattaaactcatgcacattggagatttatcctggtttcttaggaatactactactctgattgtgtctactgattggctatcagaaccttaggctggacctaaatagattgatttcatttctaaccatccaattctgcatgtattcataattctatcaagtcatctttgattcctggacctaataaattttttttccctttctttgggtgtccaagagaaatggtttttgccaaactctttttaaaaaacaaattgttgctatttcctagaagtttctggtttttaagatgaacataaaagtgtcagtatgcttcttttatgaggtgtactttatactttgatgaaggctaaggtgtacctaacagctttttatagtatattcatttatggagttagctgtattttttttaaaaaaagaaaagtagtaaattagcagctttttttttttaaatgaagagaacttcatgatgatttaaaagaactaatgagaatattttgacttgacttcaattactaagtattttgtataaagaacaaataggtcctgcattttataagactttttaaagctttaattattcaactaagaaccaataatggcttcttcaaggctaatatcaatagtttataagcagtatatttcacctacactaaatatgggcattttaaaagaagattccccccttcccccccagaaatctgcatttactaaatttgtcttaagtccaattgtgtttaaaggtcatgctggtcgggtgtggtggctcacacctataatcccagcactttgggaggccaaggtgggcagtcacctgaggtcaggagtttgagaccagcctgaccaacatggtgaaaccccgtctctactaaaaatacaaaaattagcttggcatggtggcgggtacctgtaatcccagctgcttgggagtgtgaggcaggagaatcgcttgaacctgggagaccgaggttgcagtgagctgaaaccgtgccattgcactccagcttaggcaacaagagtgaaactctgtctcaatcaatccatcaatcaatcaataaaatagaggtcatgctgactattacagatttattcttttattcttgttggagtgtcttttaatatctgcgccatctgtcttcatatgaggaaaaaatgtaaggcattgactaacaggagaaacatttctaattttgatgggtttaatatggagaaagaacaattttgataacccagaggaacctgaattctaactgcggttatgtaaatagagtttattgagcttccttattttgctctccgcagttagggaccactaggcctagtcatatggtttatcacagatttattgaagccaatcataggatgttagaattagaaatcatcaagtgcaaataatcacttatctactagggacaggcactatagcatagtggggtaagagcgcatgctctgaaatcagactagctaggttagatttccagttcttctttttgctactaggatgctcttggccaattactcggagctgcagttcttcatctataaaatggaactaatactggtaccttgtaggcttattgtgagacgtttaggtgaactgatctaggaaaatcataacacagtgcctggcaagtagtaagtctttagtgaatgttaccattgaagaagaagaagatgatggataccaaggtatattggcttcagattactgtagtctgtaatcatgtcctttgtgttggttcctttggggcaactgattctttctttgcactcctctagattcttttgctgtcctctctgatctgcaaagccttaattatttctgaaattaagtaatactttctgttgcctaaacacaaacctacttgtgtttaacttaggaaaattaaactatgtgtgcttggccagaaaaaaaaaaagagagagaaagg

SEQ ID NO: 423076 - DNA, 4726 bp, Homo sapiens
ggctgtagttagtaaggagccggatgattgcctcagcaggtgtgaagcgtgtgctttagtttcgtgggaggcctggcatccccgagagggaggggaaaggtaaccactcctttgtggaggtcgccagggtcattgtcgtggatttgcacagtcggctgggcggtgcaatggcggaaagaaaaggaacagccaaagtggactttttgaagaagattgagaaagaaatccaacagaaatgggatactgagagagtgtttgaggtcaatgcatctaatttagagaaacagaccagcaagggcaagtattttgtaaccttcccatatccatatatgaatggacgccttcatttgggacacacgttttctttatccaaatgtgagtttgctgtagggtaccagcgattgaaaggaaaatgttgtctgtttccctttggcctgcactgtactggaatgcctattaaggcatgtgctgataagttgaaaagagaaatagagctgtatggttgcccccctgattttccagatgaagaagaggaagaggaagaaaccagtgttaaaacagaagatataataattaaggataaagctaaaggaaaaaagagtaaagctgctgctaaagctggatcttctaaataccagtggggcattatgaaatcccttggcctgtctgatgaagagatagtaaaattttctgaagcagaacattggcttgattatttcccgccactggctattcaggatttaaaaagaatgggtttgaaggtagactggcgtcgttccttcatcaccactgatgttaatccttactatgattcatttgtcagatggcaatttttaacattaagagaaagaaacaaaattaaatttgggaagcggtatacaatttactctccgaaagatggacagccttgcatggatcatgatagacaaactggagagggtgttggacctcaggaatatactttactcaaattgaaggtgcttgagccatacccatctaaattaagtggcctgaaaggtaaaaatattttcttggtggctgctactctcagacctgagaccatgtttgggcagacaaattgttgggttcgtcctgatatgaagtacattggatttgagacggtgaatggtgatatattcatctgtacccaaaaagcagccaggaatatgtcataccagggctttaccaaagacaatggcgtggtgcctgttgttaaggaattaatgggggaggaaattcttggtgcatcactttctgcacctttaacatcatacaaggtgatctatgttctcccaatgctaactattaaggaggataaaggcactggtgtggttacaagtgttccttccgactcccctgatgatattgctgccctcagagacttgaagaaaaagcaagccttacgagcaaaatatggaattagagatgacatggtcttgccatttgagccggtgccagtcattgaaatcccaggttttggaaatctttctgctgtaaccatttgtgatgagttgaaaattcagagccagaatgaccgggaaaaacttgcagaagcaaaggagaagatatatctaaaaggattttatgagggtatcatgttggtggatggatttaaaggacagaaggttcaagatgtaaagaagactattcagaaaaagatgattgacgctggagatgcacttatttacatggaaccagagaaacaagtgatgtccaggtacttggattatggagaagagaattggaagaaacagacatctcagtgcttgaagaacctggaaacattctgtgaggagaccaggaggaattttgaagccaccttaggttggctacaagaacatgcttgctcaagaacttatggtctaggcactcacctgccttgggatgagcagtggctgattgaatcactttctgactccactatttacatggcattttacacagttgcacacctattgcaggggggtaacttgcatggacaggcagagtctccgctgggcattagaccgcaacagatgaccaaggaagtttgggattatgttttcttcaaggaggctccatttcctaagactcagattgcaaaggaaaaattagatcagttaaagcaggagtttgaattctggtatcctgttgatcttcgcgtctctggcaaggatcttgttccaaatcatctttcatattacctttataatcatgtggctatgtggccggaacaaagtgacaaatggcctacagctgtgagagcaaatggacatctcctcctgaactctgagaagatgtcaaaatccacaggcaacttcctcactttgacccaagctattgacaaattttcagcagatggaatgcgtttggctctggctgatgctggtgacactgtagaagatgccaactttgtggaagccatggcagatgcaggtattctccgtctgtacacctgggtagagtgggtgaaagaaatggttgccaactgggacagcctaagaagtggtcctgccagcactttcaatgatagagtttttgccagtgaattgaatgcaggaattataaaaacagatcaaaactatgaaaagatgatgtttaaagaagctttgaaaacagggttttttgagtttcaggccgcaaaagataagtaccgtgaattggctgtggaagggatgcacagagaacttgtgttccggtttattgaagttcagacacttctcctcgctccattctgtccacatttgtgtgagcacatctggacactcctgggaaagcctgactcaattatgaatgcttcatggcctgtggcaggtcctgttaatgaagttttaatacactcctcacagtatcttatggaagtaacacatgaccttagactacgactcaagaactatatgatgccagctaaagggaagaagactgacaaacaacccctgcagaagccctcacattgcaccatctatgtggcaaagaactatccaccttggcaacataccaccctgtctgttctacgtaaacactttgaggccaataacggaaaactgcctgacaacaaagtcattgctagtgaactaggcagtatgccagaactgaagaaatacatgaagaaagtcatgccatttgttgccatgattaaggaaaatctggagaagatggggcctcgtattctggatttgcaattagaatttgatgaaaaggctgtgcttatggagaatatagtctatctgactaattcgcttgagctagaacacatagaagtcaagtttgcctccgaagcagaagataaaatcagggaagactgctgtcctgggaaaccacttaatgtttttagaatagaacctggtgtgtccgtttctctggtgaatccccagccatccaatggccacttctcaaccaaaattgaaatcaggcaaggagataactgtgattccataatcaggcgtttaatgaaaatgaatcgaggaattaaagacctttccaaagtgaaactgatgagatttgatgatccactgttggggcctcgacgagttcctgtcctgggaaaggagtacaccgagaagacccccatttctgagcatgctgttttcaatgtggacctcatgagcaagaaaattcatctgactgagaatgggataagggtggatattggcgatacaataatctatctggttcattaaactcatgcacattggagatttatcctggtttcttaggaatactactactctgattgtgtctactgattggctatcagaaccttaggctggacctaaatagattgatttcatttctaaccatccaattctgcatgtattcataattctatcaagtcatctttgattcctggacctaataaattttttttccctttctttgggtgtccaagagaaatggtttttgccaaactctttttaaaaaacaaattgttgctatttcctagaagtttctggtttttaagatgaacataaaagtgtcagtatgcttcttttatgaggtgtactttatactttgatgaaggctaaggtgtacctaacagctttttatagtatattcatttatggagttagctgtattttttttaaaaaaagaaaagtagtaaattagcagctttttttttttaaatgaagagaacttcatgatgatttaaaagaactaatgagaatattttgacttgacttcaattactaagtattttgtataaagaacaaataggtcctgcattttataagactttttaaagctttaattattcaactaagaaccaataatggcttcttcaaggctaatatcaatagtttataagcagtatatttcacctacactaaatatgggcattttaaaagaagattccccccttcccccccagaaatctgcatttactaaatttgtcttaagtccaattgtgtttaaaggtcatgctggtcgggtgtggtggctcacacctataatcccagcactttgggaggccaaggtgggcagtcacctgaggtcaggagtttgagaccagcctgaccaacatggtgaaaccccgtctctactaaaaatacaaaaattagcttggcatggtggcgggtacctgtaatcccagctgcttgggagtgtgaggcaggagaatcgcttgaacctgggagaccgaggttgcagtgagctgaaaccgtgccattgcactccagcttaggcaacaagagtgaaactctgtctcaatcaatccatcaatcaatcaataaaatagaggtcatgctga

SEQ ID NO: 423077 - DNA, 3160 bp, Homo sapiens
atgtctatactccaagacagccgctggaaataagaaccagcaaaaggacagaacttgctcaaggtcagtgggttgagtttggctgtgcacccttggggccagaagcctatgtcaccgtggtgctgaagctgcttgggcgagactcagtcattacctccacaggacccattgacctggcccagaaatttggatacaaactggtgatggtgttggacctcaggaatatactttactcaaattgaaggtgcttgagccatacccatctaaattaagtggcctgaaaggtaaaaatattttcttggtggctgctactctcagacctgagaccatgtttgggcagacaaattgttgggttcgtcctgatatgaagtacattggatttgagacggtgaatggtgatatattcatctgtacccaaaaagcagccaggaatatgtcataccagggctttaccaaagacaatggcgtggtgcctgttgttaaggaattaatgggggaggaaattcttggtgcatcactttctgcacctttaacatcatacaaggtgatctatgttctcccaatgctaactattaaggaggataaaggcactggtgtggttacaagtgttccttccgactcccctgatgatattgctgccctcagagacttgaagaaaaagcaagccttacgagcaaaatatggaattagagatgacatggtcttgccatttgagccggtgccagtcattgaaatcccaggttttggaaatctttctgctgtaaccatttgtgatgagttgaaaattcagagccagaatgaccgggaaaaacttgcagaagcaaaggagaagatatatctaaaaggattttatgagggtatcatgttggtggatggatttaaaggacagaaggttcaagatgtaaagaagactattcagaaaaagatgattgacgctggagatgcacttatttacatggaaccagagaaacaagtgatgtccaggtcgtcagatgaatgtgttgtggctctgtgtgaccagtggtacttggattatggagaagagaattggaagaaacagacatctcagtgcttgaagaacctggaaacattctgtgaggagaccaggaggaattttgaagccaccttaggttggctacaagaacatgcttgctcaagaacttatggtctaggcactcacctgccttgggatgagcagtggctgattgaatcactttctgactccactatttacatggcattttacacagttgcacacctattgcaggggggtaacttgcatggacaggcagagtctccgctgggcattagaccgcaacagatgaccaaggaagtttgggattatgttttcttcaaggaggctccatttcctaagactcagattgcaaaggaaaaattagatcagttaaagcaggagtttgaattctggtatcctgttgatcttcgcgtctctggcaaggatcttgttccaaatcatctttcatattacctttataatcatgtggctatgtggccggaacaaagtgacaaatggcctacagctgtgagagcaaatggacatctcctcctgaactctgagaagatgtcaaaatccacaggcaacttcctcactttgacccaagctattgacaaattttcagcagatggaatgcgtttggctctggctgatgctggtgacactgtagaagatgccaactttgtggaagccatggcagatgcaggtattctccgtctgtacacctgggtagagtgggtgaaagaaatggttgccaactgggacagcctaagaagtggtcctgccagcactttcaatgatagagtttttgccagtgaattgaatgcaggaattataaaaacagatcaaaactatgaaaagatgatgtttaaagaagctttgaaaacagggttttttgagtttcaggccgcaaaagataagtaccgtgaattggctgtggaagggatgcacagagaacttgtgttccggtttattgaagttcagacacttctcctcgctccattctgtccacatttgtgtgagcacatctggacactcctgggaaagcctgactcaattatgaatgcttcatggcctgtggcaggtcctgttaatgaagttttaatacactcctcacagtatcttatggaagtaacacatgaccttagactacgactcaagaactatatgatgccagctaaagggaagaagactgacaaacaacccctgcagaagccctcacattgcaccatctatgtggcaaagaactatccaccttggcaacataccaccctgtctgttctacgtaaacactttgaggccaataacggaaaactgcctgacaacaaagtcattgctagtgaactaggcagtatgccagaactgaagaaatacatgaagaaagtcatgccatttgttgccatgattaaggaaaatctggagaagatggggcctcgtattctggatttgcaattagaatttgatgaaaaggctgtgcttatggagaatatagtctatctgactaattcgcttgagctagaacacatagaagtcaagtttgcctccgaagcagaagataaaatcagggaagactgctgtcctgggaaaccacttaatgtttttagaatagaacctggtgtgtccgtttctctggtgaatccccagccatccaatggccacttctcaaccaaaattgaaatcaggcaaggagataactgtgattccataatcaggcgtttaatgaaaatgaatcgaggaattaaagacctttccaaagtgaaactgatgagatttgatgatccactgttggggcctcgacgagttcctgtcctgggaaaggagtacaccgagaagacccccatttctgagcatgctgttttcaatgtggacctcatgagcaagaaaattcatctgactgagaatgggataagggtggatattggcgatacaataatctatctggttcattaaactcatgcacattggagatttatcctggtttcttaggaatactactactctgattgtgtctactgattggctatcagaaccttaggctggacctaaatagattgatttcatttctaaccatccaattctgcatgtattcataattctatcaagtcatctttgattcctggacctaataaattttttttccctttc

SEQ ID NO: 423078 - DNA, 2808 bp, Homo sapiens
  misc_feature (188)..(188): n is a, c, g, or t
  misc_feature (211)..(211): n is a, c, g, or t
tcagtcttgtcagttgacacccactgtatttctccacttgtttcttgccactctccactcttatcatgctgagtggtgggagcatctttgatcaactcatctgttttactttctgctagctgggctgcccgctctcgctcaaggaatagctgcactaaagcctggacagcatgaacttgtccacctanccttaaactatcatccccttctncactacagatggaagaatcaaaaggcactggtgtggttacaagtgttccttccgactcccctgatgatattgctgccctcagagacttgaagaaaaagcaagccttacgagcaaaatatggaattagagatgacatggtcttgccatttgagccggtgccagtcattgaaatcccaggttttggaaatctttctgctgtaaccatttgtgatgagttgaaaattcagagccagaatgaccgggaaaaacttgcagaagcaaaggagaagatatatctaaaaggattttatgagggtatcatgttggtggatggatttaaaggacagaaggttcaagatgtaaagaagactattcagaaaaagatgattgacgctggagatgcacttatttacatggaaccagagaaacaagtgatgtccaggtcgtcagatgaatgtgttgtggctctgtgtgaccagtggtacttggattatggagaagagaattggaagaaacagacatctcagtgcttgaagaacctggaaacattctgtgaggagaccaggaggaattttgaagccaccttaggttggctacaagaacatgcttgctcaagaacttatggtctaggcactcacctgccttgggatgagcagtggctgattgaatcactttctgactccactatttacatggcattttacacagttgcacacctattgcaggggggtaacttgcatggacaggcagagtctccgctgggcattagaccgcaacagatgaccaaggaagtttgggattatgttttcttcaaggaggctccatttcctaagactcagattgcaaaggaaaaattagatcagttaaagcaggagtttgaattctggtatcctgttgatcttcgcgtctctggcaaggatcttgttccaaatcatctttcatattacctttataatcatgtggctatgtggccggaacaaagtgacaaatggcctacagctgtgagagcaaatggacatctcctcctgaactctgagaagatgtcaaaatccacaggcaacttcctcactttgacccaagctattgacaaattttcagcagatggaatgcgtttggctctggctgatgctggtgacactgtagaagatgccaactttgtggaagccatggcagatgcaggtattctccgtctgtacacctgggtagagtgggtgaaagaaatggttgccaactgggacagcctaagaagtggtcctgccagcactttcaatgatagagtttttgccagtgaattgaatgcaggaattataaaaacagatcaaaactatgaaaagatgatgtttaaagaagctttgaaaacagggttttttgagtttcaggccgcaaaagataagtaccgtgaattggctgtggaagggatgcacagagaacttgtgttccggtttattgaagttcagacacttctcctcgctccattctgtccacatttgtgtgagcacatctggacactcctgggaaagcctgactcaattatgaatgcttcatggcctgtggcaggtcctgttaatgaagttttaatacactcctcacagtatcttatggaagtaacacatgaccttagactacgactcaagaactatatgatgccagctaaagggaagaagactgacaaacaacccctgcagaagccctcacattgcaccatctatgtggcaaagaactatccaccttggcaacataccaccctgtctgttctacgtaaacactttgaggccaataacggaaaactgcctgacaacaaagtcattgctagtgaactaggcagtatgccagaactgaagaaatacatgaagaaagtcatgccatttgttgccatgattaaggaaaatctggagaagatggggcctcgtattctggatttgcaattagaatttgatgaaaaggctgtgcttatggagaatatagtctatctgactaattcgcttgagctagaacacatagaagtcaagtttgcctccgaagcagaagataaaatcagggaagactgctgtcctgggaaaccacttaatgtttttagaatagaacctggtgtgtccgtttctctggtgaatccccagccatccaatggccacttctcaaccaaaattgaaatcaggcaaggagataactgtgattccataatcaggcgtttaatgaaaatgaatcgaggaattaaagacctttccaaagtgaaactgatgagatttgatgatccactgttggggcctcgacgagttcctgtcctgggaaaggagtacaccgagaagacccccatttctgagcatgctgttttcaatgtggacctcatgagcaagaaaattcatctgactgagaatgggataagggtggatattggcgatacaataatctatctggttcattaaactcatgcacattggagatttatcctggtttcttaggaatactactactctgattgtgtctactgattggctatcagaaccttaggctggacctaaatagattgatttcatttctaaccatccaattctgcatgtattcataattctatcaagtcatctttgattcctggacctaataaattttttttccctttc

SEQ ID NO: 423079 - DNA, 3633 bp, Homo sapiens
ggctgtagttagtaaggagccggatgattgcctcagcaggtgtgaagcgtgtgctttagtttcgtgggaggcctggcatccccgagagggaggggaaaggtaaccactcctttgtggaggtcgccagggtcattgtcgtggatttgcacagtcggctgggcggtgcaatggcggaaagaaaaggaacagccaaagtggactttttgaagaagattgagaaagaaatccaacagaaatgggatactgagagagtgtttgaggtcaatgcatctaatttagagaaacagaccagcaagggcaagtattttgtaaccttcccatatccatatatgaatggacgccttcatttgggacacacgttttctttatccaaatgtgagtttgctgtagggtaccagcgattgaaaggaaaatgttgtctgtttccctttggcctgcactgtactggaatgcctattaaggcatgtgctgataagttgaaaagagaaatagagctgtatggttgcccccctgattttccagatgaagaagaggaagaggaagaaaccagtgttaaaacagaagatataataattaaggataaagctaaaggaaaaaagagtaaagctgctgctaaagctggatcttctaaataccagtggggcattatgaaatcccttggcctgtctgatgaagagatagtaaaattttctgaagcagaacattggcttgattatttcccgccactggctattcaggatttaaaaagaatgggtttgaaggtagactggcgtcgttccttcatcaccactgatgttaatccttactatgattcatttgtcagatggcaatttttaacattaagagaaagaaacaaaattaaatttgggaagcggtatacaatttactctccgaaagatggacagccttgcatggatcatgatagacaaactggagagggtgttggacctcaggaatatactttactcaaattgaaggtgcttgagccatacccatctaaattaagtggcctgaaaggtaaaaatattttcttggtggctgctactctcagacctgagaccatgtttgggcagacaaattgttgggttcgtcctgatatgaagtacattggatttgagacggtgaatggtgatatattcatctgtacccaaaaagcagccaggaatatgtcataccagggctttaccaaagacaatggcgtggtgcctgttgttaaggaattaatgggggaggaaattcttggtgcatcactttctgcacctttaacatcatacaaggtgatctatgttctcccaatgctaactattaaggaggataaaggcactggtgtggttacaagtgttccttccgactcccctgatgatattgctgccctcagagacttgaagaaaaagcaagccttacgagcaaaatatggaattagagatgacatggtcttgccatttgagccggtgccagtcattgaaatcccaggttttggaaatctttctgctgtaaccatttgtgatgagttgaaaattcagagccagaatgaccgggaaaaacttgcagaagcaaaggagaagatatatctaaaaggattttatgagggtatcatgttggtggatggatttaaaggacagaaggttcaagatgtaaagaagactattcagaaaaagatgattgacgctggagatgcacttatttacatggaaccagagaaacaagtgatgtccaggtcgtcagatgaatgtgttgtggctctgtgtgaccagtggtacttggattatggagaagagaattggaagaaacagacatctcagtgcttgaagaacctggaaacattctgtgaggagaccaggaggaattttgaagccaccttaggttggctacaagaacatgcttgctcaagaacttatggtctaggcactcacctgccttgggatgagcagtggctgattgaatcactttctgactccactatttacatggcattttacacagttgcacacctattgcaggggggtaacttgcatggacaggcagagtctccgctgggcattagaccgcaacagatgaccaaggaagtttgggattatgttttcttcaaggaggctccatttcctaagactcagattgcaaaggaaaaattagatcagttaaagcaggagtttgaattctggtatcctgttgatcttcgcgtctctggcaaggatcttgttccaaatcatctttcatattacctttataatcatgtggctatgtggccggaacaaagtgacaaatggcctacagctgtgagagcaaatggacatctcctcctgaactctgagaagatgtcaaaatccacaggcaacttcctcactttgacccaagctattgacaaattttcagcagatggaatgcgtttggctctggctgatgctggtgacactgtagaagatgccaactttgtggaagccatggcagatgcaggtattctccgtctgtacacctgggtagagtgggtgaaagaaatggttgccaactgggacagcctaagaagtggtcctgccagcactttcaatgatagagtttttgccagtgaattgaatgcaggaattataaaaacagatcaaaactatgaaaagatgatgtttaaagaagctttgaaaacagggttttttgagtttcaggccgcaaaagataagtaccgtgaattggctgtggaagggatgcaagaagccctcacattgcaccatctatgtggcaaagaactatccaccttggcaacataccaccctgtctgttctacgtaaacactttgaggccaataacggaaaactgcctgacaacaaagtcattgctagtgaactaggcagtatgccagaactgaagaaatacatgaagaaagtcatgccatttgttgccatgattaaggaaaatctggagaagatggggcctcgtattctggatttgcaattagaatttgatgaaaaggctgtgcttatggagaatatagtctatctgactaattcgcttgagctagaacacatagaagtcaagtttgcctccgaagcagaagataaaatcagggaagactgctgtcctgggaaaccacttaatgtttttagaatagaacctggtgtgtccgtttctctggtgaatccccagccatccaatggccacttctcaaccaaaattgaaatcaggcaaggagataactgtgattccataatcaggcgtttaatgaaaatgaatcgaggaattaaagacctttccaaagtgaaactgatgagatttgatgatccactgttggggcctcgacgagttcctgtcctgggaaaggagtacaccgagaagacccccatttctgagcatgctgttttcaatgtggacctcatgagcaagaaaattcatctgactgagaatgggataagggtggatattggcgatacaataatctatctggttcattaaactcatgcacattggagatttatcctggtttcttaggaatactactactctgattgtgtctactgattggctatcagaaccttaggctggacctaaatagattgatttcatttctaaccatccaattctgcatgtattcataattctatcaagtcatctttgattcctggacctaataaattttttttccctttc

SEQ ID NO: 423080 - DNA, 3859 bp, Homo sapiens
  misc_feature (3806)..(3806): n is a, c, g, or t
  misc_feature (3828)..(3828): n is a, c, g, or t
  misc_feature (3832)..(3832): n is a, c, g, or t
ggctgtagttagtaaggagccggatgattgcctcagcaggtgtgaagcgtgtgctttagtttcgtgggaggcctggcatccccgagagggaggggaaaggtaaccactcctttgtggaggtcgccagggtcattgtcgtggatttgcacagtcggctgggcggtgcaatggcggaaagaaaaggaacagccaaagtggactttttgaagaagattgagaaagaaatccaacagaaatgggatactgagagagtgtttgaggtcaatgcatctaatttagagaaacagaccagcaagggcaagtattttgtaaccttcccatatccatatatgaatggacgccttcatttgggacacacgttttctttatccaaatgtgagtttgctgtagggtaccagcgattgaaaggaaaatgttgtctgtttccctttggcctgcactgtactggaatgcctattaaggcatgtgctgataagttgaaaagagaaatagagctgtatggttgcccccctgattttccagatgaagaagaggaagaggaagaaaccagtgttaaaacagaagatataataattaaggataaagctaaaggaaaaaagagtaaagctgctgctaaagctggatcttctaaataccagtggggcattatgaaatcccttggcctgtctgatgaagagatagtaaaattttctgaagcagaacattggcttgattatttcccgccactggctattcaggatttaaaaagaatgggtttgaaggtagactggcgtcgttccttcatcaccactgatgttaatccttactatgattcatttgtcagatggcaatttttaacattaagagaaagaaacaaaattaaatttgggaagcggtatacaatttactctccgaaagatggacagccttgcatggatcatgatagacaaactggagagggtgttggacctcaggaatatactttactcaaattgaaggtgcttgagccatacccatctaaattaagtggcctgaaaggtaaaaatattttcttggtggctgctactctcagacctgagaccatgtttgggcagacaaattgttgggttcgtcctgatatgaagtacattggatttgagacggtgaatggtgatatattcatctgtacccaaaaagcagccaggaatatgtcataccagggctttaccaaagacaatggcgtggtgcctgttgttaaggaattaatgggggaggaaattcttggtgcatcactttctgcacctttaacatcatacaaggtgatctatgttctcccaatgctaactattaaggaggataaaggcactggtgtggttacaagtgttccttccgactcccctgatgatattgctgccctcagagacttgaagaaaaagcaagccttacgagcaaaatatggaattagagatgacatggtcttgccatttgagccggtgccagtcattgaaatcccaggttttggaaatctttctgctgtaaccatttgtgatgagttgaaaattcagagccagaatgaccgggaaaaacttgcagaagcaaaggagaagatatatctaaaaggattttatgagggtatcatgttggtggatggatttaaaggacagaaggttcaagatgtaaagaagactattcagaaaaagatgattgacgctggagatgcacttatttacatggaaccagagaaacaagtgatgtccaggtcgtcagatgaatgtgttgtggctctgtgtgaccagtggtacttggattatggagaagagaattggaagaaacagacatctcagtgcttgaagaacctggaaacattctgtgaggagaccaggaggaattttgaagccaccttaggttggctacaagaacatgcttgctcaagaacttatggtctaggcactcacctgccttgggatgagcagtggctgattgaatcactttctgactccactatttacatggcattttacacagttgcacacctattgcaggggggtaacttgcatggacaggcagagtctccgctgggcattagaccgcaacagatgaccaaggaagtttgggattatgttttcttcaaggaggctccatttcctaagactcagattgcaaaggaaaaattagatcagttaaagcaggagtttgaattctggtatcctgttgatcttcgcgtctctggcaaggatcttgttccaaatcatctttcatattacctttataatcatgtggctatgtggccggaacaaagtgacaaatggcctacagctgtgagagcaaatggacatctcctcctgaactctgagaagatgtcaaaatccacaggcaacttcctcactttgacccaagctattgacaaattttcagcagatggaatgcgtttggctctggctgatgctggtgacactgtagaagatgccaactttgtggaagccatggcagatgcaggtattctccgtctgtacacctgggtagagtgggtgaaagaaatggttgccaactgggacagcctaagaagtggtcctgccagcactttcaatgatagagtttttgccagtgaattgaatgcaggaattataaaaacagatcaaaactatgaaaagatgatgtttaaagaagctttgaaaacagggttttttgagtttcaggccgcaaaagataagtaccgtgaattggctgtggaagggatgcacagagaacttgtgttccggtttattgaagttcagacacttctcctcgctccattctgtccacatttgtgtgagcacatctggacactcctgggaaagcctgactcaattatgaatgcttcatggcctgtggcaggtcctgttaatgaagttttaatacactcctcacagtatcttatggaagtaacacatgaccttagactacgactcaagaactatatgatgccagctaaagggaagaagactgacaaacaacccctgcagaagccctcacattgcaccatctatgtggcaaagaactatccaccttggcaacataccaccctgtctgttctacgtaaacactttgaggccaataacggaaaactgcctgacaacaaagtcattgctagtgaactaggcagtatgccagaactgaagaaatacatgaagaaagtcatgccatttgttgccatgattaaggaaaatctggagaagatggggcctcgtattctggatttgcaattagaatttgatgaaaaggctgtgcttatggagaatatagtctatctgactaattcgcttgagctagaacacatagaagtcaagtttgcctccgaagcagaagataaaatcagggaagactgctgtcctgggaaaccacttaatgtttttagaatagaacctggtgtgtccgtttctctggtgaatccccagccatccaatggccacttctcaaccaaaattgaaatcaggcaaggagataactgtgattccataatcaggcgtttaatgaaaatgaatcgaggaattaaagacctttccaaagtgaaactgatgagatttgatgatccactgttggggcctcgacgagttcctgtcctgggaaaggagtacaccgagaagacccccatttctgagcatgctgttttcaatgtggacctcatgagcaagaaaattcatctgactgagaatgggataagggtggatattggcgatacaataatctatctggttcattaaactcatgcacattggagaaaaaaaaaaaaaaaaaaactcgaggggggggcccggtaccccaaattcgcccctattagtgagagtcggttttaccatttccaacctgcncccgtcggtttttacaaaccgntcgnggaacttggggaaaaacccctgtgcgg

SEQ ID NO: 423081 - DNA, 3486 bp, Homo sapiens
ggctgtagttagtaaggagccggatgattgcctcagcaggtgtgaagcgtgtgctttagtttcgtgggaggcctggcatccccgagagggaggggaaaggtaaccactcctttgtggaggtcgccagggtcattgtcgtggatttgcacagtcggctgggcggtgcaatggcggaaagaaaaggaacagccaaagtggactttttgaagaagattgagaaagaaatccaacagaaatgggatactgagagagtgtttgaggtcaatgcatctaatttagagaaacagaccagcaagggcaagtattttgtaaccttcccatatccatatatgaatggacgccttcatttgggacacacgttttctttatccaaatgtgagtttgctgtagggtaccagcgattgaaaggaaaatgttgtctgtttccctttggcctgcactgtactggaatgcctattaaggcatgtgctgataagttgaaaagagaaatagagctgtatggttgcccccctgattttccagatgaagaagaggaagaggaagaaaccagtgttaaaacagaagatataataattaaggataaagctaaaggaaaaaagagtaaagctgctgctaaagctggatcttctaaataccagtggggcattatgaaatcccttggcctgtctgatgaagagatagtaaaattttctgaagcagaacattggcttgattatttcccgccactggctattcaggatttaaaaagaatgggtttgaaggtagactggcgtcgttccttcatcaccactgatgttaatccttactatgattcatttgtcagatggcaatttttaacattaagagaaagaaacaaaattaaatttgggaagcggtatacaatttactctccgaaagatggacagccttgcatggatcatgatagacaaactggagagggtgttggacctcaggaatatactttactcaaattgaaggtgcttgagccatacccatctaaattaagtggcctgaaaggtaaaaatattttcttggtggctgctactctcagacctgagaccatgtttgggcagacaaattgttgggttcgtcctgatatgaagtacattggatttgagacggtgaatggtgatatattcatctgtacccaaaaagcagccaggaatatgtcataccagggctttaccaaagacaatggcgtggtgcctgttgttaaggaattaatgggggaggaaattcttggtgcatcactttctgcacctttaacatcatacaaggtgatctatgttctcccaatgctaactattaaggaggataaaggcactggtgtggttacaagtgttccttccgactcccctgatgatattgctgccctcagagacttgaagaaaaagcaagccttacgagcaaaatatggaattagagatgacatggtcttgccatttgagccggtgccagtcattgaaatcccaggttttggaaatctttctgctgtaaccatttgtgatgagttgaaaattcagagccagaatgaccgggaaaaacttgcagaagcaaaggagaagatatatctaaaaggattttatgagggtatcatgttggtggatggatttaaaggacagaaggttcaagatgtaaagaagactattcagaaaaagatgattgacgctggagatgcacttatttacatggaaccagagaaacaagtgatgtccaggtcgtcagatgaatgtgttgtggctctgtgtgaccagtggtacttggattatggagaagagaattggaagaaacagacatctcagtgcttgaagaacctggaaacattctgtgaggagaccaggaggaattttgaagccaccttaggttggctacaagaacatgcttgctcaagaacttatggtctaggcactcacctgccttgggatgagcagtggctgattgaatcactttctgactccactatttacatggcattttacacagttgcacacctattgcaggggggtaacttgcatggacaggcagagtctccgctgggcattagaccgcaacagatgaccaaggaagtttgggattatgttttcttcaaggaggctccatttcctaagactcagattgcaaaggaaaaattagatcagttaaagcaggagtttgaattctggtatcctgttgatcttcgcgtctctggcaaggatcttgttccaaatcatctttcatattacctttataatcatgtggctatgtggccggaacaaagtgacaaatggcctacagctgtgagagcaaatggacatctcctcctgaactctgagaagatgtcaaaatccacaggcaacttcctcactttgacccaagctattgacaaattttcagcagatggaatgcgtttggctctggctgatgctggtgacactgtagaagatgccaactttgtggaagccatggcagatgcaggtattctccgtctgtacacctgggtagagtgggtgaaagaaatggttgccaactgggacagcctaagaagtggtcctgccagcactttcaatgatagagtttttgccagtgaattgaatgcaggaattataaaaacagatcaaaactatgaaaagatgatgtttaaagaagctttgaaaacagggttttttgagtttcaggccgcaaaagataagtaccgtgaattggctgtggaagggatgcacagagaacttgtgttccggtttattgaagttcagacacttctcctcgctccattctgtccacatttgtgtgagcacatctggacactcctgggaaagcctgactcaattatgaatgcttcatggcctgtggcaggtcctgttaatgaagttttaatacactcctcacagtatcttatggaagtaacacatgaccttagactacgactcaagaactatatgatgccagctaaagggaagaagactgacaaacaacccctgcagaagccctcacattgcaccatctatgtggcaaagaactatccaccttggcaacataccaccctgtctgttctacgtaaacactttgaggccaataacggaaaactgcctgacaacaaagtcattgctagtgaactaggcagtatgccagaactgaagaaatacatgaagaaagtcatgccatttgttgccatgattaaggaaaatctggagaagatggggcctcgtattctggatttgcaattagaatttgatgaaaaggctgtgcttatggagaatatagtctatctgactaattcgcttgagctagaacacatagaagtcaagtttgcctccgaagcagaagataaaatcagggaagactgctgtcctgggaaaggagtacaccgagaagacccccatttctgagcatgctgttttcaatgtggacctcatgagcaagaaaattcatctgactgagaatgggataagggtggatattggcgatacaataatctatctggttcattaaactcatgcacattggaga

SEQ ID NO: 423082 - DNA, 845 bp, Homo sapiens
tggcatactgcctagttcactagcaatgactttgttgtcaggcagttttccgttattggcctcaaagtgtttacgtagaacagacagggtggtatgttgccatgattaaggaaaatctggagaagatggggcctcgtattctggatttgcaattagaatttgatgaaaaggctgtgcttatggagaatatagtctatctgactaattcgcttgagctagaacacatagaagtcaagtttgcctccgaagcagaagataaaatcagggaagactgctgtcctgggaaaccacttaatgtttttagaatagaacctggtgtgtccgtttctctggtgaatccccagccatccaatggccacttctcaaccaaaattgaaatcaggcaaggagataactgtgattccataatcaggcgtttaatgaaaatgaatcgaggaattaaagacctttccaaagtgaaactgatgagatttgatgatccactgttggggcctcgacgagttcctgtcctgggaaaggagtacaccgagaagacccccatttctgagcatgctgttttcaatgtggacctcatgagcaagaaaattcatctgactgagaatgggataagggtggatattggcgatacaataatctatctggttcattaaactcatgcacattggagatttatcctggtttcttaggaatactactactctgattgtgtctactgattggctatcagaaccttaggctggacctaaatagattgatttcatttctaaccatccaattctgcatgtattcataattctatcaagtcatctttgattcctggacctaataaattttttttccctttc

SEQ ID NO: 423083 - DNA, 2349 bp, Homo sapiens
ggctgtagttagtaaggagccggatgattgcctcagcaggtgtgaagcgtgtgctttagtttcgtgggaggcctggcatccccgagagggaggggaaaggtaaccactcctttgtggaggtcgccagggtcattgtcgtggatttgcacagtcggctgggcggtgcaatggcggaaagaaaaggaacagccaaagtggactttttgaagaagattgagaaagaaatccaacagaaatgggatactgagagagtgtttgaggtcaatgcatctaatttagagaaacagaccagcaagggcaagtattttgtaaccttcccatatccatatatgaatggacgccttcatttgggacacacgttttctttatccaaatgtgagtttgctgtagggtaccagcgattgaaaggaaaatgttgtctgtttccctttggcctgcactgtactggaatgcctattaaggcatgtgctgataagttgaaaagagaaatagagctgtatggttgcccccctgattttccagatgaagaagaggaagaggaagaaaccagtgttaaaacagaagatataataattaaggataaagctaaaggaaaaaagagtaaagctgctgctaaagctggatcttctaaataccagtggggcattatgaaatcccttggcctgtctgatgaagagatagtaaaattttctgaagcagaacattggcttgattatttcccgccactggctattcaggatttaaaaagaatgggtttgaaggtagactggcgtcgttccttcatcaccactgatgttaatccttactatgattcatttgtcagatggcaatttttaacattaagagaaagaaacaaaattaaatttgggaagcggtatacaatttactctccgaaagatggacagccttgcatggatcatgatagacaaactggagagggtgttggacctcaggaatatactttactcaaattgaaggtgcttgagccatacccatctaaattaagtggcctgaaaggtaaaaatattttcttggtggctgctactctcagacctgagaccatgtttgggcagacaaattgttgggttcgtcctgatatgaagtacattggatttgagacggtgaatggtgatatattcatctgtacccaaaaagcagccaggaatatgtcataccagggctttaccaaagacaatggcgtggtgcctgttgttaaggaattaatgggggaggaaattcttggtgcatcactttctgcacctttaacatcatacaaggtgatctatgttctcccaatgctaactattaaggaggataaaggcactggtgtggttacaagtgttccttccgactcccctgatgatattgctgccctcagagacttgaagaaaaagcaagccttacgagcaaaatatggaattagagatgacatggtcttgccatttgagccggtgccagtcattgaaatcccaggttttggaaatctttctgctgtaaccatttgtgatgagttgaaaattcagagccagaatgaccgggaaaaacttgcagaagcaaaggagaagatatatctaaaaggattttatgagggtatcatgttggtggatggatttaaaggacagaaggttcaagatgtaaagaagactattcagaaaaagatgattgacgctggagatgcacttatttacatggaaccagagaaacaagtgatgtccaggtcgtcagatgaatgtgttgtggctctgtgtgaccagtggtacttggattatggagaagagaattggaagaaacagacatctcagtgcttgaagaacctggaaacattctgtgaggagaccaggaggaattttgaagccaccttaggttggctacaagaacatgcttgctcaagaacttatggtctaggcactcacctgccttgggatgagcagtggctgattgaatcactttctgactccactatttacatggcattttacacagttgcacacctattgcaggggggtaacttgcatggacaggcagagtctccgctgggcattagaccgcaacagatgaccaaggaagtttgggattatgttttcttcaaggaggctccatttcctaagactcagattgcaaaggaaaaattagatcagttaaagcaggagtttgaattctggtatcctgttgatcttcgcgtctctggcaaggatcttgttccaaatcatctttcatattacctttataatcatgtggctatgtggccggaacaaaggtgaatgataaaataggtgtggactagatttattgattgtcaataggggtgtcttgtggcttcaaatatctaataaattattgtggagggga

SEQ ID NO: 423084 - DNA, 2135 bp, Homo sapiens
ggctgtagttagtaaggagccggatgattgcctcagcaggtgtgaagcgtgtgctttagtttcgtgggaggcctggcatccccgagagggaggggaaaggtaaccactcctttgtggaggtcgccagggtcattgtcgtggatttgcacagtcggctgggcggtgcaatggcggaaagaaaaggaacagccaaagtggactttttgaagaagattgagaaagaaatccaacagaaatgggatactgagagagtgtttgaggtcaatgcatctaatttagagaaacagaccagcaagggcaagtattttgtaaccttcccatatccatatatgaatggacgccttcatttgggacacacgttttctttatccaaatgtgagtttgctgtagggtaccagcgattgaaaggaaaatgttgtctgtttccctttggcctgcactgtactggaatgcctattaaggcatgtgctgataagttgaaaagagaaatagagctgtatggttgcccccctgattttccagatgaagaagaggaagaggaagaaaccagtgttaaaacagaagatataataattaaggataaagctaaaggaaaaaagagtaaagctgctgctaaagctggatcttctaaataccagtggggcattatgaaatcccttggcctgtctgatgaagagatagtaaaattttctgaagcagaacattggcttgattatttcccgccactggctattcaggatttaaaaagaatgggtttgaaggtagactggcgtcgttccttcatcaccactgatgttaatccttactatgattcatttgtcagatggcaatttttaacattaagagaaagaaacaaaattaaatttgggaagcggtatacaatttactctccgaaagatggacagccttgcatggatcatgatagacaaactggagagggtgttggacctcaggaatatactttactcaaattgaaggtgcttgagccatacccatctaaattaagtggcctgaaaggtaaaaatattttcttggtggctgctactctcagacctgagaccatgtttgggcagacaaattgttgggttcgtcctgatatgaagtacattggatttgagacggtgaatggtgatatattcatctgtacccaaaaagcagccaggaatatgtcataccagggctttaccaaagacaatggcgtggtgcctgttgttaaggaattaatgggggaggaaattcttggtgcatcactttctgcacctttaacatcatacaaggtgatctatgttctcccaatgctaactattaaggaggataaaggcactggtgtggttacaagtgttccttccgactcccctgatgatattgctgccctcagagacttgaagaaaaagcaagccttacgagcaaaatatggaattagagatgacatggtcttgccatttgagccggtgccagtcattgaaatcccaggttttggaaatctttctgctgtaaccatttgtgatgagttgaaaattcagagccagaatgaccgggaaaaacttgcagaagcaaaggagaagatatatctaaaaggattttatgagggtatcatgttggtggatggatttaaaggacagaaggttcaagatgtaaagaagactattcagaaaaagatgattgacgctgtatgtgataggctatgctctgaaggctgttttagaagagctgttaatagacttgacagtgttattagcagtgagttctacagtagaacctggagctataataaaaatatcatacagttttgcggcagaaaatagacctatttagcaattcatttaacttgaacatcccatctataatgttgataaaggtagtgttttaaagtcgatgtgtgcatagcatgtgtagagaactttgatgatatttctggcagtggccattttagatactggtagttacaatcctttctttctgtggtgtttctgtcgtcctcctctcatccctccgtttctgttataactctcttctatttagctgagttaaccctttacatttttatttttgacaactttgtatacccataatactatgagagacaatggtctgttaggcttgttgaaataaaaaagcagcaatttcctcatcac

SEQ ID NO: 423085 - DNA, 1557 bp, Homo sapiens
tgttgtttgtatatggtccaaaaaatgcctaaccagaggatgggtcaataaagtcagcccaataaccctcagctcgaagagcatagcaaatttccttagcaccattgatgaacttttctaagagcacttctctttcaatttctacttcttcactccaaacagtcatatcattcttagtttttttgtgttacagtcagaatcattagtttgccattagctacttctggaaacagtgattcaaaatcttttcgcagcaattctggacatgtttgtattgcacactcacctttccaaagtgaaactgatgagatttgatgatccactgttggggcctcgacgagttcctgtcctgggaaaggagtacaccgagaagacccccatttctgagcatgctgttttcaatgtggacctcatgagcaagaaaattcatctgactgagaatgggataagggtggatattggcgatacaataatctatctggttcattaaactcatgcacattggagatttatcctggtttcttaggaatactactactctgattgtgtctactgattggctatcagaaccttaggctggacctaaatagattgatttcatttctaaccatccaattctgcatgtattcataattctatcaagtcatctttgattcctggacctaataaattttttttccctttctttgggtgtccaagagaaatggtttttgccaaactctttttaaaaaacaaattgttgctatttcctagaagtttctggtttttaagatgaacataaaagtgtcagtatgcttcttttatgaggtgtactttatactttgatgaaggctaaggtgtacctaacagctttttatagtatattcatttatggagttagctgtattttttttaaaaaaagaaaagtagtaaattagcagctttttttttttaaatgaagagaacttcatgatgatttaaaagaactaatgagaatattttgacttgacttcaattactaagtattttgtataaagaacaaataggtcctgcattttataagactttttaaagctttaattattcaactaagaaccaataatggcttcttcaaggctaatatcaatagtttataagcagtatatttcacctacactaaatatgggcattttaaaagaagattccccccttcccccccagaaatctgcatttactaaatttgtcttaagtccaattgtgtttaaaggtcatgctggtcgggtgtggtggctcacacctataatcccagcactttgggaggccaaggtgggcagtcacctgaggtcaggagtttgagaccagcctgaccaacatggtgaaaccccgtctctactaaaaatacaaaaattagcttggcatggtggcgggtacctgtaatcccagctgcttgggagtgtgaggcaggagaatcgcttgaacctgggagaccgaggttgcagtgagctgaaaccgtgccattgcactccagcttaggcaacaagagtgaaactctgtctcaatcaatccatcaatcaatcaataaaatagaggtcatgctga

SEQ ID NO: 423086 - DNA, 1360 bp, Homo sapiens
ctgttccgtccgtatcactcaggcattctcacaagatagcaagagatctgtgatccatacaggcgtaatgaatgatcgaggataaagacctttccaaagtgaaactgatgagatttgatgatccactgttggggcctcgacgagttcctgtcctgggaaaggagtacaccgagaagacccccatttctgagcatgctgttttcaatgtggacctcatgagcaagaaaattcatctgactgagaatgggataagggtggatattggcgatacaataatctatctggttcattaaactcatgcacattggagatttatcctggtttcttaggaatactactactctgattgtgtctactgattggctatcagaaccttaggctggacctaaatagattgatttcatttctaaccatccaattctgcatgtattcataattctatcaagtcatctttgattcctggacctaataaattttttttccctttctttgggtgtccaagagaaatggtttttgccaaactctttttaaaaaacaaattgttgctatttcctagaagtttctggtttttaagatgaacataaaagtgtcagtatgcttcttttatgaggtgtactttatactttgatgaaggctaaggtgtacctaacagctttttatagtatattcatttatggagttagctgtattttttttaaaaaaagaaaagtagtaaattagcagctttttttttttaaatgaagagaacttcatgatgatttaaaagaactaatgagaatattttgacttgacttcaattactaagtattttgtataaagaacaaataggtcctgcattttataagactttttaaagctttaattattcaactaagaaccaataatggcttcttcaaggctaatatcaatagtttataagcagtatatttcacctacactaaatatgggcattttaaaagaagattccccccttcccccccagaaatctgcatttactaaatttgtcttaagtccaattgtgtttaaaggtcatgctggtcgggtgtggtggctcacacctataatcccagcactttgggaggccaaggtgggcagtcacctgaggtcaggagtttgagaccagcctgaccaacatggtgaaaccccgtctctactaaaaatacaaaaattagcttggcatggtggcgggtacctgtaatcccagctgcttgggagtgtgaggcaggagaatcgcttgaacctgggagaccgaggttgcagtgagctgaaaccgtgccattgcactccagcttaggcaacaagagtgaaactctgtctcaatcaatccatcaatcaatcaataaaatagaggtcatgctga

SEQ ID NO: 423087 - DNA, 771 bp, Homo sapiens
ggctgtagttagtaaggagccggatgattgcctcagcaggtgtgaagcgtgtgctttagtttcgtgggaggcctggcatccccgagagggaggggaaaggtaaccactcctttgtggaggtcgccagggtcattgtcgtggatttgcacagtcggctgggcggtgcaatggcggaaagaaaaggaacagccaaagtggactttttgaagaagattgagaaagaaatccaacagaaatgggatactgagagagtgtttgaggtcaatgcatctaatttagagaaacagaccagcaagggcaagtattttgtaaccttcccatatccatatatgaatggacgccttcatttgggacacacgttttctttatccaaatgtgagtttgctgtagggtaccagcgattgaaaggaaaatgttgtctgtttccctttggcctgcactgtactggaatgcctattaaggcatgtgctgataagttgaaaagagaaatagagctgtatggttgcccccctgattttccagatgaagaagaggaagaggaagaaaccagtgttaaaacagaagatataataattaaggataaagctaaaggaaaaaaggtttgatagtggttgatatttatgttggttgaagttttatatttttctgatttatatgtgcattcccagtactagcacagtgcccaacacataaaatgtactagatcatttttttaaagtatcaaagcaaaaaattatctttctggccaggcgcggtggctcaagcctgtaa

SEQ ID NO: 423088 - DNA, 658 bp, Homo sapiens
gtgatgctctcagtagacttttcccccctgatggtgttgtatgctccctatgttgtttttgtttttaggatgttggcaatgtctgggagaagaaagataggcagctttgtttcattccctctaggcagacagcatccttttgttattcttggtggctcttaaatggatgctgagggaaaagctgctgttttcctctcatttctgaaaaatttatacaaaaatacattggatctagttgaatgtaatcaaaagaattgggggttttcatatgtgtagttgaaatgatgaaataaaaggacagagtttgcctttggaatttgttgtaacttgagcagtgggagtcattcattaaatttattcattcattatattcattcattaaattatttcaaatcgtaaccttgtttattgtttggaaaaaagtgaagctttgttcttgagtactttaaatgttgtttggtttgataattacctatagaaatgtagagcttgaagacatttttggctgtgccaggtaatgataaatccacttaaagggaactcaataacttagatctaagttttcctgaaagaaaaaaatgtatttttcctctgcattcaaaatgtagaaacaaagtatgtttatgaactttggcttttttgcttaggttattaaaac

SEQ ID NO: 423089 - DNA, 778 bp, Homo sapiens
ggatggatagacaatagagagattgcagtaatttgttttaaggaacgcaaagatggtgttgtgttgagcagttttaaatgttctgggcattgttctcattttactgcttaaatgagcagtatttcaaatttgtatattaaaaagcagtattttaaatttgtgtatgcagcagttttttatagctatgtataagtgcctttaaactcaataacctttttttccccgtattcaatagtgaattgaatgcaggaattataaaaacagatcaaaactatgaaaagatgatgtttaaagaagctttgaaaacagggttttttgagtttcaggtaggctgttgattcttttggtagctataaaacatgtcaatgtgaacattatgtattttcccccttttttcttcctgctatagcacaattactcgcctaaagtgtagactgaaaatcctgccagaaaaattttaaattcttcaataaattgtgattttaagttattatctttggtattttttctattgtgtccatttaatttaataattctgctcctagttaagctatgagcattaatataaaggagattaaatctaaaattcagctatactttccaggaaaacatttcaaaattgataaaaacaaaggcaaaattgtaattaattgccattaatttgagagcaagcgttttctgaggttttccacaaggtgtcagtatttcctcaagtttggcatttaaagtgcttaaagtaaaaatgtagctttacgcaatgagctgtgtaaaatatcac

SEQ ID NO: 423090 - DNA, 3716 bp, Homo sapiens
ggctgtagttagtaaggagccggatgattgcctcagcaggtgtgaagcgtgtgctttagtttcgtgggaggcctggcatccccgagagggaggggaaaggtaaccactcctttgtggaggtcgccagggtcattgtcgtggatttgcacagtcggctgggcggtgcaatggcggaaagaaaaggaacagccaaagtggactttttgaagaagattgagaaagaaatccaacagaaatgggatactgagagagtgtttgaggtcaatgcatctaatttagagaaacagaccagcaagggcaagtattttgtaaccttcccatatccatatatgaatggacgccttcatttgggacacacgttttctttatccaaatgtgagtttgctgtagggtaccagcgattgaaaggaaaatgttgtctgtttccctttggcctgcactgtactggaatgcctattaaggcatgtgctgataagttgaaaagagaaatagagctgtatggttgcccccctgattttccagatgaagaagaggaagaggaagaaaccagtgttaaaacagaagatataataattaaggataaagctaaaggaaaaaagagtaaagctgctgctaaagctggatcttctaaataccagtggggcattatgaaatcccttggcctgtctgatgaagagatagtaaaattttctgaagcagaacattggcttgattatttcccgccactggctattcaggatttaaaaagaatgggtttgaaggtagactggcgtcgttccttcatcaccactgatgttaatccttactatgattcatttgtcagatggcaatttttaacattaagagaaagaaacaaaattaaatttgggaagcggtatacaatttactctccgaaagatggacagccttgcatggatcatgatagacaaactggagagggtgttggacctcaggaatatactttactcaaattgaaggtgcttgagccatacccatctaaattaagtggcctgaaaggtaaaaatattttcttggtggctgctactctcagacctgagaccatgtttgggcagacaaattgttgggttcgtcctgatatgaagtacattggatttgagacggtgaatggtgatatattcatctgtacccaaaaagcagccaggaatatgtcataccagggctttaccaaagacaatggcgtggtgcctgttgttaaggaattaatgggggaggaaattcttggtgcatcactttctgcacctttaacatcatacaaggtgatctatgttctcccaatgctaactattaaggaggataaaggcactggtgtggttacaagtgttccttccgactcccctgatgatattgctgccctcagagacttgaagaaaaagcaagccttacgagcaaaatatggaattagagatgacatggtcttgccatttgagccggtgccagtcattgaaatcccaggttttggaaatctttctgctgtaaccatttgtgatgagttgaaaattcagagccagaatgaccgggaaaaacttgcagaagcaaaggagaagatatatctaaaaggattttatgagggtatcatgttggtggatggatttaaaggacagaaggttcaagatgtaaagaagactattcagaaaaagatgattgacgctggagatgcacttatttacatggaaccagagaaacaagtgatgtccaggtcgtcagatgaatgtgttgtggctctgtgtgaccagtggtacttggattatggagaagagaattggaagaaacagacatctcagtgcttgaagaacctggaaacattctgtgaggagaccaggaggaattttgaagccaccttaggttggctacaagaacatgcttgctcaagaacttatggtctaggcactcacctgccttgggatgagcagtggctgattgaatcactttctgactccactatttacatggcattttacacagttgcacacctattgcaggggggtaacttgcatggacaggcagagtctccgctgggcattagaccgcaacagatgaccaaggaagtttgggattatgttttcttcaaggaggctccatttcctaagactcagattgcaaaggaaaaattagatcagttaaagcaggagtttgaattctggtatcctgttgatcttcgcgtctctggcaaggatcttgttccaaatcatctttcatattacctttataatcatgtggctatgtggccggaacaaagtgacaaatggcctacagctgtgagagcaaatggacatctcctcctgaactctgagaagatgtcaaaatccacaggcaacttcctcactttgacccaagctattgacaaattttcagcagatggaatgcgtttggctctggctgatgctggtgacactgtagaagatgccaactttgtggaagccatggcagatgcaggtattctccgtctgtacacctgggtagagtgggtgaaagaaatggttgccaactgggacagcctaagaagtggtcctgccagcactttcaatgatagagtttttgccagtgaattgaatgcaggaattataaaaacagatcaaaactatgaaaagatgatgtttaaagaagctttgaaaacagggttttttgagtttcaggccgcaaaagataagtaccgtgaattggctgtggaagggatgcacagagaacttgtgttccggtttattgaagttcagacacttctcctcgctccattctgtccacatttgtgtgagcacatctggacactcctgggaaagcctgactcaattatgaatgcttcatggcctgtggcaggtcctgttaatgaagttttaatacactcctcacagtatcttatggaagtaacacatgaccttagactacgactcaagaactatatgatgccagctaaagggaagaagactgacaaacaacccctgcagaagccctcacattgcaccatctatgtggcaaagaactatccaccttggcaacataccaccctgtctgttctacgtaaacactttgaggccaataacggaaaactgcctgacaacaaagtcattgctagtgaactaggcagtatgccagaactgaagaaatacatgaagaaagtcatgccatttgttgccatgattaaggaaaatctggagaagatggggcctcgtattctggatttgcaattagaatttgatgaaaaggctgtgcttatggagaatatagtctatctgactaattcgcttgagctagaacacatagaagtcaagtttgcctccgaagcagaagataaaatcagggaagactgctgtcctgggaaaccacttaatgtttttagaatagaacctggtgtgtccgtttctctggtgaatccccagccatccaatggccacttctcaaccaaaattgaaatcaggcaaggagataactgtgattccataatcaggcgtttaatgaaaatgaatcgaggaattaaagacctttccaaagtgaaactgatgagatttgatgatccactgttggggcctcgacgagttcctgtcctgggaaaggagtacaccgagaagacccccatttctgagcatgctgttttcaatgtggacctcatgagcaagaaaattcatctgactgagaatgggataagggtggatattggcgatacaataatctatctggttcattaaactcatgcacattggaga

SEQ ID NO: 423091 - DNA, 1766 bp, Homo sapiens
ggactatagtagtaacctgcactttatcttagcaagcctttatgagtctattagctttacctcaaaattttaagccagaactatcatctttgtttttttattttctatctttaaacatttatctgtgaagtgacaaatggcctacagctgtgagagcaaatggacatctcctcctgaactctgagaagatgtcaaaatccacaggcaacttcctcactttgacccaagctattgacaaattttcagcagatggaatgcgtttggctctggctgatgctggtgacactgtagaagatgccaactttgtggaagccatggcagatgcaggtattctccgtctgtacacctgggtagagtgggtgaaagaaatggttgccaactgggacagcctaagaagtggtcctgccagcactttcaatgatagagtttttgccagtgaattgaatgcaggaattataaaaacagatcaaaactatgaaaagatgatgtttaaagaagctttgaaaacagggttttttgagtttcaggccgcaaaagataagtaccgtgaattggctgtggaagggatgcacagagaacttgtgttccggtttattgaagttcagacacttctcctcgctccattctgtccacatttgtgtgagcacatctggacactcctgggaaagcctgactcaattatgaatgcttcatggcctgtggcaggtcctgttaatgaagttttaatacactcctcacagtatcttatggaagtaacacatgaccttagactacgactcaagaactatatgatgccagctaaagggaagaagactgacaaacaacccctgcagaagccctcacattgcaccatctatgtggcaaagaactatccaccttggcaacataccaccctgtctgttctacgtaaacactttgaggccaataacggaaaactgcctgacaacaaagtcattgctagtgaactaggcagtatgccagaactgaagaaatacatgaagaaagtcatgccatttgttgccatgattaaggaaaatctggagaagatggggcctcgtattctggatttgcaattagaatttgatgaaaaggctgtgcttatggagaatatagtctatctgactaattcgcttgagctagaacacatagaagtcaagtttgcctccgaagcagaagataaaatcagggaagactgctgtcctgggaaaccacttaatgtttttagaatagaacctggtgtgtccgtttctctggtgaatccccagccatccaatggccacttctcaaccaaaattgaaatcaggcaaggagataactgtgattccataatcaggcgtttaatgaaaatgaatcgaggaattaaagacctttccaaagtgaaactgatgagatttgatgatccactgttggggcctcgacgagttcctgtcctgggaaaggagtacaccgagaagacccccatttctgagcatgctgttttcaatgtggacctcatgagcaagaaaattcatctgactgagaatgggataagggtggatattggcgatacaataatctatctggttcattaaactcatgcacattggagatttatcctggtttcttaggaatactactactctgattgtgtctactgattggctatcagaaccttaggctggacctaaatagattgatttcatttctaaccatccaattctgcatgtattcataattctatcaagtcatctttgattcctggacctaataaattttttttccctttc

SEQ ID NO: 423092 - DNA, 3702 bp, Homo sapiens
ggctgtagttagtaaggagccggatgattgcctcagcaggtgtgaagcgtgtgctttagtttcgtgggaggcctggcatccccgagagggaggggaaaggtaaccactcctttgtggaggtcgccagggtcattgtcgtggatttgcacagtcggctgggcggtgcaatggcggaaagaaaaggaacagccaaagtggactttttgaagaagattgagaaagaaatccaacagaaatgggatactgagagagtgtttgaggtcaatgcatctaatttagagaaacagaccagcaagggcaagtattttgtaaccttcccatatccatatatgaatggacgccttcatttgggacacacgttttctttatccaaatgtgagtttgctgtagggtaccagcgattgaaaggaaaatgttgtctgtttccctttggcctgcactgtactggaatgcctattaaggcatgtgctgataagttgaaaagagaaatagagctgtatggttgcccccctgattttccagatgaagaagaggaagaggaagaaaccagtgttaaaacagaagatataataattaaggataaagctaaaggaaaaaagagtaaagctgctgctaaagctggatcttctaaataccagtggggcattatgaaatcccttggcctgtctgatgaagagatagtaaaattttctgaagcagaacattggcttgattatttcccgccactggctattcaggatttaaaaagaatgggtttgaaggtagactggcgtcgttccttcatcaccactgatgttaatccttactatgattcatttgtcagatggcaatttttaacattaagagaaagaaacaaaattaaatttgggaagcggtatacaatttactctccgaaagatggacagccttgcatggatcatgatagacaaactggagagggtgttggacctcaggaatatactttactcaaattgaaggtgcttgagccatacccatctaaattaagtggcctgaaaggtaaaaatattttcttggtggctgctactctcagacctgagaccatgtttgggcagacaaattgttgggttcgtcctgatatgaagtacattggatttgagacggtgaatggtgatatattcatctgtacccaaaaagcagccaggaatatgtcataccagggctttaccaaagacaatggcgtggtgcctgttgttaaggaattaatgggggaggaaattcttggtgcatcactttctgcacctttaacatcatacaaggtgatctatgttctcccaatgctaactattaaggaggataaaggcactggtgtggttacaagtgttccttccgactcccctgatgatattgctgccctcagagacttgaagaaaaagcaagccttacgagcaaaatatggaattagagatgacatggtcttgccatttgagccggtgccagtcattgaaatcccaggttttggaaatctttctgctgtaaccatttgtgatgagttgaaaattcagagccagaatgaccgggaaaaacttgcagaagcaaaggagaagatatatctaaaaggattttatgagggtatcatgttggtggatggatttaaaggacagaaggttcaagatgtaaagaagactattcagaaaaagatgattgacgctggagatgcacttatttacatggaaccagagaaacaagtgatgtccaggtcgtcagatgaatgtgttgtggctctgtgtgaccagtggtacttggattatggagaagagaattggaagaaacagacatctcagtgcttgaagaacctggaaacattctgtgaggagaccaggaggaattttgaagccaccttaggttggctacaagaacatgcttgctcaagaacttatggtctaggcactcacctgccttgggatgagcagtggctgattgaatcactttctgactccactatttacatggcattttacacagttgcacacctattgcaggggggtaacttgcatggacaggcagagtctccgctgggcattagaccgcaacagatgaccaaggaagtttgggattatgttttcttcaaggaggctccatttcctaagactcagattgcaaaggaaaaattagatcagttaaagcaggagtttgaattctggtatcctgttgatcttcgcgtctctggcaaggatcttgttccaaatcatctttcatattacctttataatcatgtggctatgtggccggaacaaagtgacaaatggcctacagctgtgagagcaaatggacatctcctcctgaactctgagaagatgtcaaaatccacaggcaacttcctcactttgacccaagctattgacaaattttcagcagatggaatgcgtttggctctggctgatgctggtgacactgtagaagatgccaactttgtggaagccatggcagatgcaggtattctccgtctgtacacctgggtagagtgggtgaaagaaatggttgccaactgggacagcctaagaagtggtcctgccagcactttcaatgatagagtttttgccagtgaattgaatgcaggaattataaaaacagatcaaaactatgaaaagatgatgtttaaagaagctttgaaaacagggttttttgagtttcaggccgcaaaagataagtaccgtgaattggctgtggaagggatgcacagagaacttgtgttccggtttattgaagttcagacacttctcctcgctccattctgtccacatttgtgtgagcacatctggacactcctgggaaagcctgactcaattatgaatgcttcatggcctgtggcaggtcctgttaatgaagttttaatacactcctcacagtatcttatggaagtaacacatgaccttagactacgactcaagaactatatgatgccagctaaagggaagaagactgacaaacaacccctgcagaagccctcacattgcaccatctatgtggcaaagaactatccaccttggcaacataccaccctgtctgttctacgtaaacactttgaggccaataacggaaaactgcctgacaacaaagtcattgctagtgaactaggcagtatgccagaactgaagaaatacatgaagaaagtcatgccatttgttgccatgattaaggaaaatctggagaagatggggcctcgtattctggatttgcaattagaatttgatgaaaaggctgtgcttatggagaatatagtctatctgactaattcgcttgagctagaacacatagaagtcaagtttgcctccgaagcagaagataaaatcagggaagactgctgtcctgggaaaccacttaatgtttttagaatagaacctggtgtgtccgtttctcttaatcatcatgtattatttagcttgatatacacactttaaaaattttggctatctagcgtggcattctgtatttcccagcaatcactaatacgttccttcttaccaaggtacggttcacggtaatagagaggatgggagtatctgagactgtacattgctgattccatcctggttttgacaagacttatcaggacacctaatgtcaagacacaaaatccctaccacattttaccaattagagagatatctgagtgactgtaactattttccctcctctttgagaaagcttagttcagtgtaagataagacaacaaaggtgttc

SEQ ID NO: 423093 - DNA, 2505 bp, Homo sapiens
  misc_feature (2261)..(2261): n is a, c, g, or t
  misc_feature (2269)..(2269): n is a, c, g, or t
ggctgtagttagtaaggagccggatgattgcctcagcaggtgtgaagcgtgtgctttagtttcgtgggaggcctggcatccccgagagggaggggaaaggtaaccactcctttgtggaggtcgccagggtcattgtcgtggatttgcacagtcggctgggcggtgcaatggcggaaagaaaaggaacagccaaagtggactttttgaagaagattgagaaagaaatccaacagaaatgggatactgagagagtgtttgaggtcaatgcatctaatttagagaaacagaccagcaagggcaagtattttgtaaccttcccatatccatatatgaatggacgccttcatttgggacacacgttttctttatccaaatgtgagtttgctgtagggtaccagcgattgaaaggaaaatgttgtctgtttccctttggcctgcactgtactggaatgcctattaaggcatgtgctgataagttgaaaagagaaatagagctgtatggttgcccccctgattttccagatgaagaagaggaagaggaagaaaccagtgttaaaacagaagatataataattaaggataaagctaaaggaaaaaagagtaaagctgctgctaaagctggatcttctaaataccagtggggcattatgaaatcccttggcctgtctgatgaagagatagtaaaattttctgaagcagaacattggcttgattatttcccgccactggctattcaggatttaaaaagaatgggtttgaaggtagactggcgtcgttccttcatcaccactgatgttaatccttactatgattcatttgtcagatggcaatttttaacattaagagaaagaaacaaaattaaatttgggaagcggtatacaatttactctccgaaagatggacagccttgcatggatcatgatagacaaactggagagggtgttggacctcaggaatatactttactcaaattgaaggtgcttgagccatacccatctaaattaagtggcctgaaaggtaaaaatattttcttggtggctgctactctcagacctgagaccatgtttgggcagacaaattgttgggttcgtcctgatatgaagtacattggatttgagacggtgaatggtgatatattcatctgtacccaaaaagcagccaggaatatgtcataccagggctttaccaaagacaatggcgtggtgcctgttgttaaggaattaatgggggaggaaattcttggtgcatcactttctgcacctttaacatcatacaaggtgatctatgttctcccaatgctaactattaaggaggataaaggcactggtgtggttacaagtgttccttccgactcccctgatgatattgctgccctcagagacttgaagaaaaagcaagccttacgagcaaaatatggaattagagatgacatggtcttgccatttgagccggtgccagtcattgaaatcccaggttttggaaatctttctgctgtaaccatttgtgatgagttgaaaattcagagccagaatgaccgggaaaaacttgcagaagcaaaggagaagatatatctaaaaggattttatgagggtatcatgttggtggatggatttaaaggacagaaggttcaagatgtaaagaagactattcagaaaaagatgattgacgctggagatgcacttatttacatggaaccagagaaacaagtgatgtccaggtcgtcagatgaatgtgttgtggctctgtgtgaccagtggtacttggattatggagaagagaattggaagaaacagacatctcagtgcttgaagaacctggaaacattctgtgaggagaccaggaggaattttgaagccaccttaggttggctacaagaacatgcttgctcaagaacttatggtctaggcactcacctgccttgggatgagcagtggctgattgaatcactttctgactccactatttacatggcattttacacagttgcacacctattgcaggggggtaacttgcatggacaggcagagtctccgctgggcattagaccgcaacagatgaccaaggaagtttgggattatgttttcttcaaggaggctccatttcctaagactcagattgcaaaggaaaaattagatcagttaaagcaggagtttgaattctggtatcctgttgatcttcgcgtctctggcaaggatcttgttccaaatcatctttcatattacctttataatcatgtggctatgtggccggaacaaagtganaaatggcnaagtgggaaaagaaatggcatcgcgtctgaagttgagaagtgtcaatcaaggcattctcaacattgccgctatgacaaagtcgacaaggaagcatggaatgcgagcgagaatgtaacatcctatgacggagagggtatcatgaaggaaaggacaagcaggaaaacgtacatacaatagccgtgaacacacaaataaagagtggagcaggcaggactcccttggtccctccctcccg

SEQ ID NO: 423094 - DNA, 2148 bp, Homo sapiens
ggctgtagttagtaaggagccggatgattgcctcagcaggtgtgaagcgtgtgctttagtttcgtgggaggcctggcatccccgagagggaggggaaaggtaaccactcctttgtggaggtcgccagggtcattgtcgtggatttgcacagtcggctgggcggtgcaatggcggaaagaaaaggaacagccaaagtggactttttgaagaagattgagaaagaaatccaacagaaatgggatactgagagagtgtttgaggtcaatgcatctaatttagagaaacagaccagcaagggcaagtattttgtaaccttcccatatccatatatgaatggacgccttcatttgggacacacgttttctttatccaaatgtgagtttgctgtagggtaccagcgattgaaaggaaaatgttgtctgtttccctttggcctgcactgtactggaatgcctattaaggcatgtgctgataagttgaaaagagaaatagagctgtatggttgcccccctgattttccagatgaagaagaggaagaggaagaaaccagtgttaaaacagaagatataataattaaggataaagctaaaggaaaaaagagtaaagctgctgctaaagctggatcttctaaataccagtggggcattatgaaatcccttggcctgtctgatgaagagatagtaaaattttctgaagcagaacattggcttgattatttcccgccactggctattcaggatttaaaaagaatgggtttgaaggtagactggcgtcgttccttcatcaccactgatgttaatccttactatgattcatttgtcagatggcaatttttaacattaagagaaagaaacaaaattaaatttgggaagcggtatacaatttactctccgaaagatggacagccttgcatggatcatgatagacaaactggagagggtgttggacctcaggaatatactttactcaaattgaaggtgcttgagccatacccatctaaattaagtggcctgaaaggtaaaaatattttcttggtggctgctactctcagacctgagaccatgtttgggcagacaaattgttgggttcgtcctgatatgaagtacattggatttgagacggtgaatggtgatatattcatctgtacccaaaaagcagccaggaatatgtcataccagggctttaccaaagacaatggcgtggtgcctgttgttaaggaattaatgggggaggaaattcttggtgcatcactttctgcacctttaacatcatacaaggtgatctatgttctcccaatgctaactattaaggaggataaaggcactggtgtggttacaagtgttccttccgactcccctgatgatattgctgccctcagagacttgaagaaaaagcaagccttacgagcaaaatatggaattagagatgacatggtcttgccatttgagccggtgccagtcattgaaatcccaggttttggaaatctttctgctgtaaccatttgtgatgagttgaaaattcagagccagaatgaccgggaaaaacttgcagaagcaaaggagaagatatatctaaaaggattttatgagggtatcatgttggtggatggatttaaaggacagaaggttcaagatgtaaagaagactattcagaaaaagatgattgacgctggagatgcacttatttacatggaaccagagaaacaagtgatgtccaggtcgtcagatgaatgtgttgtggctctgtgtgaccagtggtacttggattatggagaagagaattggaagaaacagacatctcagtgcttgaagaacctggaaacattctgtgaggagaccaggaggaattttgaagccaccttaggttggctacaagaacatgcttgctcaagaacttatggtctaggcactcacctgccttgggatgagcagtggctgattgaatcactttctgactccactatttacatggcattttacacagttgcacacctattgcaggggggtaacttgcatggacaggcagagtctccgctgggcattaggttggtaaacagataagggaaaggagcataatttgtcagtaagagttgtgatatttgatttacgtatttaaatgttttaataagatttatttcacagaattttg

SEQ ID NO: 423095 - DNA, 1604 bp, Homo sapiens
ggctgtagttagtaaggagccggatgattgcctcagcaggtgtgaagcgtgtgctttagtttcgtgggaggcctggcatccccgagagggaggggaaaggtaaccactcctttgtggaggtcgccagggtcattgtcgtggatttgcacagtcggctgggcggtgcaatggcggaaagaaaaggaacagccaaagtggactttttgaagaagattgagaaagaaatccaacagaaatgggatactgagagagtgtttgaggtcaatgcatctaatttagagaaacagaccagcaagggcaagtattttgtaaccttcccatatccatatatgaatggacgccttcatttgggacacacgttttctttatccaaatgtgagtttgctgtagggtaccagcgattgaaaggaaaatgttgtctgtttccctttggcctgcactgtactggaatgcctattaaggcatgtgctgataagttgaaaagagaaatagagctgtatggttgcccccctgattttccagatgaagaagaggaagaggaagaaaccagtgttaaaacagaagatataataattaaggataaagctaaaggaaaaaagagtaaagctgctgctaaagctggatcttctaaataccagtggggcattatgaaatcccttggcctgtctgatgaagagatagtaaaattttctgaagcagaacattggcttgattatttcccgccactggctattcaggatttaaaaagaatgggtttgaaggtagactggcgtcgttccttcatcaccactgatgttaatccttactatgattcatttgtcagatggcaatttttaacattaagagaaagaaacaaaattaaatttgggaagcggtatacaatttactctccgaaagatggacagccttgcatggatcatgatagacaaactggagagggtgttggacctcaggaatatactttactcaaattgaaggtgcttgagccatacccatctaaattaagtggcctgaaaggtaaaaatattttcttggtggctgctactctcagacctgagaccatgtttgggcagacaaattgttgggttcgtcctgatatgaagtacattggatttgagacggtgaatggtgatatattcatctgtacccaaaaagcagccaggaatatgtcataccagggctttaccaaagacaatggcgtggtgcctgttgttaaggaattaatgggggaggaaattcttggtgcatcactttctgcacctttaacatcatacaaggtgatctatgttctcccaatgctaactattaaggaggataaaggcactggtgtggttacaagtgttccttccgactcccctgatgatattgctgccctcagagacttgaagaaaaagcaagccttacgagcaaaatatggaattagagatgacatggtcttgccatttgagccggtgccagtcattgaaatcccaggtcttggtatagctgtgtacagctatcaaaatcatctcgatcacatgagatttcagagatccagttctcagtgtcaccttgaagatgacgatcttatgaagactagcaggtgattttaatccgacagtgtc

SEQ ID NO: 423096 - DNA, 2313 bp, Homo sapiens
ttttttttgtagagacagggtcttgctgtgttgcccgggctgctctcttaactcctggcctcaagtaatcctcttgccttggcttcccaaagtgctgggattacaggcgtgagccaccatgcttagctgatttgccctaatcctctgctgacattctgatatcagacaactaaaattataacattgggcagctattttgtatgatatatagggtagtggttcttaagcttattggtgagtaaccttcacttgggaagcttatttttaaaaatgtagaccttcattactttcctcctgagattttgaatcagtacctttgagagagggtccagtaaatctttgttttgaatgaactgatggttttgaagcaggtgacctggaggactgcatgtagaacacagtgatgtcaaggagtaaaggagagaacagaagtgagattagcactaatcacctctaatgccttatttccagtaaagtttagagaagaggaaaagctacttggcttgctcctttgaaggttttgtttccctcttaacacagaaattaaaaggtagaggagagatgctgaatgatgctttttttcttcttaatcttggggggtcattatgattaagttattgaatccatatcaccgtatgacagcacatgatgaaagaaaatcagatgtttgtttcaatcaaagtgaaacaaaatgagaataactatttgggcaaaacacttttatcactgctaagatattactagaactgagcagagaaatactcagagagagccatggcatagtactaattaataatggggtaccatttagcaactggaatattctctgatgatgcctgtttaattactcataggtgctaagtgaatgttaaaaattacggtgctggttgaataggccgagtagaatttgtgttagggcacatcccatggagatcttttttactgcttaattttttggagttacctcagtaacttaacaggcaggaatatggttttaatggaaaggaaaccatttgcctttaacagcattagtcccgctaagagaaagtttttgcttgtctagtttattacaggtctttgactttgtcagtatatggcaaatttagtataaaagatgattaattatcaaggctgatgaaatataggcagctgaaaagaaaattcttagcaattcataccttagaaggaaccctgaaggacaggacgccatagaaatcctgtttttttaaaaaagtaatttcaagtaagtttgcaaatgcaatgctagtaaaaagtatatagaggtatgtctttcacactatcttgttactattagaatttttgtagccatgtgcagaggagagaaaaggtgttggattttctgcagttctgattcagttctaaggaatttgggtgtgaaaagaatgtttgcaaaggagccaggcaccaaaggtgagaacaggaatacgaaacacaacatctgtaaatgactaaattcagagggaatttagtggggcatatctcttaaatggttttgaataatttggtgttttaaccaatgacttaatttaacttagtgggtatactgttcccagtcccattactgatttttattcctctgtgataacatacacccaaataaagactgctatgtatttgactttaaaactataaagatgtaaaaaaggttcactaagccaaacaccttagaaaatagcctcagctatttgctatgtttatattatacctgcataaaagtatttatgtatagatgtacttaccttacacagtaagtacctaaaatttgtaaattgaatacttttgaatgtaagcagttgaagtaaaacctgtagtgagttcttcagtcagtcaacactaaacctgttttgtaaatttgatgctagtattacactggactttctcaaaatgaagtacacctatatatgcatatagtatatgagcatgcgtatttgtacaaaagcccttcaaaaggagttcagcttttataaacaccaaaacactctctgcctgtaaaatgtttttgctgaaatttgtatcattaactctcaaatttacatcttcatgtttgagatacgcttttaggactgtctatgcatgtagactttggtcaactctctcctcctccctcaataaatcagttaacttaaaaaatatattgtgaccatttttataaaatacatgttcataaaacagatcaacatatttagcttatacagaaataaaattaagtcaatccactcacaaagaatttctattttgtaaaaatgtagcttgtatttcagtataataaaatctgatgtaagaaacaaatga

SEQ ID NO: 423097 - DNA, 343 bp, Homo sapiens
gcggccgcctactactactactactgctcgaattcaagcttctaacgatgtacggggacatgagcataaaaatgcgtgcgtttcagtgtttaagaaggcttgataaagaatgtcacttttttatttaactgataagatttttgttattttttactttgataagtaaaccaaagaatatttgtatttcaagcagtttgtgtggtgtttctatataattttctgtgtataaataataaagtaggcatttgtttattttgtaaaaaagaaatgaaaatctgctggccagctatgtcctctaggaaatgacagacccaaccaccagcaataaacatttccattgtca

SEQ ID NO: 423098 - DNA, 1924 bp, Homo sapiens
cttttctcccgccggctctaacccgcgcttggctaaggtccgcgggaacccgtgagccaccgagagagcagagaactcggcgccgccaaacagcccagctcgcgcttcagcgtcccggcgccgtcgcgccactcctccgatggccacagatgtctttaattccaaaaacctggccgttcaggcacaaaagaagatcttgggtaaaatggtgtccaaatccatcgccaccaccttaatagacgacacaagtagtgaggtgctggatgagctctacagagtgaccagggagtacacccaaaacaagaaggaggcagagaagatcatcaagaacctcatcaagacagtcatcaagctggccattctttataggaataatcagtttaatcaagatgagctagcattgatggagaaatttaagaagaaagttcatcagcttgctatgaccgtggtcagtttccatcaggtggattatacctttgaccggaatgtgttatccaggctgttaaatgaatgcagagagatgctgcaccaaatcattcagcgccacctcactgccaagtcacatggacgggttaataatgtgtttgatcatttttcagattgtgaatttttggctgccttgtataatccttttgggaattttaaaccccacttacaaaaactatgtgatggtatcaacaaaatgttggatgaagagaacatatgagcacatgagttaagattgtgactgatcatgatttatttgaagatggagcactgctgatttatgaaggaaaaaagaagaattttctaaagattacacatatttcagaaagactttacccaattcagttgtcagacataatgatttatttgaaggcttgttttatttgaagaaaagcatattgccaaaaattctggttaaaagcttcctaacgggtaacagaccatgggagagatatgtggttgggtaatgcaaatgtagttatacaaagaaaaatacagatgtctccagacctgaggactttttaatagggcagttgttgtgttggtggcacattggatatttctaacatgtacaaagctatgtattttgatttactttcatttcttgctatgtatatgtacttttcttaaaatgccaagaactttctcttgctatcattgctccttttgaaacaattcaattttcatgtctacagctgactgttttgttaagattgagtcatcgacattcaggatttaagtctgaggtagtcaaccctcaggaaaaaaaaaatggcttatctgaaatcagtactgtggaaatgaactatattagctattatgaataatgtccagtataagaatatgcttctggaattgagttctccttttaagtaccaatgatacttaaatttctcagaaatgtaatggtgtgtcattgccttgaaatgcttgcttagggcttcttttatgttatcttaaaaagtgctggtgaattttccattttttacatccatttcacatgtaagagacaaaaaagtctagattggtcttgatattgagataataaaaagtaagtagcattaagaaaggtaacaatcttcattctacagatgaactcattgaaacaatttaggggaatgaggggcaaaaggggagaaatactgctaaagaacatgagcataaaaatgcgtgcgtttcagtgtttaagaaggcttgataaagaatgtcacttttttatttaactgataagatttttgttattttttactttgataagtaaaccaaagaatatttgtatttcaagcagtttgtgtggtgtttctatataattttctgtgtataaataataaagtaggcatttgtttattttgtaaaaaagaaatgaaaatctgctggccagctatgtcctctaggaaatgacagacccaaccaccagcaataaacatttccattgtca

SEQ ID NO: 423099 - DNA, 1029 bp, Homo sapiens
tctaagtatctgtttctattttctagcatgttgaaacgttagacttcctgtttctgcttgattttgaatatactcctgtttgcttgtcacaggtaatcttgcatttctatgtagttgtagtttacagggagcaagtgcaggcagcaaccagtccatccctgttgtgaatgtggagacctctctggactcacaattaaaggctacctaatgcattccactacaagtgacgaaacctagctcccagaataacaagcaagacaactttcaaagtgactgtagttgaccagtgccttctgtgcatttatgtggtaagcttatggtagatttttcaaaagaatagtataaattattttgaattattcttgagaaggactgagtctccccgagggtgatgcaggttccatagtgtacacgtcaacagggtggttgcatgcattcctcaagtctgtatgactctaccaagatactgtgaagttgtccttctgattgcacacggggagaaaatgctgaaactaggtgagttaaaacggccttcagaatatgtttagatataatgtctttgttgaaatctggtaaaatgttcagatgactaacatagtattgctgtcttcaaggaaataatgtttggtcgtggctttagagctactgtgttcaacaaatcactgttttgttttgttttgctatggctctgggtgtggggaaccagtgttaagcagggagaggtatgagtattgtgggtggaaaaatgacatttaaagtttgcatgtagacagtttcatttgtaaacagataaagatttgaaatgtttcagagatgggactctgaaaagattggatggctttttcactcagagtttctcttttacattttccatgcgtttattaactgtaggacacctctggttcccagtggtctggtagcagtggtaacaccgtggggcaacccgtaaacacaaggctgtttatttctattctcttattggataattgtttgaatattgctgttgccattttctctaacaaccaaaaa

SEQ ID NO: 423100 - DNA, 2541 bp, Homo sapiens
ggctccgggggcggactcccgccgcccagctgacacgcgattcgtcactcttgcagaactttccccctgaaaatccctgcaccagaacccgctctcccgccccggggaggttttgattttagtggctttcttccttttattttccgtcgtgtgcggatttcgctgcagagcgaacttgcggctcgtccgagtacatgtgagcggtaatcgcccctgcagctggttatcctgacattatgcactccgaagcagaagaatccaaggaagtggccacagatgtctttaattccaaaaacctggccgttcaggcacaaaagaagatcttgggtaaaatggtgtccaaatccatcgccaccaccttaatagacgacacaagtagtgaggtgctggatgagctctacagagtgaccagggagtacacccaaaacaagaaggaggcagagaagatcatcaagaacctcatcaagacagtcatcaagctggccattctttataggaataatcagtttaatcaagatgagctagcattgatggagaaatttaagaagaaagttcatcagcttgctatgaccgtggtcagtttccatcaggtggattatacctttgaccggaatgtgttatccaggctgttaaatgaatgcagagagatgctgcaccaaatcattcagcgccacctcactgccaagtcacatggacgggttaataatgtgtttgatcatttttcagattgtgaatttttggctgccttgtataatccttttgggaattttaaaccccacttacaaaaactatgtgatggtatcaacaaaatgttggatgaagagaacatatgagcacatgagttaagattgtgactgatcatgatttatttgaagatggagcactgctgatttatgaaggaaaaaagaagaattttctaaagattacacatatttcagaaagactttacccaattcagttgtcagacataatgatttatttgaaggcttgttttatttgaagaaaagcatattgccaaaaattctggttaaaagcttcctaacgggtaacagaccatgggagagatatgtggttgggtaatgcaaatgtagttatacaaagaaaaatacagatgtctccagacctgaggactttttaatagggcagttgttgtgttggtggcacattggatatttctaacatgtacaaagctatgtattttgatttactttcatttcttgctatgtatatgtacttttcttaaaatgccaagaactttctcttgctatcattgctccttttgaaacaattcaattttcatgtctacagctgactgttttgttaagattgagtcatcgacattcaggatttaagtctgaggtagtcaaccctcaggaaaaaaaaaatggcttatctgaaatcagtactgtggaaatgaactatattagctattatgaataatgtccagtataagaatatgcttctggaattgagttctccttttaagtaccaatgatacttaaatttctcagaaatgtaatggtgtgtcattgccttgaaatgcttgcttagggcttcttttatgttatcttaaaaagtgctggtgaattttccattttttacatccatttcacatgtaagagacaaaaaagtctagattggtcttgatattgagataataaaaagtaagtagcattaagaaaggtaacaatcttcattctacagatgaactcattgaaacaatttaggggaatgaggggcaaaaggggagaaatactgctaaagaacatgagcataaaaatgcgtgcgtttcagtgtttaagaaggcttgataaagaatgtcacttttttatttaactgataagatttttgttattttttactttgataagtaaaccaaagaatatttgtatttcaagcagtttgtgtggtgtttctatataattttctgtgtataaataataaagtaggcatttgtttattttgtaaaaaagaaatgaaaatctgctggccagctatgtcctctaggaaatgacagacccaaccaccagcaataaacatttccattgtcaaaaaaaaaaaaaaaaaaaaaaaaaaaaaacaaaaaaaaaaaaaaaaaaaaaaaaaagaggggggggcccccaaaaaattcccccgagggggcgcgccaagatagtcatcgccgtgaccccggttttctgtgtgtgaccagaagggggcgccccataggagggagagcgccgagaataacaaaacagcagagacgacgcgcggagccgcggctgtaacaacaccacagcgcagaaggcgggaacaaccgcgcgcacaggggggaacccaggggaaaagcgaacccctccacgcgggggggggggggaacacactgttggcggggacacagatcacacctcacccggagatttattaagcgcccgcagagaagagagaaatatatccaccttctcagggcgatgctatacgcgctgtcttcaaccatgtgctccgtatttattattctgctgtagcgttacagacagttctgtggccacgccgccgctttac

SEQ ID NO: 423101 - DNA, 2300 bp, Homo sapiens
tctaagtatctgtttctattttctagcatgttgaaacgttagacttcctgtttctgcttgattttgaatatactcctgtttgcttgtcacaggtaatcttgcatttctatgtagttgtagtttacagggagcaagtgcaggcagcaaccagtccatccctgttgtgaatgtggagacctctctggactcacaattaaaggctacctaatgcattccactacaagtgacgaaacctagctcccagaataacaagcaagacaactttcaaagtgactgtagttgaccagtgccttctgtgcatttatgtggtaagcttatggtagatttttcaaaagaatagtataaattattttgaattattcttgagaaggactgagtctccccgagggtgatgcaggttccatagtgtacacgtcaacagggtggttgcatgcattcctcaagtctgtatgactctaccaagatactgtgaagttgtccttctgattgcacacggggagaaaatgctgaaactagtggccacagatgtctttaattccaaaaacctggccgttcaggcacaaaagaagatcttgggtaaaatggtgtccaaatccatcgccaccaccttaatagacgacacaagtagtgaggtgctggatgagctctacagagtgaccagggagtacacccaaaacaagaaggaggcagagaagatcatcaagaacctcatcaagacagtcatcaagctggccattctttataggaataatcagtttaatcaagatgagctagcattgatggagaaatttaagaagaaagttcatcagcttgctatgaccgtggtcagtttccatcaggtggattatacctttgaccggaatgtgttatccaggctgttaaatgaatgcagagagatgctgcaccaaatcattcagcgccacctcactgccaagtcacatggacgggttaataatgtgtttgatcatttttcagattgtgaatttttggctgccttgtataatccttttgggaattttaaaccccacttacaaaaactatgtgatggtatcaacaaaatgttggatgaagagaacatatgagcacatgagttaagattgtgactgatcatgatttatttgaagatggagcactgctgatttatgaaggaaaaaagaagaattttctaaagattacacatatttcagaaagactttacccaattcagttgtcagacataatgatttatttgaaggcttgttttatttgaagaaaagcatattgccaaaaattctggttaaaagcttcctaacgggtaacagaccatgggagagatatgtggttgggtaatgcaaatgtagttatacaaagaaaaatacagatgtctccagacctgaggactttttaatagggcagttgttgtgttggtggcacattggatatttctaacatgtacaaagctatgtattttgatttactttcatttcttgctatgtatatgtacttttcttaaaatgccaagaactttctcttgctatcattgctccttttgaaacaattcaattttcatgtctacagctgactgttttgttaagattgagtcatcgacattcaggatttaagtctgaggtagtcaaccctcaggaaaaaaaaaatggcttatctgaaatcagtactgtggaaatgaactatattagctattatgaataatgtccagtataagaatatgcttctggaattgagttctccttttaagtaccaatgatacttaaatttctcagaaatgtaatggtgtgtcattgccttgaaatgcttgcttagggcttcttttatgttatcttaaaaagtgctggtgaattttccattttttacatccatttcacatgtaagagacaaaaaagtctagattggtcttgatattgagataataaaaagtaagtagcattaagaaaggtaacaatcttcattctacagatgaactcattgaaacaatttaggggaatgaggggcaaaaggggagaaatactgctaaagaacatgagcataaaaatgcgtgcgtttcagtgtttaagaaggcttgataaagaatgtcacttttttatttaactgataagatttttgttattttttactttgataagtaaaccaaagaatatttgtatttcaagcagtttgtgtggtgtttctatataattttctgtgtataaataataaagtaggcatttgtttattttgtaaaaaagaaatgaaaatctgctggccagctatgtcctctaggaaatgacagacccaaccaccagcaataaacatttccattgtca

SEQ ID NO: 423102 - DNA, 1936 bp, Homo sapiens
cgtaaccgcgtgcgttggactagcggttcgtggagaatcctggtggaggcaccagaggagagcagcagaacgtcgtgcgctcctgacaatacagcccatggtcgacagcttcagcgctcccaggacgccgtctgctgccacatccgtcgcgatggccacagatgtctttaattccaaaaacctggccgttcaggcacaaaagaagatcttgggtaaaatggtgtccaaatccatcgccaccaccttaatagacgacacaagtagtgaggtgctggatgagctctacagagtgaccagggagtacacccaaaacaagaaggaggcagagaagatcatcaagaacctcatcaagacagtcatcaagctggccattctttataggaataatcagtttaatcaagatgagctagcattgatggagaaatttaagaagaaagttcatcagcttgctatgaccgtggtcagtttccatcaggtggattatacctttgaccggaatgtgttatccaggctgttaaatgaatgcagagagatgctgcaccaaatcattcagcgccacctcactgccaagtcacatggacgggttaataatgtgtttgatcatttttcagattgtgaatttttggctgccttgtataatccttttgggaattttaaaccccacttacaaaaactatgtgatggtatcaacaaaatgttggatgaagagaacatatgagcacatgagttaagattgtgactgatcatgatttatttgaagatggagcactgctgatttatgaaggaaaaaagaagaattttctaaagattacacatatttcagaaagactttacccaattcagttgtcagacataatgatttatttgaaggcttgttttatttgaagaaaagcatattgccaaaaattctggttaaaagcttcctaacgggtaacagaccatgggagagatatgtggttgggtaatgcaaatgtagttatacaaagaaaaatacagatgtctccagacctgaggactttttaatagggcagttgttgtgttggtggcacattggatatttctaacatgtacaaagctatgtattttgatttactttcatttcttgctatgtatatgtacttttcttaaaatgccaagaactttctcttgctatcattgctccttttgaaacaattcaattttcatgtctacagctgactgttttgttaagattgagtcatcgacattcaggatttaagtctgaggtagtcaaccctcaggaaaaaaaaaatggcttatctgaaatcagtactgtggaaatgaactatattagctattatgaataatgtccagtataagaatatgcttctggaattgagttctccttttaagtaccaatgatacttaaatttctcagaaatgtaatggtgtgtcattgccttgaaatgcttgcttagggcttcttttatgttatcttaaaaagtgctggtgaattttccattttttacatccatttcacatgtaagagacaaaaaagtctagattggtcttgatattgagataataaaaagtaagtagcattaagaaaggtaacaatcttcattctacagatgaactcattgaaacaatttaggggaatgaggggcaaaaggggagaaatactgctaaagaacatgagcataaaaatgcgtgcgtttcagtgtttaagaaggcttgataaagaatgtcacttttttatttaactgataagatttttgttattttttactttgataagtaaaccaaagaatatttgtatttcaagcagtttgtgtggtgtttctatataattttctgtgtataaataataaagtaggcatttgtttattttgtaaaaaagaaatgaaaatctgctggccagctatgtcctctaggaaatgacagacccaaccaccagcaataaacatttccattgtca

SEQ ID NO: 423103 - DNA, 2051 bp, Homo sapiens
ggctccgggggcggactcccgccgcccagctgacacgcgattcgtcactcttgcagaactttccccctgaaaatccctgcaccagaacccgctctcccgccccggggaggttttgattttagtggctttcttccttttattttccgtcgtgtgcggatttcgctgcagagcgaacttgcggctcgtccgagtacatgtgagcggtaatcgcccctgcagctggttatcctgacattatgcactccgaagcagaagaatccaaggaagtggccacagatgtctttaattccaaaaacctggccgttcaggcacaaaagaagatcttgggtaaaatggtgtccaaatccatcgccaccaccttaatagacgacacaagtagtgaggtgctggatgagctctacagagtgaccagggagtacacccaaaacaagaaggaggcagagaagatcatcaagaacctcatcaagacagtcatcaagctggccattctttataggaataatcagtttaatcaagatgagctagcattgatggagaaatttaagaagaaagttcatcagcttgctatgaccgtggtcagtttccatcaggtggattatacctttgaccggaatgtgttatccaggctgttaaatgaatgcagagagatgctgcaccaaatcattcagcgccacctcactgccaagtcacatggacgggttaataatgtgtttgatcatttttcagattgtgaatttttggctgccttgtataatccttttgggaattttaaaccccacttacaaaaactatgtgatggtatcaacaaaatgttggatgaagagaacatatgagcacatgagttaagattgtgactgatcatgatttatttgaagatggagcactgctgatttatgaaggaaaaaagaagaattttctaaagattacacatatttcagaaagactttacccaattcagttgtcagacataatgatttatttgaaggcttgttttatttgaagaaaagcatattgccaaaaattctggttaaaagcttcctaacgggtaacagaccatgggagagatatgtggttgggtaatgcaaatgtagttatacaaagaaaaatacagatgtctccagacctgaggactttttaatagggcagttgttgtgttggtggcacattggatatttctaacatgtacaaagctatgtattttgatttactttcatttcttgctatgtatatgtacttttcttaaaatgccaagaactttctcttgctatcattgctccttttgaaacaattcaattttcatgtctacagctgactgttttgttaagattgagtcatcgacattcaggatttaagtctgaggtagtcaaccctcaggaaaaaaaaaatggcttatctgaaatcagtactgtggaaatgaactatattagctattatgaataatgtccagtataagaatatgcttctggaattgagttctccttttaagtaccaatgatacttaaatttctcagaaatgtaatggtgtgtcattgccttgaaatgcttgcttagggcttcttttatgttatcttaaaaagtgctggtgaattttccattttttacatccatttcacatgtaagagacaaaaaagtctagattggtcttgatattgagataataaaaagtaagtagcattaagaaaggtaacaatcttcattctacagatgaactcattgaaacaatttaggggaatgaggggcaaaaggggagaaatactgctaaagaacatgagcataaaaatgcgtgcgtttcagtgtttaagaaggcttgataaagaatgtcacttttttatttaactgataagatttttgttattttttactttgataagtaaaccaaagaatatttgtatttcaagcagtttgtgtggtgtttctatataattttctgtgtataaataataaagtaggcatttgtttattttgtaaaaaagaaatgaaaatctgctggccagctatgtcctctaggaaatgacagacccaaccaccagcaataaacatttccattgtca

SEQ ID NO: 423104 - DNA, 2168 bp, Homo sapiens
ggctccgggggcggactcccgccgcccagctgacacgcgattcgtcactcttgcagaactttccccctgaaaatccctgcaccagaacccgctctcccgccccggggaggttttgattttagtggctttcttccttttattttccgtcgtgtgcggatttcgctgcagagcgaacttgcggctcgtccgagtacatgtgagcggtaatcgcccctgcagctggttatcctgacattatgcactccgaagcagaagaatccaaggaaggcctaggcttaaacactggcatatatggagagaacagttgccactcgactcagagattgagtagacacccaaagaactgcagttcttaagccttaggagaagcgagagaaatggcagtggccacagatgtctttaattccaaaaacctggccgttcaggcacaaaagaagatcttgggtaaaatggtgtccaaatccatcgccaccaccttaatagacgacacaagtagtgaggtgctggatgagctctacagagtgaccagggagtacacccaaaacaagaaggaggcagagaagatcatcaagaacctcatcaagacagtcatcaagctggccattctttataggaataatcagtttaatcaagatgagctagcattgatggagaaatttaagaagaaagttcatcagcttgctatgaccgtggtcagtttccatcaggtggattatacctttgaccggaatgtgttatccaggctgttaaatgaatgcagagagatgctgcaccaaatcattcagcgccacctcactgccaagtcacatggacgggttaataatgtgtttgatcatttttcagattgtgaatttttggctgccttgtataatccttttgggaattttaaaccccacttacaaaaactatgtgatggtatcaacaaaatgttggatgaagagaacatatgagcacatgagttaagattgtgactgatcatgatttatttgaagatggagcactgctgatttatgaaggaaaaaagaagaattttctaaagattacacatatttcagaaagactttacccaattcagttgtcagacataatgatttatttgaaggcttgttttatttgaagaaaagcatattgccaaaaattctggttaaaagcttcctaacgggtaacagaccatgggagagatatgtggttgggtaatgcaaatgtagttatacaaagaaaaatacagatgtctccagacctgaggactttttaatagggcagttgttgtgttggtggcacattggatatttctaacatgtacaaagctatgtattttgatttactttcatttcttgctatgtatatgtacttttcttaaaatgccaagaactttctcttgctatcattgctccttttgaaacaattcaattttcatgtctacagctgactgttttgttaagattgagtcatcgacattcaggatttaagtctgaggtagtcaaccctcaggaaaaaaaaaatggcttatctgaaatcagtactgtggaaatgaactatattagctattatgaataatgtccagtataagaatatgcttctggaattgagttctccttttaagtaccaatgatacttaaatttctcagaaatgtaatggtgtgtcattgccttgaaatgcttgcttagggcttcttttatgttatcttaaaaagtgctggtgaattttccattttttacatccatttcacatgtaagagacaaaaaagtctagattggtcttgatattgagataataaaaagtaagtagcattaagaaaggtaacaatcttcattctacagatgaactcattgaaacaatttaggggaatgaggggcaaaaggggagaaatactgctaaagaacatgagcataaaaatgcgtgcgtttcagtgtttaagaaggcttgataaagaatgtcacttttttatttaactgataagatttttgttattttttactttgataagtaaaccaaagaatatttgtatttcaagcagtttgtgtggtgtttctatataattttctgtgtataaataataaagtaggcatttgtttattttgtaaaaaagaaatgaaaatctgctggccagctatgtcctctaggaaatgacagacccaaccaccagcaataaacatttccattgtca

SEQ ID NO: 423105 - DNA, 2662 bp, Homo sapiens
  misc_feature (2337)..(2337): n is a, c, g, or t
ggctccgggggcggactcccgccgcccagctgacacgcgattcgtcactcttgcagaactttccccctgaaaatccctgcaccagaacccgctctcccgccccggggaggttttgattttagtggctttcttccttttattttccgtcgtgtgcggatttcgctgcagagcgaacttgcggctcgtccgagtacatgtgagcggtaatcgcccctgcagctggttatcctgacattatgcactccgaagcagaagaatccaaggaagtggccacagatgtctttaattccaaaaacctggccgttcaggcacaaaagaagatcttgggtaaaatggtgtccaaatccatcgccaccaccttaatagacgacacaagtagtgaggtgctggatgagctctacagagtgaccagggagtacacccaaaacaagaaggaggcagagaagatcatcaagaacctcatcaagacagtcatcaagctggccattctttataggaataatcagtttaatcaagatgagctagcattgatggagaaatttaagaagaaagttcatcagcttgctatgaccgtggtcagtttccatcaggtggattatacctttgaccggaatgtgttatccaggctgttaaatgaatgcagagagatgctgcaccaaatcattcagcgccacctcactgccaagtcacatggacgggttaataatgtgtttgatcatttttcagattgtgaatttttggctgccttgtataatccttttgggaattttaaaccccacttacaaaaactatgtgatggtatcaacaaaatgttggatgaagagaacatatgagcacatgagttaagattgtgactgatcatgatttatttgaagatggagcactgctgatttatgaaggaaaaaagaagaattttctaaagattacacatatttcagaaagactttacccaattcagttgtcagacataatgatttatttgaaggcttgttttatttgaagaaaagcatattgccaaaaattctggttaaaagcttcctaacgggtaacagaccatgggagagatatgtggttgggtaatgcaaatgtagttatacaaagaaaaatacagatgtctccagacctgaggactttttaatagggcagttgttgtgttggtggcacattggatatttctaacatgtacaaagctatgtattttgatttactttcatttcttgctatgtatatgtacttttcttaaaatgccaagaactttctcttgctatcattgctccttttgaaacaattcaattttcatgtctacagctgactgttttgttaagattgagtcatcgacattcaggatttaagtctgaggtagtcaaccctcaggaaaaaaaaaatggcttatctgaaatcagtactgtggaaatgaactatattagctattatgaataatgtccagtataagaatatgcttctggaattgagttctccttttaagtaccaatgatacttaaatttctcagaaatgtaatggtgtgtcattgccttgaaatgcttgcttagggcttcttttatgttatcttaaaaagtgctggtgaattttccattttttacatccatttcacatgtaagagacaaaaaagtctagattggtcttgatattgagataataaaaagtaagtagcattaagaaaggtaacaatcttcattctacagatgaactcattgaaacaatttaggggaatgaggggcaaaaggggagaaatactgctaaagaacatgagcataaaaatgcgtgcgtttcagtgtttaagaaggcttgataaagaatgtcacttttttatttaactgataagatttttgttattttttactttgataagtaaaccaaagaatatttgtatttcaagcagtttgtgtggtgtttctatataattttctgtgtataaataataaagtaggcatttgtttattttgtaaaaaagaaatgaaaatctgctggccagctatgtcctctaggaaatgacagacccaaccaccagcaataaacatttccattgtcactgtgtctatgatttttttttttttttttttgagtctcgctctgttgtttaggctagaatgcgggagccaagattacaccattgcactccagccggggcaacaagagtgagatcttggttctcaaaaaaaaaaaaagaaatctctgttctgcgaagtgaagataaataattttttaaaaaccaccctgttgtgatgtggaaacacaagagggggaaataaaactcagagttataaatttcctatttggtgcccatttatcggggataatggaggattataagaagncgggagttcgcctcctaagaagtgggttttataaaggccagcagaattggccctttagctttaaattggtgtcgcccgccctggggggcccttctaaaacccgtcggtcctccctcagggtaaaatccgtggtaggacatttttacatcctgtacaacacttaatcccggcaaagaagagcggcgactaggggacaagccgcaatagggctttcaacacatggcgcggtgccgcacggaggacacttggggaaaaccgggcggtggcacccggggcccgtgtcacacccacgcagagcactcccagaactgctcacccgcacgtg

SEQ ID NO: 423106 - DNA, 1208 bp, Homo sapiens
ggggacctcagtggtgtgggccgattgtccccaagggaaaggctagaggcagatgggctcccgcctgtgggccagaccccagcctacctcgcttattctgcgtgccgtgcttcttggccagggcgatttctctctggattcgattttccagattttcttccatttgtgtgtgatgattgttcaggaatattttgccttgaacacagaagcagggagtctcatggttgtcctgaggtgactgtaatcaatgagagactgaagacagatcaacatacatcttacccatgctctttcaaagactgtgctgagagagaacttgtggcagttatatgtccttattgtgagaagaatttttgcctgagtgtcactcttctgttgctcatagacaccgtcatcagtcagatcatgagtgtgaaaaactggaaatcccaaagcctcgaatggctgccactcagaaacttgttaaagacattattggtaagtatctagaaagcgtgttttgttgctttcctagttccagagctcctgcttcttatatctactttccaattatgggaggcatcattaataaccccagtggtattcgtattaacttgtattttgatgatattcttgtgacagtatttcttatgaggtctacctgaccgatggaaatttggaaattatttggaggtactccactgtaagtacttatctcttttgctgagccacttagattagctagttaaccattgggctagaaatggtattcatgagattgaagtagtcagctgctttctctacagattaaactctaagcctagtcagctgttctgtgaatgctgctgataataagagataccaggaatgaatgtatctgtgacttaaatcagtctgcctgccagtatgttagctcagaatttttattccatattaaggatagtacctttattacaatcttgcataaccaaatcttaaggttgtctgtagaagcattaatgactgctttaggttaaataggcttaagttgaaaagaagcacattatagtggattttttgatgtggagattgcctagatcaatctcaatgatatttttccattgacaatgtaaatacaatacctatacaatgaatgtggtctctgtatatctctcttgtgtgtaatttatatatgtttctgagccataattaataagtgtattataataaaattctatttgtaatgtgaa

SEQ ID NO: 423107 - DNA, 477 bp, Homo sapiens
tacaggatcttagttaccgttatgtagtggctataggtttacttaaaaggaataaatttggaatgctcatttggtttatttcctttctaattcttcatattatttttatgtgaggaatggagataatttccaacttttattatgttcttgtactttcattcattagcatagttatttgagttcccactaaatgtagggatttgtcctaattgccatgattaatacaatgatgatatgtatacatacaggtataccttggaaatattgtgggttcagtttcagactaccacacaaagcaaatattggagtatattgagccagacaaattttttttttgtttcccagggcatataaaaattatgtttacactatactatagtctatttaatgtgcaatagcattatgtctaaaaaatgtatatactttaagtaaaaaaatactttattgctaaaaaatgctaataatatctgagccttc

SEQ ID NO: 423108 - DNA, 1796 bp, Homo sapiens
gggaccggggtacggtgcggagtgcccttcgtcctgggaaacggggcgccggagagatggcggagttggacatcgggcagcactgccaggtggagcattgccggcagcgagattttcttccatttgtgtgtgatgattgttcaggaatattttggtgactgtaatcaatgagagactgaagacagatcaacatacatcttacccatgctctttcaaagactgtgctgagagagaacttgtggcagttatatgtccttattgtgagaagaatttttgcctgagacaccgtcatcagtcagatcatgagtgtgaaaaactggaaatcccaaagcctcgaatggctgccactcagaaacttgttaaagacattattgattccaagacaggagaaacagcaagtaaacgatggaaaggtgccaaaaatagtgaaacagctgcaaaggttgcattgatgaaattaaagatgcatgctgatggcgataagtcattaccacagacagaaagaatttactttcaggttttcttacctaaagggagcaaagagaagagcaaaccaatgttcttttgccaccgatggagcattggaaaggccatagactttgccgcttctctagccaggcttaaaaatgacaataacaaatttacagctaagaaattaaggctgtgtcacattacttcaggagaagccttacccttggatcatactttggaaacctggattgctaaggaggattgtcctttatataatggtggaaatataatcttggaatatcttaatgatgaagaacaattctgtaaaaatgttgaatcttacttggaatagtcattcaaagattcaagtcagaaatcacagggaaaattctattacatgtttaagtccatttattttactacaaatactatttttgtaatttttaaaagttgctttttaacttatttccccttatgtcacattttaaattatgagttttctattagagttttttggttttaagtttaattgtgtacggatcctcaattattagcaaattcttatatttaattagctttcattagtttatgctgtagtgacaacaacaaagatgtatttcctggtgggggatgtcagctgttgattggctgtgacactgctttgtgtcatcttcttaccatgatcaaaggcgaaggaagggatctcttttgggacattgtgattgttttagcagagagagaaagagatgaaatacacttcggttttctcttaaaagatgcatgtatcatacgtgctttaagcaagtcatgtggccaagcctagcatcatggagccagaaagtatagccttgctgtctgtctacatcatgatgtataaattgatatatctacatgaattatagaaacttagaagtgatctttattcagtcttataatttttacatgaagaatcttaggcctaggaggagaaaatgattttctttctattacctaactagattggggcatatttctgataaagacccacctctagtgagattcatcttttttgtttgtgtgactatattccatagagaagaaagatgggatagctcaacttcattatataccaaagcaaaacacatgccaaatgatgactacattttaccaacatatttagacgagtattcttgactagtgtttactatctatacccccaaaactactactatatagacagaatggaaagtatttctatttgtcctttttttgttttctgttctaattgtcagggacatatgtagtggctataggtttacttaaaaggaataaatttggaatgctca

SEQ ID NO: 423109 - DNA, 1846 bp, Homo sapiens
ggagttgagcgagagcagagaaaagttgaaaagaccgacaaagactgtgggaagttggcttttatccacactagggacggtcccaggaacgaggaactagtttgtgaatggctcaaagaaaagcaaaccgatgtccagggtcttgtgcaggatctgaaagtattttcttccatttgtgtgtgatgattgttcaggaatattttggtgactgtaatcaatgagagactgaagacagatcaacatacatcttacccatgctctttcaaagactgtgctgagagagaacttgtggcagttatatgtccttattgtgagaagaatttttgcctgagacaccgtcatcagtcagatcatgagtgtgaaaaactggaaatcccaaagcctcgaatggctgccactcagaaacttgttaaagacattattgattccaagacaggagaaacagcaagtaaacgatggaaaggtgccaaaaatagtgaaacagctgcaaaggttgcattgatgaaattaaagatgcatgctgatggcgataagtcattaccacagacagaaagaatttactttcaggttttcttacctaaagggagcaaagagaagagcaaaccaatgttcttttgccaccgatggagcattggaaaggccatagactttgccgcttctctagccaggcttaaaaatgacaataacaaatttacagctaagaaattaaggctgtgtcacattacttcaggagaagccttacccttggatcatactttggaaacctggattgctaaggaggattgtcctttatataatggtggaaatataatcttggaatatcttaatgatgaagaacaattctgtaaaaatgttgaatcttacttggaatagtcattcaaagattcaagtcagaaatcacagggaaaattctattacatgtttaagtccatttattttactacaaatactatttttgtaatttttaaaagttgctttttaacttatttccccttatgtcacattttaaattatgagttttctattagagttttttggttttaagtttaattgtgtacggatcctcaattattagcaaattcttatatttaattagctttcattagtttatgctgtagtgacaacaacaaagatgtatttcctggtgggggatgtcagctgttgattggctgtgacactgctttgtgtcatcttcttaccatgatcaaaggcgaaggaagggatctcttttgggacattgtgattgttttagcagagagagaaagagatgaaatacacttcggttttctcttaaaagatgcatgtatcatacgtgctttaagcaagtcatgtggccaagcctagcatcatggagccagaaagtatagccttgctgtctgtctacatcatgatgtataaattgatatatctacatgaattatagaaacttagaagtgatctttattcagtcttataatttttacatgaagaatcttaggcctaggaggagaaaatgattttctttctattacctaactagattggggcatatttctgataaagacccacctctagtgagattcatcttttttgtttgtgtgactatattccatagagaagaaagatgggatagctcaacttcattatataccaaagcaaaacacatgccaaatgatgactacattttaccaacatatttagacgagtattcttgactagtgtttactatctatacccccaaaactactactatatagacagaatggaaagtatttctatttgtcctttttttgttttctgttctaattgtcagggacatatgtagtggctataggtttacttaaaaggaataaatttggaatgctca

SEQ ID NO: 423110 - DNA, 1829 bp, Homo sapiens
acactggtcaggctggtctcgaactcctgacctcaggtgatccgcccgcctcggcctcacagggtgctgggattacaggcgtgagccaccgcgcccggctgcagattttcttccatttgtgtgtgatgattgttcaggaatattttgccttgaacacagaagcagggagtctcatggttgtcctgaggtgactgtaatcaatgagagactgaagacagatcaacatacatcttacccatgctctttcaaagactgtgctgagagagaacttgtggcagttatatgtccttattgtgagaagaatttttgcctgagacaccgtcatcagtcagatcatgagtgtgaaaaactggaaatcccaaagcctcgaatggctgccactcagaaacttgttaaagacattattgattccaagacaggagaaacagcaagtaaacgatggaaaggtgccaaaaatagtgaaacagctgcaaaggttgcattgatgaaattaaagatgcatgctgatggcgataagtcattaccacagacagaaagaatttactttcaggttttcttacctaaagggagcaaagagaagagcaaaccaatgttcttttgccaccgatggagcattggaaaggccatagactttgccgcttctctagccaggcttaaaaatgacaataacaaatttacagctaagaaattaaggctgtgtcacattacttcaggagaagccttacccttggatcatactttggaaacctggattgctaaggaggattgtcctttatataatggtggaaatataatcttggaatatcttaatgatgaagaacaattctgtaaaaatgttgaatcttacttggaatagtcattcaaagattcaagtcagaaatcacagggaaaattctattacatgtttaagtccatttattttactacaaatactatttttgtaatttttaaaagttgctttttaacttatttccccttatgtcacattttaaattatgagttttctattagagttttttggttttaagtttaattgtgtacggatcctcaattattagcaaattcttatatttaattagctttcattagtttatgctgtagtgacaacaacaaagatgtatttcctggtgggggatgtcagctgttgattggctgtgacactgctttgtgtcatcttcttaccatgatcaaaggcgaaggaagggatctcttttgggacattgtgattgttttagcagagagagaaagagatgaaatacacttcggttttctcttaaaagatgcatgtatcatacgtgctttaagcaagtcatgtggccaagcctagcatcatggagccagaaagtatagccttgctgtctgtctacatcatgatgtataaattgatatatctacatgaattatagaaacttagaagtgatctttattcagtcttataatttttacatgaagaatcttaggcctaggaggagaaaatgattttctttctattacctaactagattggggcatatttctgataaagacccacctctagtgagattcatcttttttgtttgtgtgactatattccatagagaagaaagatgggatagctcaacttcattatataccaaagcaaaacacatgccaaatgatgactacattttaccaacatatttagacgagtattcttgactagtgtttactatctatacccccaaaactactactatatagacagaatggaaagtatttctatttgtcctttttttgttttctgttctaattgtcagggacatatgtagtggctataggtttacttaaaaggaataaatttggaatgctca

SEQ ID NO: 423111 - DNA, 2244 bp, Homo sapiens
gggaccggggtacggtgcggagtgcccttcgtcctgggaaacggggcgccggagagatggcggagttggacatcgggcagcactgccaggtggagcattgccggcagcgagattttcttccatttgtgtgtgatgattgttcaggaatattttgccttgaacacagaagcagggagtctcatggttgtcctgaggtgactgtaatcaatgagagactgaagacagatcaacatacatcttacccatgctctttcaaagactgtgctgagagagaacttgtggcagttatatgtccttattgtgagaagaatttttgcctgagacaccgtcatcagtcagatcatgagtgtgaaaaactggaaatcccaaagcctcgaatggctgccactcagaaacttgttaaagacattattgattccaagacaggagaaacagcaagtaaacgatggaaaggtgccaaaaatagtgaaacagctgcaaaggttgcattgatgaaattaaagatgcatgctgatggcgataagtcattaccacagacagaaagaatttactttcaggttttcttacctaaagggagcaaagagaagagcaaaccaatgttcttttgccaccgatggagcattggaaaggccatagactttgccgcttctctagccaggcttaaaaatgacaataacaaatttacagctaagaaattaaggctgtgtcacattacttcaggagaagccttacccttggatcatactttggaaacctggattgctaaggaggattgtcctttatataatggtggaaatataatcttggaatatcttaatgatgaagaacaattctgtaaaaatgttgaatcttacttggaatagtcattcaaagattcaagtcagaaatcacagggaaaattctattacatgtttaagtccatttattttactacaaatactatttttgtaatttttaaaagttgctttttaacttatttccccttatgtcacattttaaattatgagttttctattagagttttttggttttaagtttaattgtgtacggatcctcaattattagcaaattcttatatttaattagctttcattagtttatgctgtagtgacaacaacaaagatgtatttcctggtgggggatgtcagctgttgattggctgtgacactgctttgtgtcatcttcttaccatgatcaaaggcgaaggaagggatctcttttgggacattgtgattgttttagcagagagagaaagagatgaaatacacttcggttttctcttaaaagatgcatgtatcatacgtgctttaagcaagtcatgtggccaagcctagcatcatggagccagaaagtatagccttgctgtctgtctacatcatgatgtataaattgatatatctacatgaattatagaaacttagaagtgatctttattcagtcttataatttttacatgaagaatcttaggcctaggaggagaaaatgattttctttctattacctaactagattggggcatatttctgataaagacccacctctagtgagattcatcttttttgtttgtgtgactatattccatagagaagaaagatgggatagctcaacttcattatataccaaagcaaaacacatgccaaatgatgactacattttaccaacatatttagacgagtattcttgactagtgtttactatctatacccccaaaactactactatatagacagaatggaaagtatttctatttgtcctttttttgttttctgttctaattgtcagggacatatgtagtggctataggtttacttaaaaggaataaatttggaatgctcatttggtttatttcctttctaattcttcatattatttttatgtgaggaatggagataatttccaacttttattatgttcttgtactttcattcattagcatagttatttgagttcccactaaatgtagggatttgtcctaattgccatgattaatacaatgatgatatgtatacatacaggtataccttggaaatattgtgggttcagtttcagactaccacacaaagcaaatattggagtatattgagccagacaaattttttttttgtttcccagggcatataaaaattatgtttacactatactatagtctatttaatgtgcaatagcattatgtctaaaaaatgtatatactttaagtaaaaaaatactttattgctaaaaaatgctaataatatctgagccttc

SEQ ID NO: 423112 - DNA, 1838 bp, Homo sapiens
gggaccggggtacggtgcggagtgcccttcgtcctgggaaacggggcgccggagagatggcggagttggacatcgggcagcactgccaggtggagcattgccggcagcgagattttcttccatttgtgtgtgatgattgttcaggaatattttggtgactgtaatcaatgagagactgaagacagatcaacatacatcttacccatgctctttcaaagactgtgctgagagagaacttgtggcagttatatgtccttattgtgagaagaatttttgcctgagacaccgtcatcagtcagatcatgagtgtgaaaaactggaaatcccaaagcctcgaatggctgccactcagaaacttgttaaagacattattgattccaagacaggagaaacagcaagtaaacgatggaaaggtgccaaaaatagtgaaacagctgcaaaggttgcattgatgaaattaaagatgcatgctgatggcgataagtcattaccacagatgagtaatctggagtgaagtatttttaagagcactaacttgacagaaagaatttactttcaggttttcttacctaaagggagcaaagagaagagcaaaccaatgttcttttgccaccgatggagcattggaaaggccatagactttgccgcttctctagccaggcttaaaaatgacaataacaaatttacagctaagaaattaaggctgtgtcacattacttcaggagaagccttacccttggatcatactttggaaacctggattgctaaggaggattgtcctttatataatggtggaaatataatcttggaatatcttaatgatgaagaacaattctgtaaaaatgttgaatcttacttggaatagtcattcaaagattcaagtcagaaatcacagggaaaattctattacatgtttaagtccatttattttactacaaatactatttttgtaatttttaaaagttgctttttaacttatttccccttatgtcacattttaaattatgagttttctattagagttttttggttttaagtttaattgtgtacggatcctcaattattagcaaattcttatatttaattagctttcattagtttatgctgtagtgacaacaacaaagatgtatttcctggtgggggatgtcagctgttgattggctgtgacactgctttgtgtcatcttcttaccatgatcaaaggcgaaggaagggatctcttttgggacattgtgattgttttagcagagagagaaagagatgaaatacacttcggttttctcttaaaagatgcatgtatcatacgtgctttaagcaagtcatgtggccaagcctagcatcatggagccagaaagtatagccttgctgtctgtctacatcatgatgtataaattgatatatctacatgaattatagaaacttagaagtgatctttattcagtcttataatttttacatgaagaatcttaggcctaggaggagaaaatgattttctttctattacctaactagattggggcatatttctgataaagacccacctctagtgagattcatcttttttgtttgtgtgactatattccatagagaagaaagatgggatagctcaacttcattatataccaaagcaaaacacatgccaaatgatgactacattttaccaacatatttagacgagtattcttgactagtgtttactatctatacccccaaaactactactatatagacagaatggaaagtatttctatttgtcctttttttgttttctgttctaattgtcagggacatatgtagtggctataggtttacttaaaaggaataaatttggaatgctca

SEQ ID NO: 423113 - DNA, 1799 bp, Homo sapiens
gggaccggggtacggtgcggagtgcccttcgtcctgggaaacggggcgccggagagatggcggagttggacatcgggcagcactgccaggtggagcattgccggcagcgagattttcttccatttgtgtgtgatgattgttcaggaatattttgccttgaacacagaagcagggagtctcatggttgtcctgaggtgactgtaatcaatgagagactgaagacagatcaacatacatcttacccatgctctttcaaagactgtgctgagagagaacttgtggcagttatatgtccttattgtgagaagaatttttgcctgagacaccgtcatcagtcagatcatgagtgtgaaaaactggaaatcccaaagcctcgaatggctgccactcagaaacttgttaaagacattattgattccaagacaggagaaacagcaagtaaacgatggaaaggtgccaaaaatagtgaaacagctgcaaaggttgcattgatgaaattaaagatgcatgctgatggcgataagtcattaccacagggagcaaagagaagagcaaaccaatgttcttttgccaccgatggagcattggaaaggccatagactttgccgcttctctagccaggcttaaaaatgacaataacaaatttacagctaagaaattaaggctgtgtcacattacttcaggagaagccttacccttggatcatactttggaaacctggattgctaaggaggattgtcctttatataatggtggaaatataatcttggaatatcttaatgatgaagaacaattctgtaaaaatgttgaatcttacttggaatagtcattcaaagattcaagtcagaaatcacagggaaaattctattacatgtttaagtccatttattttactacaaatactatttttgtaatttttaaaagttgctttttaacttatttccccttatgtcacattttaaattatgagttttctattagagttttttggttttaagtttaattgtgtacggatcctcaattattagcaaattcttatatttaattagctttcattagtttatgctgtagtgacaacaacaaagatgtatttcctggtgggggatgtcagctgttgattggctgtgacactgctttgtgtcatcttcttaccatgatcaaaggcgaaggaagggatctcttttgggacattgtgattgttttagcagagagagaaagagatgaaatacacttcggttttctcttaaaagatgcatgtatcatacgtgctttaagcaagtcatgtggccaagcctagcatcatggagccagaaagtatagccttgctgtctgtctacatcatgatgtataaattgatatatctacatgaattatagaaacttagaagtgatctttattcagtcttataatttttacatgaagaatcttaggcctaggaggagaaaatgattttctttctattacctaactagattggggcatatttctgataaagacccacctctagtgagattcatcttttttgtttgtgtgactatattccatagagaagaaagatgggatagctcaacttcattatataccaaagcaaaacacatgccaaatgatgactacattttaccaacatatttagacgagtattcttgactagtgtttactatctatacccccaaaactactactatatagacagaatggaaagtatttctatttgtcctttttttgttttctgttctaattgtcagggacatatgtagtggctataggtttacttaaaaggaataaatttggaatgctca

SEQ ID NO: 423114 - DNA, 1493 bp, Homo sapiens
tgtgctgactctgaggatcccagttaggcgcgtctgcgtgtgtttttggctactgtgattggtattccaagtagcagataccttgttagaaggtaattctgctctgaccagaagagaggaacggttggcaccagacaaaaactgatgtctattttgtctatgtaatggttgttttaactttttctttttacagacagaaagaatttactttcaggttttcttacctaaagggagcaaagagaagagcaaaccaatgttcttttgccaccgatggagcattggaaaggccatagactttgccgcttctctagccaggcttaaaaatgacaataacaaatttacagctaagaaattaaggctgtgtcacattacttcaggagaagccttacccttggatcatactttggaaacctggattgctaaggaggattgtcctttatataatggtggaaatataatcttggaatatcttaatgatgaagaacaattctgtaaaaatgttgaatcttacttggaatagtcattcaaagattcaagtcagaaatcacagggaaaattctattacatgtttaagtccatttattttactacaaatactatttttgtaatttttaaaagttgctttttaacttatttccccttatgtcacattttaaattatgagttttctattagagttttttggttttaagtttaattgtgtacggatcctcaattattagcaaattcttatatttaattagctttcattagtttatgctgtagtgacaacaacaaagatgtatttcctggtgggggatgtcagctgttgattggctgtgacactgctttgtgtcatcttcttaccatgatcaaaggcgaaggaagggatctcttttgggacattgtgattgttttagcagagagagaaagagatgaaatacacttcggttttctcttaaaagatgcatgtatcatacgtgctttaagcaagtcatgtggccaagcctagcatcatggagccagaaagtatagccttgctgtctgtctacatcatgatgtataaattgatatatctacatgaattatagaaacttagaagtgatctttattcagtcttataatttttacatgaagaatcttaggcctaggaggagaaaatgattttctttctattacctaactagattggggcatatttctgataaagacccacctctagtgagattcatcttttttgtttgtgtgactatattccatagagaagaaagatgggatagctcaacttcattatataccaaagcaaaacacatgccaaatgatgactacattttaccaacatatttagacgagtattcttgactagtgtttactatctatacccccaaaactactactatatagacagaatggaaagtatttctatttgtcctttttttgttttctgttctaattgtcagggacatatgtagtggctataggtttacttaaaaggaataaatttggaatgctca

SEQ ID NO: 423115 - DNA, 1105 bp, Homo sapiens
gggaccggggtacggtgcggagtgcccttcgtcctgggaaacggggcgccggagagatggcggagttggacatcgggcagcactgccaggtggagcattgccggcagcgagattttcttccatttgtgtgtgatgattgttcaggaatattttggtgactgtaatcaatgagagactgaagacagatcaacatacatcttacccatgctctttcaaagactgtgctgagagagaacttgtggcagttatatgtccttattgtgagaagaatttttgcctgagacaccgtcatcagtcagatcatgagtgtgaaaaactggaaatcccaaagcctcgaatggctgccactcagaaacttgttaaagacattattggtaagtatctagaaagcgtgttttgttgctttcctagttccagagctcctgcttcttatatctactttccaattatgggaggcatcattaataaccccagtggtattcgtattaacttgtattttgatgatattcttgtgacagtatttcttatgaggtctacctgaccgatggaaatttggaaattatttggaggtactccactgtaagtacttatctcttttgctgagccacttagattagctagttaaccattgggctagaaatggtattcatgagattgaagtagtcagctgctttctctacagattaaactctaagcctagtcagctgttctgtgaatgctgctgataataagagataccaggaatgaatgtatctgtgacttaaatcagtctgcctgccagtatgttagctcagaatttttattccatattaaggatagtacctttattacaatcttgcataaccaaatcttaaggttgtctgtagaagcattaatgactgctttaggttaaataggcttaagttgaaaagaagcacattatagtggattttttgatgtggagattgcctagatcaatctcaatgatatttttccattgacaatgtaaatacaatacctatacaatgaatgtggtctctgtatatctctcttgtgtgtaatttatatatgtttctgagccataattaataagtgtattataataaaattctatttgtaatgtgaa

SEQ ID NO: 423116 - DNA, 539 bp, Homo sapiens
gagaagagcaaaccaatgttcttttgccaccgatggagcattggaaaggccatagactttgccgcttctctagccaggcttaaaaatgacaataacaaatttacagctaaggtaacatctcattataataatatttctatattaataaaggttttatgatgctccattcaagcatgtttatttattacagtatgacttacttctcccttcacagaaattaaggctgtgtcacattacttcaggagaagccttacccttggatcatactttggaaacctggattgctaaggaggattgtcctttatataatggtggaaatataatcttggaatatcttaatgatgaagaacaattctgtaaaaatgttgaatcttacttggaatagtcattcaaagattcaagtcagaaatcacagggaaaattctattacatgtttaagtccatttattttactacaaatactatttttgtaatttttaaaagttgctttttaacttatttccccttatgtcacattttaaattatgagttttctatta

SEQ ID NO: 423117 - DNA, 1010 bp, Homo sapiens
tgtctacatcatgatgtatacagacagcaaggctatactttctggctccatgatgctagccttgctgtctgtctacatcatgatgtataaattgatatatctacatgaattatagaaacttagaagtgatctttattcagtcttataatttttacatgaagaatcttaggcctaggaggagaaaatgattttctttctattacctaactagattggggcatatttctgataaagacccacctctagtgagattcatcttttttgtttgtgtgactatattccatagagaagaaagatgggatagctcaacttcattatataccaaagcaaaacacatgccaaatgatgactacattttaccaacatatttagacgagtattcttgactagtgtttactatctatacccccaaaactactactatatagacagaatggaaagtatttctatttgtcctttttttgttttctgttctaattgtcagggacatatgtagtggctataggtttacttaaaaggaataaatttggaatgctcaaaaaaaaaaaaaacaccaaacacaaacgacccgaaacaagatcaatacgacacaacaacaaagcacaaacgctgcaccacagacaacaaaacaacgcaggctccacacacacacttattcatcacacacgcgccgctgccaaaaaaccacaaagagacgacccgcacacaagacagaaacaacgacacagcaaggacgcatcgaagtacacaaacgaccaggacgagcgagacaaaacaagagcggaagaagaaagacgcaaggcaatcgagacaaacaccggccgcaacacaagcaacgccacaaatccacacgaacggccaaacatacgctggcgaggtacaaccccaaccagagccgacaccaaacactcgcccgacaggcagggacggagcgcgagccacacaacgcagccgaccccggccgcaaggaaccgcacaccagcgagagacgaacgagagagcggagcaga

SEQ ID NO: 423118 - DNA, 1836 bp, Homo sapiens
gggaccggggtacggtgcggagtgcccttcgtcctgggaaacggggcgccggagagatggcggagttggacatcgggcagcactgccaggtggagcattgccggcagcgagattttcttccatttgtgtgtgatgattgttcaggaatattttgccttgaacacagaagcagggagtctcatggttgtcctgaggtgactgtaatcaatgagagactgaagacagatcaacatacatcttacccatgctctttcaaagactgtgctgagagagaacttgtggcagttatatgtccttattgtgagaagaatttttgcctgagacaccgtcatcagtcagatcatgagtgtgaaaaactggaaatcccaaagcctcgaatggctgccactcagaaacttgttaaagacattattgattccaagacaggagaaacagcaagtaaacgatggaaaggtgccaaaaatagtgaaacagctgcaaaggttgcattgatgaaattaaagatgcatgctgatggcgataagtcattaccacagacagaaagaatttactttcaggttttcttacctaaagggagcaaagagaagagcaaaccaatgttcttttgccaccgatggagcattggaaaggccatagactttgccgcttctctagccaggcttaaaaatgacaataacaaatttacagctaagaaattaaggctgtgtcacattacttcaggagaagccttacccttggatcatactttggaaacctggattgctaaggaggattgtcctttatataatggtggaaatataatcttggaatatcttaatgatgaagaacaattctgtaaaaatgttgaatcttacttggaatagtcattcaaagattcaagtcagaaatcacagggaaaattctattacatgtttaagtccatttattttactacaaatactatttttgtaatttttaaaagttgctttttaacttatttccccttatgtcacattttaaattatgagttttctattagagttttttggttttaagtttaattgtgtacggatcctcaattattagcaaattcttatatttaattagctttcattagtttatgctgtagtgacaacaacaaagatgtatttcctggtgggggatgtcagctgttgattggctgtgacactgctttgtgtcatcttcttaccatgatcaaaggcgaaggaagggatctcttttgggacattgtgattgttttagcagagagagaaagagatgaaatacacttcggttttctcttaaaagatgcatgtatcatacgtgctttaagcaagtcatgtggccaagcctagcatcatggagccagaaagtatagccttgctgtctgtctacatcatgatgtataaattgatatatctacatgaattatagaaacttagaagtgatctttattcagtcttataatttttacatgaagaatcttaggcctaggaggagaaaatgattttctttctattacctaactagattggggcatatttctgataaagacccacctctagtgagattcatcttttttgtttgtgtgactatattccatagagaagaaagatgggatagctcaacttcattatataccaaagcaaaacacatgccaaatgatgactacattttaccaacatatttagacgagtattcttgactagtgtttactatctatacccccaaaactactactatatagacagaatggaaagtatttctatttgtcctttttttgttttctgttctaattgtcagggacatatgtagtggctataggtttacttaaaaggaataaatttggaatgctca

SEQ ID NO: 423119 - DNA, 1774 bp, Homo sapiens
gggaccggggtacggtgcggagtgcccttcgtcctgggaaacggggcgccggagagatggcggagttggacatcgggcagcactgccagattttcttccatttgtgtgtgatgattgttcaggaatattttggtgactgtaatcaatgagagactgaagacagatcaacatacatcttacccatgctctttcaaagactgtgctgagagagaacttgtggcagttatatgtccttattgtgagaagaatttttgcctgagacaccgtcatcagtcagatcatgagtgtgaaaaactggaaatcccaaagcctcgaatggctgccactcagaaacttgttaaagacattattgattccaagacaggagaaacagcaagtaaacgatggaaaggtgccaaaaatagtgaaacagctgcaaaggttgcattgatgaaattaaagatgcatgctgatggcgataagtcattaccacagacagaaagaatttactttcaggttttcttacctaaagggagcaaagagaagagcaaaccaatgttcttttgccaccgatggagcattggaaaggccatagactttgccgcttctctagccaggcttaaaaatgacaataacaaatttacagctaagaaattaaggctgtgtcacattacttcaggagaagccttacccttggatcatactttggaaacctggattgctaaggaggattgtcctttatataatggtggaaatataatcttggaatatcttaatgatgaagaacaattctgtaaaaatgttgaatcttacttggaatagtcattcaaagattcaagtcagaaatcacagggaaaattctattacatgtttaagtccatttattttactacaaatactatttttgtaatttttaaaagttgctttttaacttatttccccttatgtcacattttaaattatgagttttctattagagttttttggttttaagtttaattgtgtacggatcctcaattattagcaaattcttatatttaattagctttcattagtttatgctgtagtgacaacaacaaagatgtatttcctggtgggggatgtcagctgttgattggctgtgacactgctttgtgtcatcttcttaccatgatcaaaggcgaaggaagggatctcttttgggacattgtgattgttttagcagagagagaaagagatgaaatacacttcggttttctcttaaaagatgcatgtatcatacgtgctttaagcaagtcatgtggccaagcctagcatcatggagccagaaagtatagccttgctgtctgtctacatcatgatgtataaattgatatatctacatgaattatagaaacttagaagtgatctttattcagtcttataatttttacatgaagaatcttaggcctaggaggagaaaatgattttctttctattacctaactagattggggcatatttctgataaagacccacctctagtgagattcatcttttttgtttgtgtgactatattccatagagaagaaagatgggatagctcaacttcattatataccaaagcaaaacacatgccaaatgatgactacattttaccaacatatttagacgagtattcttgactagtgtttactatctatacccccaaaactactactatatagacagaatggaaagtatttctatttgtcctttttttgttttctgttctaattgtcagggacatatgtagtggctataggtttacttaaaaggaataaatttggaatgctca

SEQ ID NO: 423120 - DNA, 1814 bp, Homo sapiens
gggaccggggtacggtgcggagtgcccttcgtcctgggaaacggggcgccggagagatggcggagttggacatcgggcagcactgccagattttcttccatttgtgtgtgatgattgttcaggaatattttgccttgaacacagaagcagggagtctcatggttgtcctgaggtgactgtaatcaatgagagactgaagacagatcaacatacatcttacccatgctctttcaaagactgtgctgagagagaacttgtggcagttatatgtccttattgtgagaagaatttttgcctgagacaccgtcatcagtcagatcatgagtgtgaaaaactggaaatcccaaagcctcgaatggctgccactcagaaacttgttaaagacattattgattccaagacaggagaaacagcaagtaaacgatggaaaggtgccaaaaatagtgaaacagctgcaaaggttgcattgatgaaattaaagatgcatgctgatggcgataagtcattaccacagacagaaagaatttactttcaggttttcttacctaaagggagcaaagagaagagcaaaccaatgttcttttgccaccgatggagcattggaaaggccatagactttgccgcttctctagccaggcttaaaaatgacaataacaaatttacagctaagaaattaaggctgtgtcacattacttcaggagaagccttacccttggatcatactttggaaacctggattgctaaggaggattgtcctttatataatggtggaaatataatcttggaatatcttaatgatgaagaacaattctgtaaaaatgttgaatcttacttggaatagtcattcaaagattcaagtcagaaatcacagggaaaattctattacatgtttaagtccatttattttactacaaatactatttttgtaatttttaaaagttgctttttaacttatttccccttatgtcacattttaaattatgagttttctattagagttttttggttttaagtttaattgtgtacggatcctcaattattagcaaattcttatatttaattagctttcattagtttatgctgtagtgacaacaacaaagatgtatttcctggtgggggatgtcagctgttgattggctgtgacactgctttgtgtcatcttcttaccatgatcaaaggcgaaggaagggatctcttttgggacattgtgattgttttagcagagagagaaagagatgaaatacacttcggttttctcttaaaagatgcatgtatcatacgtgctttaagcaagtcatgtggccaagcctagcatcatggagccagaaagtatagccttgctgtctgtctacatcatgatgtataaattgatatatctacatgaattatagaaacttagaagtgatctttattcagtcttataatttttacatgaagaatcttaggcctaggaggagaaaatgattttctttctattacctaactagattggggcatatttctgataaagacccacctctagtgagattcatcttttttgtttgtgtgactatattccatagagaagaaagatgggatagctcaacttcattatataccaaagcaaaacacatgccaaatgatgactacattttaccaacatatttagacgagtattcttgactagtgtttactatctatacccccaaaactactactatatagacagaatggaaagtatttctatttgtcctttttttgttttctgttctaattgtcagggacatatgtagtggctataggtttacttaaaaggaataaatttggaatgctca

SEQ ID NO: 423121 - DNA, 1937 bp, Homo sapiens
ggagttgagcgagagcagagaaaagttgaaaagaccgacaaagactgtgggaagttggcttttatccacactagggacggtcccaggaacgaggaactagtttgtgaatggctcaaagaaaagcaaaccgatgtccagggtcttgtgcaggatctgaaagtattttcttccatttgtgtgtgatgattgttcaggaatattttggtgactgtaatcaatgagagactgaagacagatcaacatacatcttacccatgctctttcaaagactgtgctgagagagaacttgtggcagttatatgtccttattgtgagaagaatttttgcctgaggtgattgatcacttaggctgttcacactttgtatatctgtttaagtgctatacaaacacatgaactagtgtcactcttctgttgctcatagacaccgtcatcagtcagatcatgagtgtgaaaaactggaaatcccaaagcctcgaatggctgccactcagaaacttgttaaagacattattgattccaagacaggagaaacagcaagtaaacgatggaaaggtgccaaaaatagtgaaacagctgcaaaggttgcattgatgaaattaaagatgcatgctgatggcgataagtcattaccacagacagaaagaatttactttcaggttttcttacctaaagggagcaaagagaagagcaaaccaatgttcttttgccaccgatggagcattggaaaggccatagactttgccgcttctctagccaggcttaaaaatgacaataacaaatttacagctaagaaattaaggctgtgtcacattacttcaggagaagccttacccttggatcatactttggaaacctggattgctaaggaggattgtcctttatataatggtggaaatataatcttggaatatcttaatgatgaagaacaattctgtaaaaatgttgaatcttacttggaatagtcattcaaagattcaagtcagaaatcacagggaaaattctattacatgtttaagtccatttattttactacaaatactatttttgtaatttttaaaagttgctttttaacttatttccccttatgtcacattttaaattatgagttttctattagagttttttggttttaagtttaattgtgtacggatcctcaattattagcaaattcttatatttaattagctttcattagtttatgctgtagtgacaacaacaaagatgtatttcctggtgggggatgtcagctgttgattggctgtgacactgctttgtgtcatcttcttaccatgatcaaaggcgaaggaagggatctcttttgggacattgtgattgttttagcagagagagaaagagatgaaatacacttcggttttctcttaaaagatgcatgtatcatacgtgctttaagcaagtcatgtggccaagcctagcatcatggagccagaaagtatagccttgctgtctgtctacatcatgatgtataaattgatatatctacatgaattatagaaacttagaagtgatctttattcagtcttataatttttacatgaagaatcttaggcctaggaggagaaaatgattttctttctattacctaactagattggggcatatttctgataaagacccacctctagtgagattcatcttttttgtttgtgtgactatattccatagagaagaaagatgggatagctcaacttcattatataccaaagcaaaacacatgccaaatgatgactacattttaccaacatatttagacgagtattcttgactagtgtttactatctatacccccaaaactactactatatagacagaatggaaagtatttctatttgtcctttttttgttttctgttctaattgtcagggacatatgtagtggctataggtttacttaaaaggaataaatttggaatgctca

SEQ ID NO: 423122 - DNA, 2308 bp, Homo sapiens
gggaccggggtacggtgcggagtgcccttcgtcctgggaaacggggcgccggagagatggcggagttggacatcgggcagcactgccaggtggagcattgccggcagcgagattttcttccatttgtgtgtgatgattgttcaggaatattttgccttgaacacagaagcagggagtctcatggttgtcctgaggtgactgtaatcaatgagagactgaagacagatcaacatacatcttacccatgctctttcaaagactgtgctgagagagaacttgtggcagttatatgtccttattgtgagaagaatttttgcctgagacaccgtcatcagtcagatcatgagtgtgaaaaactggaaatcccaaagcctcgaatggctgccactcagaaacttgttaaagacattattgattccaagacaggagaaacagcaagtaaacgatggaaaggtgccaaaaatagtgaaacagctgcaaaggttgcattgatgaaattaaagatgcatgctgatggcgataagtcattaccacagacagaaagaatttactttcaggttttcttacctaaagggagcaaagagaagagcaaaccaatgttcttttgccaccgatggagcattggaaaggccatagactttgccgcttctctagccaggcttaaaaatgacaataacaaatttacagctaagaaattaaggctgtgtcacattacttcaggagaagccttacccttggatcatactttggaaacctggattgctaaggaggattgtcctttatataatggtggaaatataatcttggaatatcttaatgatgaagaacaattctgtaaaaatgttgaatcttacttggaatagtcattcaaagattcaagtcagaaatcacagggaaaattctattacatgtttaagtccatttattttactacaaatactatttttgtaatttttaaaagttgctttttaacttatttccccttatgtcacattttaaattatgagttttctattagagttttttggttttaagtttaattgtgtacggatcctcaattattagcaaattcttatatttaattagctttcattagtttatgctgtagtgacaacaacaaagatgtatttcctggtgggggatgtcagctgttgattggctgtgacactgctttgtgtcatcttcttaccatgatcaaaggcgaaggaagggatctcttttgggacattgtgattgttttagcagagagagaaagagatgaaatacacttcggttttctcttaaaagatgcatgtatcatacgtgctttaagcaagtcatgtggccaagcctagcatcatggagccagaaagtatagccttgctgtctgtctacatcatgatgtataaattgatatatctacatgaattatagaaacttagaagtgatctttattcagtcttataatttttacatgaagaatcttaggcctaggaggagaaaatgattttctttctattacctaactagattggggcatatttctgataaagacccacctctagtgagattcatcttttttgtttgtgtgactatattccatagagaagaaagatgggatagctcaacttcattatataccaaagcaaaacacatgccaaatgatgactacattttaccaacatatttagacgagtattcttgactagtgtttactatctatacccccaaaactactactatatagacagaatggaaagtatttctatttgtcctttttttgttttctgttctaattgtcagggacatatgtagtggctataggtttacttaaaaggaataaatttggaatgctcaaaaaaaaaaaaaacaccaaacacaaacgacccgaaacaagatcaatacgacacaacaacaaagcacaaacgctgcaccacagacaacaaaacaacgcaggctccacacacacacttattcatcacacacgcgccgctgccaaaaaaccacaaagagacgacccgcacacaagacagaaacaacgacacagcaaggacgcatcgaagtacacaaacgaccaggacgagcgagacaaaacaagagcggaagaagaaagacgcaaggcaatcgagacaaacaccggccgcaacacaagcaacgccacaaatccacacgaacggccaaacatacgctggcgaggtacaaccccaaccagagccgacaccaaacactcgcccgacaggcagggacggagcgcgagccacacaacgcagccgaccccggccgcaaggaaccgcacaccagcgagagacgaacgagagagcggagcaga

SEQ ID NO: 423123 - DNA, 1145 bp, Homo sapiens
gggaccggggtacggtgcggagtgcccttcgtcctgggaaacggggcgccggagagatggcggagttggacatcgggcagcactgccaggtggagcattgccggcagcgagattttcttccatttgtgtgtgatgattgttcaggaatattttgccttgaacacagaagcagggagtctcatggttgtcctgaggtgactgtaatcaatgagagactgaagacagatcaacatacatcttacccatgctctttcaaagactgtgctgagagagaacttgtggcagttatatgtccttattgtgagaagaatttttgcctgagacaccgtcatcagtcagatcatgagtgtgaaaaactggaaatcccaaagcctcgaatggctgccactcagaaacttgttaaagacattattggtaagtatctagaaagcgtgttttgttgctttcctagttccagagctcctgcttcttatatctactttccaattatgggaggcatcattaataaccccagtggtattcgtattaacttgtattttgatgatattcttgtgacagtatttcttatgaggtctacctgaccgatggaaatttggaaattatttggaggtactccactgtaagtacttatctcttttgctgagccacttagattagctagttaaccattgggctagaaatggtattcatgagattgaagtagtcagctgctttctctacagattaaactctaagcctagtcagctgttctgtgaatgctgctgataataagagataccaggaatgaatgtatctgtgacttaaatcagtctgcctgccagtatgttagctcagaatttttattccatattaaggatagtacctttattacaatcttgcataaccaaatcttaaggttgtctgtagaagcattaatgactgctttaggttaaataggcttaagttgaaaagaagcacattatagtggattttttgatgtggagattgcctagatcaatctcaatgatatttttccattgacaatgtaaatacaatacctatacaatgaatgtggtctctgtatatctctcttgtgtgtaatttatatatgtttctgagccataattaataagtgtattataataaaattctatttgtaatgtgaa

SEQ ID NO: 423124 - DNA, 1159 bp, Homo sapiens
attctctccccagcttgctgagccctttgctcccctggcgactgcctggacagtcagcaaggaattgtctcccagtgcattttgccctcctggctgccaactctggctgctaaagcggctgccacctgctgcagtctacacagcttcgggaagaggaaaggaacctcagaccttccagatcgcttcctctcgcaacaaactatttgtcgcaggaataaagatggctgctgaaccagtagaagacaattgcatcaactttgtggcaatgaaatttattgacaatacgctttactttatagctgaagatgatgaaaacctggaatcagattactttggcaagcttgaatctaaattatcagtcataagaaatttgaatgaccaagttctcttcattgaccaaggaaatcggcctctatttgaagatatgactgattctgactgtagagataatgcaccccggaccatatttattataagtatgtataaagatagccagcctagaggtatggctgtaactatctctgtgaagtgtgagaaaatttcaactctctcctgtgagaacaaaattatttcctttaaggaaatgaatcctcctgataacatcaaggatacaaaaagtgacatcatattctttcagagaagtgtcccaggacatgataataagatgcaatttgaatcttcatcatacgaaggatactttctagcttgtgaaaaagagagagacctttttaaactcattttgaaaaaagaggatgaattgggggatagatctataatgttcactgttcaaaacgaagactagctattaaaatttcatgccgggcgcagtggctcacgcctgtaatcccagccctttgggaggctgaggcgggcagatcaccagaggtcaggtgttcaagaccagcctgaccaacatggtgaaacctcatctctactaaaaatacaaaaaattagctgagtgtagtgacccatgccctcaatcccagctactcaagaggctgaggcaggagaatcacttgcactccggaggtggaggttgtggtgagccgagattgcaccattgcgctctagcctgggcaacaacagcaaaactccatctcaaaaaataaaataaataaataaacaaataaaaaattcataatgtgaactgtctgaattt

SEQ ID NO: 423125 - DNA, 1235 bp, Homo sapiens
attctctccccagcttgctgagccctttgctcccctggcgactgcctggacagtcagcaaggaattgtctcccagtgcattttgccctcctggctgccaactctggctgctaaagcggctgccacctgctgcagtctacacagcttcgggaagaggaaaggaacctcagaccttccagatcgcttcctctcgcaacaaactatttgtcgcaggaataaagatggctgctgaaccagtagaagacaattgcatcaactttgtggcaatgaaatttattgacaatacgctttactttatagctgaagatgatggataaaacccaggaggtagaattgctgggttgatagaagagaaaggatgattggcaaattaaagcttcagtagaggaaaacctggaatcagattactttggcaagcttgaatctaaattatcagtcataagaaatttgaatgaccaagttctcttcattgaccaaggaaatcggcctctatttgaagatatgactgattctgactgtagagataatgcaccccggaccatatttattataagtatgtataaagatagccagcctagaggtatggctgtaactatctctgtgaagtgtgagaaaatttcaactctctcctgtgagaacaaaattatttcctttaaggaaatgaatcctcctgataacatcaaggatacaaaaagtgacatcatattctttcagagaagtgtcccaggacatgataataagatgcaatttgaatcttcatcatacgaaggatactttctagcttgtgaaaaagagagagacctttttaaactcattttgaaaaaagaggatgaattgggggatagatctataatgttcactgttcaaaacgaagactagctattaaaatttcatgccgggcgcagtggctcacgcctgtaatcccagccctttgggaggctgaggcgggcagatcaccagaggtcaggtgttcaagaccagcctgaccaacatggtgaaacctcatctctactaaaaatacaaaaaattagctgagtgtagtgacccatgccctcaatcccagctactcaagaggctgaggcaggagaatcacttgcactccggaggtggaggttgtggtgagccgagattgcaccattgcgctctagcctgggcaacaacagcaaaactccatctcaaaaaataaaataaataaataaacaaataaaaaattcataatgtgaactgtctgaattt

SEQ ID NO: 423126 - DNA, 2025 bp, Homo sapiens
attctctccccagcttgctgagccctttgctcccctggcgactgcctggacagtcagcaaggaattgtctcccagtgcattttgccctcctggctgccaactctggctgctaaagcggctgccacctgctgcagtctacacagcttcgggaagaggaaaggaacctcagaccttccagatcgcttcctctcgcaacaaactatttgtcgcaggaataaagatggctgctgaaccagtagaagacaattgcatcaactttgtggcaatgaaatttattgacaatacgctttactttatagctgaagatgatggataaaacccaggaggtagaattgctgggttgatagaagagaaaggatgattggcaaattaaagcttcagtagagggtacatgccgagcacaaatgggatcagccctagataccagaaatggcactttctcatttccccttgggacaaaagggagagaggcaataactggtgctgccagagttaaatttgtacgtggagtagcaggaaatcatttgctgaaaatgaaaacagagatgatggtgtagaggtcctgaagagagcaaagaaaatttgaaattgcggctatcagctatggaagagagtgctgaactggaaaacaaaagaagtattgacaattggtatgcttgtaatggcaccgatttgaacgcttgtgccattgttcaccagcagcactcagcagccaagtttggagttttgtagcagaaagacaaataagttagggatttaatatcctggcaaaatggtagacaaaatgaactctgagatccagctgcacagggaaggaagggaagacgggaagaggttagataggaaatacaagagtcaggagactggaagatgttgtgaaatttaagaacacatagagttggagtaaaagtgtaagaaaactagaagggtaagagaccggtcagaaagtaggctatttgaagttaacacttcagaggcagagtagttctgaatggtaacaagaaattgagtgtgcctttgagagtaggttaaaaaacaataggcaactttattgtagctacttctggaacagaagattgtcattaatagttttagaaaactaaaatatatagcatacttatttgtcaattaacaaagaaactatgtatttttaaatgagatttaatgtttattgtagaaaacctggaatcagattactttggcaagcttgaatctaaattatcagtcataagaaatttgaatgaccaagttctcttcattgaccaaggaaatcggcctctatttgaagatatgactgattctgactgtagagataatgcaccccggaccatatttattataagtatgtataaagatagccagcctagaggtatggctgtaactatctctgtgaagtgtgagaaaatttcaactctctcctgtgagaacaaaattatttcctttaaggaaatgaatcctcctgataacatcaaggatacaaaaagtgacatcatattctttcagagaagtgtcccaggacatgataataagatgcaatttgaatcttcatcatacgaaggatactttctagcttgtgaaaaagagagagacctttttaaactcattttgaaaaaagaggatgaattgggggatagatctataatgttcactgttcaaaacgaagactagctattaaaatttcatgccgggcgcagtggctcacgcctgtaatcccagccctttgggaggctgaggcgggcagatcaccagaggtcaggtgttcaagaccagcctgaccaacatggtgaaacctcatctctactaaaaatacaaaaaattagctgagtgtagtgacccatgccctcaatcccagctactcaagaggctgaggcaggagaatcacttgcactccggaggtggaggttgtggtgagccgagattgcaccattgcgctctagcctgggcaacaacagcaaaactccatctcaaaaaataaaataaataaataaacaaataaaaaattcataatgtgaactgtctgaattt

SEQ ID NO: 423127 - DNA, 1270 bp, Homo sapiens
attctctccccagcttgctgagccctttgctcccctggcgactgcctggacagtcagcaaggaattgtctcccagtgcattttgccctcctggctgccaactctggctgctaaagcggctgccacctgctgcagtctacacagcttcgggaagaggaaaggaacctcagaccttccagatcgcttcctctcgcaacaaactatttgtcgcaggaataaagatggctgctgaaccagtagaagacaattgcatcaactttgtggcaatgaaatttattgacaatacgctttactttatagctgaagatgatgctgaagatgatggtaaagtagaaatgaatttatttttctttgcaaactaagtatctgcttgagacacatctatctcaccattgtcagctgaggaaaaaaaaaaatggttctcatgctaccaatctgccttcaaagaaatgtggactcagtagcacagctttggaatgaagatgatcataagagatacaaagaagaacctctagcaaaagatgcttctctatgccttaaaaaattctccagctcttagaatctacaaaatagactttgcctgtttcataggtcctaagattagcatgaagtcatggattctgttgtagggggagcgttgcataggaaaaagggattgaagcattagaattgtccaaaatcagtaacacctcctctcagaaatgctttgggaagaagcctggaaggttcccgggttggtggtggggtggggcagaaaattctggaagtagaggagataggaatgggtggggcaagaagaccacattcagaggccaaaagctgaaagaaaccatggcatttatgatgaattcagggtaattcagaatggaagtagagtaggagtaggagactggtgagagaagctagagtgataaacagggtgtagagcaagacgttctctcaccccaagatgtgaaatttggactttatcttggagataatagggttaattaagcacaatatgtattagctagggtaaagattagtttgttgtaacaaagacatccaaagatacagtagctgaataagatcacaccacctgagtcagaagcgggggaacataaacaagggggatgaggtacgccatggagaggagactcttttacctgtttaggaagtctctcatgcctagaagggaaagaaaaaagcacaagtatcaatatgaatcaaataagacttcaatgcatctgcgcccaacactgtagcagagatgggacatatcagtgaacaaa

SEQ ID NO: 423128 - DNA, 1180 bp, Homo sapiens
attctctccccagcttgctgagccctttgctcccctggcgactgcctggacagtcagcaaggaattgtctcccagtgcattttgccctcctggctgccaactctggctgctaaagcggctgccacctgctgcagtctacacagcttcgggaagaggaaaggaacctcagaccttccagatcgcttcctctcgcaacaaactatttgtcgcagatggctctttgctttcattaggaataaagatggctgctgaaccagtagaagacaattgcatcaactttgtggcaatgaaatttattgacaatacgctttactttatagctgaagatgatgaaaacctggaatcagattactttggcaagcttgaatctaaattatcagtcataagaaatttgaatgaccaagttctcttcattgaccaaggaaatcggcctctatttgaagatatgactgattctgactgtagagataatgcaccccggaccatatttattataagtatgtataaagatagccagcctagaggtatggctgtaactatctctgtgaagtgtgagaaaatttcaactctctcctgtgagaacaaaattatttcctttaaggaaatgaatcctcctgataacatcaaggatacaaaaagtgacatcatattctttcagagaagtgtcccaggacatgataataagatgcaatttgaatcttcatcatacgaaggatactttctagcttgtgaaaaagagagagacctttttaaactcattttgaaaaaagaggatgaattgggggatagatctataatgttcactgttcaaaacgaagactagctattaaaatttcatgccgggcgcagtggctcacgcctgtaatcccagccctttgggaggctgaggcgggcagatcaccagaggtcaggtgttcaagaccagcctgaccaacatggtgaaacctcatctctactaaaaatacaaaaaattagctgagtgtagtgacccatgccctcaatcccagctactcaagaggctgaggcaggagaatcacttgcactccggaggtggaggttgtggtgagccgagattgcaccattgcgctctagcctgggcaacaacagcaaaactccatctcaaaaaataaaataaataaataaacaaataaaaaattcataatgtgaactgtctgaattt

SEQ ID NO: 423129 - DNA, 2109 bp, Homo sapiens
attctctccccagcttgctgagccctttgctcccctggcgactgcctggacagtcagcaaggaattgtctcccagtgcattttgccctcctggctgccaactctggctgctaaagcggctgccacctgctgcagtctacacagcttcgggaagaggaaaggaacctcagaccttccagatcgcttcctctcgcaacaaactatttgtcgcaggaataaagatggctgctgaaccagtagaagacaattgcatcaactttgtggcaatgaaatttattgacaatacgctttactttatagctgaagatgatgctgaagatgatggtaaagtagaaatgaatttatttttctttgcaaactaagtatctgcttgagacacatctatctcaccattgtcagctgaggaaaaaaaaaaatggttctcatgctaccaatctgccttcaaagaaatgtggactcagtagcacagctttggaatgaagatgatcataagagatacaaagaagaacctctagcaaaagatgcttctctatgccttaaaaaattctccagctcttagaatctacaaaatagactttgcctgtttcataggtcctaagattagcatgaagtcatggattctgttgtagggggagcgttgcataggaaaaagggattgaagcattagaattgtccaaaatcagtaacacctcctctcagaaatgctttgggaagaagcctggaaggttcccgggttggtggtggggtggggcagaaaattctggaagtagaggagataggaatgggtggggcaagaagaccacattcagaggccaaaagctgaaagaaaccatggcatttatgatgaattcagggtaattcagaatggaagtagagtaggagtaggagactggtgagagaagctagagtgataaacagggtgtagagcaagacgttctctcaccccaagatgtgaaatttggactttatcttggagataatagggttaattaagcacaatatgtattagctagggtaaagattagtttgttgtaacaaagacatccaaagatacagtagctgaataagatagagaatttttctctcaaagaaagtctaagtaggcagctcagaagtagtatggctggaagcaacctgatgatattgggacccccaactttcttcagtcttgtacccatcatcccctagttgttgatctcactcacatagttgaaaatcatcatacttcctgggttcatatcccagttatcaagaaagggtcaagagaagtcaggctcattcctttcaaagactctaattggaagttaaacacatcaatccccctcatattccattgactagaatttaatcacatggccacaccaagtgcaaggaaatctggaaaatataatctttattccaggtagccatatgactctttaaaattcagaaataatatatttttaaaatatcattctggctttggtataaagaattgatggtgtggggtgaggaggacattaaggtagacataggggagtgctgatgaggagctgtgaatggattttagaaacacttgagagaatcaataggacatgatttagggttggatttggaaaggagaagaaagtagaaaagatgatgcctacatttttcacttaggcaatttgtaccattcagtgaaataggaaacacaggaggaagagcaggttttggtgtatacaaagaggaggatggatgacgcatttcgtttcggatctgagatgtctgtggaacgtcctagtggagatgtccaaaaactcttctacatgtggttctgagttcaggacaaagatttgggctggagatagagatattgaaggcttatgcatagaaatggcatttgaatctatagagataaaaagacaaatcagaggaaatgtgtaaagtgagagaggaaaagccaagtactgaactggggggaatacctacatttaaaggatgcagtagaaagaagctaataaacaacagagagcagactaaccaaaagggaagaagaaaaaccaagagaattccaccgactcccaggagagcatttcaagattgaggggataggtgttgtgttgaattttgcagccttgagaatcaaggg

SEQ ID NO: 423130 - DNA, 1159 bp, Homo sapiens
gcacatgtgtgcactaccatgcccagctagtttttaaattttttgtagagatgaggtctcactctgttgcccaggctggtcttgaactcctgagttcaagcgatcctcctgtcttttctcctaaagttctgggattaacaggcgcgagccaccgcacctggccaaaaagataggtttcaatatgtaatgaaatctttggtttattgctcaataagttctttttgtttttgttttttttttgagatggagtcttgctctgtcacccaggttggagtgcggtggtgtgatctcggctcactgcaacctctgcctcccaggatcaagcgattcttgtgcctcagcctctcaagtagctgggactacaggtgactcatttttctattgtcctgaccgccaaagattttaacccagagaagtatgctgccttcactaggatattgtgtagaggtctgtataaaaattgtattaaatgctaatatacaaaatgaagaccttagtatagttacatagcagatttctacactgagaaagcaaagttcagccttgtgtctccccagcataatctttagtagcccttcacagactgtaaagacggcctttctcttttgctctgttgatacttctcttatttgggtaaatgatctaggggaagagaaggagcagttttatagctattgtagctcctgggtgttttgaatcacttcctacttttgatctgttacttctgttcacttccagtctagaattcccttagtaggttggataagttaagggccttatgacatggtaaactggttcgtatgtgtcaaggtctgtgtgtacagtcattttggggaaagaattatgccgaagcacaataacacatttcttagctggaatgctgagaagctagggaattctgattaactggttagtcacgattcagctagactcttttagtttcatctccattgttgaaaaatttatctaaaatataccagtctattttcttttctttttctttttctttttcttttttttttttttttggagacagggtctcactctgttgctcagactgggagtgcagcggcttcatcatggctcactgcagtcttgacctcccaggactcaggtgatcctcccacctaagcctcccatgtagcaggactgcaggtgc

SEQ ID NO: 423131 - DNA, 727 bp, Homo sapiens
tggagacagagtctcgctctgttgcctaggcgggagtgcagtggcgtgatcttggctcactgcaacctctgcctgggcaacaagagcaaaactgtctcaaaaaaaaaaaaaaaaaaaaaaaagaaaaagaaaagaaacgatactgtaaaaatatagcattatcatcttatgggactaccattgtaaatgtggtccctggttgaccaaaacgtcattatgtggtgcatgactgtactcgtatggaaatatccatagcagtgttactcacagtagccaaaacgtggcagaagcaacccagtgtccttcagcagatgaatgggcaagcaaaatgtagtctttatatacagtagaatattactcagcttaaaaaggaatggaatgttttgaatgtggcttttgttgggggggagaaaaggaatagaattctgatacatgctatagcatggatgaaccttgaaaccatgctaatgaaataagccagacactaaagggtaaatgttgtatgattccacttatatgagctatctagagcagacaaattcacagagttagacggcagaatagaggttcccaggggctaagcgaggggaaatggggttattgtgtaatgggtagagtttctgtttgtgatggtgaaacgtgctggaaatagtggtgatggttgtgcaacgctgcaaatgtacttaatgccactgaattatacactcagaaaatgactaaaattgta

SEQ ID NO: 423132 - DNA, 2628 bp, Homo sapiens
ctggagacatttttgattgtcacaaatgatgggtgttgtgtttctggcatgggtagagggatgctactaaacatcctaccgtgcacaggatggccctccacaatggattctgtggccccaaatgttaatagtgccaaagttgagagaccctggggtagagacgtgtgatgggaaggaaagaaaattacctttagagctgcgcgccgcggcggcggaagatggctgcggccgaggtggcggacactcagctgatgcttggagtcgggctgatcgaaaaggacacaaatggagaagttctgtgggtgtggtgttatccttccacgacagccacattaaggaacctgctgctgagaaaatgctgccttacagatgaaaacaaacttctccatccctttgtctttggtcagtacagaagaacatggttttatatcacaacaattgaagttccagattcttccattttgaaaaaggtgactcatttttctattgtcctgaccgccaaagattttaacccagagaagtatgctgccttcactaggatattgtgtagaatgtacctgaaacatgggagcccagttaaaatgatggagagttatattgcagttctcacaaaggggatatgccagagtgaagaaaacggctctttccttagtaaggattttgatgcccgaaaggcctacctggctggctccatcaaagacattgtatctcagtttggaatggaaactgttatcttacacacagcactgatgctaaagaaaagaattgtggtgtatcaccccaagatagaagcggtccaggagttcaccaggactctgcctgccctggtgtggcaccgacaggactggaccatccttcactcttacgtgcacctcaacgccgatgagctggaagccctgcagatgtgcacaggttacgtcgctggatttgtagacttggaggtgagcaacagaccagacctctatgatgtgtttgtgaatctggcagagagtgagattaccattgctccccttgcaaaagaggccatggcaatgggcaaactgcacaaagaaatgggtcagctaattgttcagtctgcagaagatccagagaaatcagagagccacgttatacaggatattgctctaaaaacaagagaaatctttaccaacctagcaccattttcagaagtttcggctgatggagaaaagagagtccttaatttggaggcgctaaagcaaaaacgatttccaccagcaacagaaaacttcctttatcatctagcagcagccgaacaaatgctgaaaatctgactgtgtgacagaacgtatcactgatgactgatagaaagccctctttcactctgattacccactcactacatgaagtcctgaaaataacagagaaactgttatatctttttaatgatttatttgcaagtattgagatttgacctgaaaaacaatgaaacacatgaacacacttccgattttctcctcgctgattagcttcctgcctgctgtcagtgctggacgaagtgctataactactttatgtaacattacagaacagctagaggtcctggggtaagagaaaaaaagcacatcacaacaaatgtgaaagccttcattattacacgttccagtttgtctcgctgtgtaggcataagctaatggtttattttcagaaagctgcctgaaacgttgctttgtattcttctaggaagaactttaattcctcctgaggaactctactttctgagccaaactgctaattttctgcggaactgtctagaagatcattcaagagaccctgcagttgcactttctcgtaaaagttaaaaaaaaaaaaaaaaaaaaaaggtttttcccggcctttgaacattttgcctatgagagttttgcatatattttatacttgagtagacaactttaataatccatatttatactatcgcagaagtaagcatttggcaaacgttcagccattagcactcatttaaccctgttagcaatattcttttgaaaaaagtgccagtccttatgtgataaactaagaagcccattgaatataaaagtgtataggactgaaacagtgaccttatattattgctaagggaatatgagattaacttcctacaggggccaaaaccagagaaaggcttccagcaacttcgatgaaagtagtttggccacatgtcaagccaattgtttgtattatttatgtacctttttcataactggaattgccaaataagcatggagatctaaatgatgtacttgttagtgtattcattcatattgattgtaaaggattatttttcactcagtactgatgtccttggaaatcttacctggaaacatgtttgcaaaaaacattattgggtctttcatctttttcttggtattacatatttgttcaataaaaattaaacaccctcccttttttttgagtgagggcagggagtacctgaaataagacaatgtttactaaggcaaataattgaaaattaaatctgcactttatggaaatgagaaatattaacatcttttttctcatttttttgtattactatattagctaatgatcaaagttgttaaaattataaatttatgatgcagaaataaaattggtatattttgatattca

SEQ ID NO: 423133 - DNA, 2585 bp, Homo sapiens
  misc_feature (463)..(463): n is a, c, g, or t
  misc_feature (471)..(471): n is a, c, g, or t
agcttgtgcagtgcgtggcattgtagtatcctggatttcttctcccgtcacagtgcaagagaagtgaggactcggagctactgccagccgcctcctctgcttcctgccccttcatgcagcactatgctcactcttgcatgtatgcacatccaagtatttgcacacacacacacacacacacacacaggtctgtgtgtacatgcacacactcataggcaaagacttcttttcttcatgacagtttaacatggagttgcctccctccatttctggtgaggagcaggcaggcgtgccttccacacacagcttgctgctcacagtggcagcagaagcccgcaggagggaacctcattccctatgtggctgcaggttcactgctgtggtcctcttcagcctctagtcgcttgctgctagtggccctgctagagaaccggggtttcatgcacacttgcagtcagctgtncaggcctngatgtgtggcagcctatggatgtctatctgaacaagaatgtacctgaaacatgggagcccagttaaaatgatggagagttatattgcagttctcacaaaggggatatgccagagtgaagaaaacggctctttccttagtaaggattttgatgcccgaaaggcctacctggctggctccatcaaagacattgtatctcagtttggaatggaaactgttatcttacacacagcactgatgctaaagaaaagaattgtggtgtatcaccccaagatagaagcggtccaggagttcaccaggactctgcctgccctggtgtggcaccgacaggactggaccatccttcactcttacgtgcacctcaacgccgatgagctggaagccctgcagatgtgcacaggttacgtcgctggatttgtagacttggaggtgagcaacagaccagacctctatgatgtgtttgtgaatctggcagagagtgagattaccattgctccccttgcaaaagaggccatggcaatgggcaaactgcacaaagaaatgggtcagctaattgttcagtctgcagaagatccagagaaatcagagagccacgttatacaggatattgctctaaaaacaagagaaatctttaccaacctagcaccattttcagaagtttcggctgatggagaaaagagagtccttaatttggaggcgctaaagcaaaaacgatttccaccagcaacagaaaacttcctttatcatctagcagcagccgaacaaatgctgaaaatctgactgtgtgacagaacgtatcactgatgactgatagaaagccctctttcactctgattacccactcactacatgaagtcctgaaaataacagagaaactgttatatctttttaatgatttatttgcaagtattgagatttgacctgaaaaacaatgaaacacatgaacacacttccgattttctcctcgctgattagcttcctgcctgctgtcagtgctggacgaagtgctataactactttatgtaacattacagaacagctagaggtcctggggtaagagaaaaaaagcacatcacaacaaatgtgaaagccttcattattacacgttccagtttgtctcgctgtgtaggcataagctaatggtttattttcagaaagctgcctgaaacgttgctttgtattcttctaggaagaactttaattcctcctgaggaactctactttctgagccaaactgctaattttctgcggaactgtctagaagatcattcaagagaccctgcagttgcactttctcgtaaaagttaaaaaaaaaaaaaaaaaaaaaaggtttttcccggcctttgaacattttgcctatgagagttttgcatatattttatacttgagtagacaactttaataatccatatttatactatcgcagaagtaagcatttggcaaacgttcagccattagcactcatttaaccctgttagcaatattcttttgaaaaaagtgccagtccttatgtgataaactaagaagcccattgaatataaaagtgtataggactgaaacagtgaccttatattattgctaagggaatatgagattaacttcctacaggggccaaaaccagagaaaggcttccagcaacttcgatgaaagtagtttggccacatgtcaagccaattgtttgtattatttatgtacctttttcataactggaattgccaaataagcatggagatctaaatgatgtacttgttagtgtattcattcatattgattgtaaaggattatttttcactcagtactgatgtccttggaaatcttacctggaaacatgtttgcaaaaaacattattgggtctttcatctttttcttggtattacatatttgttcaataaaaattaaacaccctcccttttttttgagtgagggcagggagtacctgaaataagacaatgtttactaaggcaaataattgaaaattaaatctgcactttatggaaatgagaaatattaacatcttttttctcatttttttgtattactatattagctaatgatcaaagttgttaaaattataaatttatgatgcagaaataaaattggtatattttgatattca

SEQ ID NO: 423134 - DNA, 2648 bp, Homo sapiens
ctggagacatttttgattgtcacaaatgatgggtgttgtgtttctggcatgggtagagggatgctactaaacatcctaccgtgcacaggatggccctccacaatggattctgtggccccaaatgttaatagtgccaaagttgagagaccctggggtagagacgtgtgatgggaaggaaagaaaattacctttagagctgcgcgccgcggcggcggaagatggctgcggccgaggtggcggacactcagctgatgcttggagtcgggctgatcgtgaccatctttccaccgtagaaaaggacacaaatggagaagttctgtgggtgtggtgttatccttccacgacagccacattaaggaacctgctgctgagaaaatgctgccttacagatgaaaacaaacttctccatccctttgtctttggtcagtacagaagaacatggttttatatcacaacaattgaagttccagattcttccattttgaaaaaggtgactcatttttctattgtcctgaccgccaaagattttaacccagagaagtatgctgccttcactaggatattgtgtagaatgtacctgaaacatgggagcccagttaaaatgatggagagttatattgcagttctcacaaaggggatatgccagagtgaagaaaacggctctttccttagtaaggattttgatgcccgaaaggcctacctggctggctccatcaaagacattgtatctcagtttggaatggaaactgttatcttacacacagcactgatgctaaagaaaagaattgtggtgtatcaccccaagatagaagcggtccaggagttcaccaggactctgcctgccctggtgtggcaccgacaggactggaccatccttcactcttacgtgcacctcaacgccgatgagctggaagccctgcagatgtgcacaggttacgtcgctggatttgtagacttggaggtgagcaacagaccagacctctatgatgtgtttgtgaatctggcagagagtgagattaccattgctccccttgcaaaagaggccatggcaatgggcaaactgcacaaagaaatgggtcagctaattgttcagtctgcagaagatccagagaaatcagagagccacgttatacaggatattgctctaaaaacaagagaaatctttaccaacctagcaccattttcagaagtttcggctgatggagaaaagagagtccttaatttggaggcgctaaagcaaaaacgatttccaccagcaacagaaaacttcctttatcatctagcagcagccgaacaaatgctgaaaatctgactgtgtgacagaacgtatcactgatgactgatagaaagccctctttcactctgattacccactcactacatgaagtcctgaaaataacagagaaactgttatatctttttaatgatttatttgcaagtattgagatttgacctgaaaaacaatgaaacacatgaacacacttccgattttctcctcgctgattagcttcctgcctgctgtcagtgctggacgaagtgctataactactttatgtaacattacagaacagctagaggtcctggggtaagagaaaaaaagcacatcacaacaaatgtgaaagccttcattattacacgttccagtttgtctcgctgtgtaggcataagctaatggtttattttcagaaagctgcctgaaacgttgctttgtattcttctaggaagaactttaattcctcctgaggaactctactttctgagccaaactgctaattttctgcggaactgtctagaagatcattcaagagaccctgcagttgcactttctcgtaaaagttaaaaaaaaaaaaaaaaaaaaaaggtttttcccggcctttgaacattttgcctatgagagttttgcatatattttatacttgagtagacaactttaataatccatatttatactatcgcagaagtaagcatttggcaaacgttcagccattagcactcatttaaccctgttagcaatattcttttgaaaaaagtgccagtccttatgtgataaactaagaagcccattgaatataaaagtgtataggactgaaacagtgaccttatattattgctaagggaatatgagattaacttcctacaggggccaaaaccagagaaaggcttccagcaacttcgatgaaagtagtttggccacatgtcaagccaattgtttgtattatttatgtacctttttcataactggaattgccaaataagcatggagatctaaatgatgtacttgttagtgtattcattcatattgattgtaaaggattatttttcactcagtactgatgtccttggaaatcttacctggaaacatgtttgcaaaaaacattattgggtctttcatctttttcttggtattacatatttgttcaataaaaattaaacaccctcccttttttttgagtgagggcagggagtacctgaaataagacaatgtttactaaggcaaataattgaaaattaaatctgcactttatggaaatgagaaatattaacatcttttttctcatttttttgtattactatattagctaatgatcaaagttgttaaaattataaatttatgatgcagaaataaaattggtatattttgatattca

SEQ ID NO: 423135 - DNA, 2812 bp, Homo sapiens
ctggagacatttttgattgtcacaaatgatgggtgttgtgtttctggcatgggtagagggatgctactaaacatcctaccgtgcacaggatggccctccacaatggattctgtggccccaaatgttaatagtgccaaagttgagagaccctggggtagagacgtgtgatgggaaggaaagaaaattacctttagagctgcgcgccgcggcggcggaagatggctgcggccgaggtggcggacactcagctgatgcttggagtcgggctgatcgacggggtctccctcttatccaggctggagtgcagtagcgcaatcaccgctctctgcagcctccactcccaggcccaaaccatcctcccgcctcggcctccgagtggctgggacctcaggcgtgcaccaccacccgattaatttttgtattttgtgtggagatgggataccgacatgttgtccagaaaaggacacaaatggagaagttctgtgggtgtggtgttatccttccacgacagccacattaaggaacctgctgctgagaaaatgctgccttacagatgaaaacaaacttctccatccctttgtctttggtcagtacagaagaacatggttttatatcacaacaattgaagttccagattcttccattttgaaaaaggtgactcatttttctattgtcctgaccgccaaagattttaacccagagaagtatgctgccttcactaggatattgtgtagaatgtacctgaaacatgggagcccagttaaaatgatggagagttatattgcagttctcacaaaggggatatgccagagtgaagaaaacggctctttccttagtaaggattttgatgcccgaaaggcctacctggctggctccatcaaagacattgtatctcagtttggaatggaaactgttatcttacacacagcactgatgctaaagaaaagaattgtggtgtatcaccccaagatagaagcggtccaggagttcaccaggactctgcctgccctggtgtggcaccgacaggactggaccatccttcactcttacgtgcacctcaacgccgatgagctggaagccctgcagatgtgcacaggttacgtcgctggatttgtagacttggaggtgagcaacagaccagacctctatgatgtgtttgtgaatctggcagagagtgagattaccattgctccccttgcaaaagaggccatggcaatgggcaaactgcacaaagaaatgggtcagctaattgttcagtctgcagaagatccagagaaatcagagagccacgttatacaggatattgctctaaaaacaagagaaatctttaccaacctagcaccattttcagaagtttcggctgatggagaaaagagagtccttaatttggaggcgctaaagcaaaaacgatttccaccagcaacagaaaacttcctttatcatctagcagcagccgaacaaatgctgaaaatctgactgtgtgacagaacgtatcactgatgactgatagaaagccctctttcactctgattacccactcactacatgaagtcctgaaaataacagagaaactgttatatctttttaatgatttatttgcaagtattgagatttgacctgaaaaacaatgaaacacatgaacacacttccgattttctcctcgctgattagcttcctgcctgctgtcagtgctggacgaagtgctataactactttatgtaacattacagaacagctagaggtcctggggtaagagaaaaaaagcacatcacaacaaatgtgaaagccttcattattacacgttccagtttgtctcgctgtgtaggcataagctaatggtttattttcagaaagctgcctgaaacgttgctttgtattcttctaggaagaactttaattcctcctgaggaactctactttctgagccaaactgctaattttctgcggaactgtctagaagatcattcaagagaccctgcagttgcactttctcgtaaaagttaaaaaaaaaaaaaaaaaaaaaaggtttttcccggcctttgaacattttgcctatgagagttttgcatatattttatacttgagtagacaactttaataatccatatttatactatcgcagaagtaagcatttggcaaacgttcagccattagcactcatttaaccctgttagcaatattcttttgaaaaaagtgccagtccttatgtgataaactaagaagcccattgaatataaaagtgtataggactgaaacagtgaccttatattattgctaagggaatatgagattaacttcctacaggggccaaaaccagagaaaggcttccagcaacttcgatgaaagtagtttggccacatgtcaagccaattgtttgtattatttatgtacctttttcataactggaattgccaaataagcatggagatctaaatgatgtacttgttagtgtattcattcatattgattgtaaaggattatttttcactcagtactgatgtccttggaaatcttacctggaaacatgtttgcaaaaaacattattgggtctttcatctttttcttggtattacatatttgttcaataaaaattaaacaccctcccttttttttgagtgagggcagggagtacctgaaataagacaatgtttactaaggcaaataattgaaaattaaatctgcactttatggaaatgagaaatattaacatcttttttctcatttttttgtattactatattagctaatgatcaaagttgttaaaattataaatttatgatgcagaaataaaattggtatattttgatattca

SEQ ID NO: 423136 - DNA, 2492 bp, Homo sapiens
ctggagacatttttgattgtcacaaatgatgggtgttgtgtttctggcatgggtagagggatgctactaaacatcctaccgtgcacaggatggccctccacaatggattctgtggccccaaatgttaatagtgccaaagttgagagaccctggggtagagacgtgtgatgggaaggaaagaaaattacctttagagctgcgcgccgcggcggcggaagatggctgcggccgaggtggcggacactcagctgatgcttggagtcgggctgatcgaaaaggacacaaatggagaagttctgtgggtgtggtgttatccttccacgacagccacattaaggaacctgctgctgagaaaatgctgccttacagatgaaaacaaacttctccatccctttgtctttggtcagtacagaagaacatggttttatatcacaacaattgaagttccagattcttccattttgaaaaaggtgactcatttttctattgtcctgaccgccaaagattttaacccagagaagtatgctgccttcactaggatattgtgtagaatgtacctgaaacatgggagcccagttaaaatgatggagagttatattgcagttctcacaaaggggatatgccagagtgaagaaaacggctctttccttagtaaggattttgatgcccgaaaggcctacctggctggctccatcaaagacattgtatctcagtttggaatggaaactgttatcttacacacagcactgatgctaaagaaaagaattgtggtgtatcaccccaagatagaagcggtccaggagttcaccaggactctgcctgccctggtgtggcaccgacaggactggaccatccttcactcttacgtgcacctcaacgccgatgagctggaagccctgcagatgtgcacaggttacgtcgctggatttgtagacttggaggtgagcaacagaccagacctctatgatgtgtttgtgaatctggcagagagtgagattaccattgctccccttgcaaaagaggccatggcaatgggcaaactgcacaaagaaatgggtcagctaattgttcagtctgcagaagatccagagaaatcagagagccacgttatacaggatattgctctaaaaacaagagaaatctttaccaacctagcaccattttcagaagtttcggctgatggagaaaagagagtccttaatttggaggcgctaaagcaaaaacgatttccaccagcaacagaaaacttcctttatcatctagcagcagccgaacaaatgctgaaaatctgactgtgtgacagaacgtatcactgatgactgatagaaagccctctttcactctgattacccactcactacatgaagtcctgaaaataacagagaaactgttatatctttttaatgatttatttgcaagtattgagatttgacctgaaaaacaatgaaacacatgaacacacttccgattttctcctcgctgattagcttcctgcctgctgtcagtgctggacgaagtgctataactactttatgtaacattacagaacagctagaggtcctggggaagaactttaattcctcctgaggaactctactttctgagccaaactgctaattttctgcggaactgtctagaagatcattcaagagaccctgcagttgcactttctcgtaaaagttaaaaaaaaaaaaaaaaaaaaaaggtttttcccggcctttgaacattttgcctatgagagttttgcatatattttatacttgagtagacaactttaataatccatatttatactatcgcagaagtaagcatttggcaaacgttcagccattagcactcatttaaccctgttagcaatattcttttgaaaaaagtgccagtccttatgtgataaactaagaagcccattgaatataaaagtgtataggactgaaacagtgaccttatattattgctaagggaatatgagattaacttcctacaggggccaaaaccagagaaaggcttccagcaacttcgatgaaagtagtttggccacatgtcaagccaattgtttgtattatttatgtacctttttcataactggaattgccaaataagcatggagatctaaatgatgtacttgttagtgtattcattcatattgattgtaaaggattatttttcactcagtactgatgtccttggaaatcttacctggaaacatgtttgcaaaaaacattattgggtctttcatctttttcttggtattacatatttgttcaataaaaattaaacaccctcccttttttttgagtgagggcagggagtacctgaaataagacaatgtttactaaggcaaataattgaaaattaaatctgcactttatggaaatgagaaatattaacatcttttttctcatttttttgtattactatattagctaatgatcaaagttgttaaaattataaatttatgatgcagaaataaaattggtatattttgatattca

SEQ ID NO: 423137 - DNA, 1950 bp, Homo sapiens
ctggagacatttttgattgtcacaaatgatgggtgttgtgtttctggcatgggtagagggatgctactaaacatcctaccgtgcacaggatggccctccacaatggattctgtggccccaaatgttaatagtgccaaagttgagagaccctggggtagagacgtgtgatgggaaggaaagaaaattacctttagagctgcgcgccgcggcggcggaagatggctgcggccgaggtggcggacactcagctgatgcttggagtcgggctgatcgtgaccatctttccaccgtagaaaaggacacaaatggagaagttctgtgggtgtggtgttatccttccacgacagccacattaaggaacctgctgctgagaaaatgctgccttacagatgaaaacaaacttctccatccctttgtctttggtcagtacagaagaacatggttttatatcacaacaattgaagttccagattcttccattttgaaaaaggtgactcatttttctattgtcctgaccgccaaagattttaacccagagaagtatgctgccttcactaggatattgtgtagaatgtacctgaaacatgggagcccagttaaaatgatggagagttatattgcagttctcacaaaggggatatgccagagtgaagaaaacggctctttccttagtaaggattttgatgcccgaaaggcctacctggctggctccatcaaaggactctgcctgccctggtgtggcaccgacaggactggaccatccttcactcttacgtgcacctcaacgccgatgagctggaagccctgcagatgtgcacaggttacgtcgctggatttgtagacttggaggtgagcaacagaccagacctctatgatgtgtttgtgaatctggcagagagtgagattaccattgctccccttgcaaaagaggccatggcaatgggcaaactgcacaaagaaatgggtcagctaattgttcagtctgcagaagatccagagaaatcagagagccacgttatacaggaagaactttaattcctcctgaggaactctactttctgagccaaactgctaattttctgcggaactgtctagaagatcattcaagagaccctgcagttgcactttctcgtaaaagttaaaaaaaaaaaaaaaaaaaaaaggtttttcccggcctttgaacattttgcctatgagagttttgcatatattttatacttgagtagacaactttaataatccatatttatactatcgcagaagtaagcatttggcaaacgttcagccattagcactcatttaaccctgttagcaatattcttttgaaaaaagtgccagtccttatgtgataaactaagaagcccattgaatataaaagtgtataggactgaaacagtgaccttatattattgctaagggaatatgagattaacttcctacaggggccaaaaccagagaaaggcttccagcaacttcgatgaaagtagtttggccacatgtcaagccaattgtttgtattatttatgtacctttttcataactggaattgccaaataagcatggagatctaaatgatgtacttgttagtgtattcattcatattgattgtaaaggattatttttcactcagtactgatgtccttggaaatcttacctggaaacatgtttgcaaaaaacattattgggtctttcatctttttcttggtattacatatttgttcaataaaaattaaacaccctcccttttttttgagtgagggcagggagtacctgaaataagacaatgtttactaaggcaaataattgaaaattaaatctgcactttatggaaatgagaaatattaacatcttttttctcatttttttgtattactatattagctaatgatcaaagttgttaaaattataaatttatgatgcagaaataaaattggtatattttgatattca

SEQ ID NO: 423138 - DNA, 621 bp, Homo sapiens
tgcaatcatgtcttactgcagccttaatctcctgggcccaagtgatcctccctcctcagctccctgagtagctgggagcacatgtgtgcactaccatgcccagctagtttttaaattttttgtagagatgaggtctcactctgttgcccaggctggtcttgaactcctgagttcaagcgatcctcctgtcttttctcctaaagttctgggattaacaggcgcgagccaccgcacctggccaaaaagataggtttcaatatgtaatgaaatctttggtttattgctcaataagttctttttgtttttgttttttttttgagatggagtcttgctctgtcacccaggttggagtgcggtggtgtgatctcggctcactgcaacctctgcctcccaggatcaagcgattcttgtgcctcagcctctcaagtagctgggactacaggcatgcaccaccacctactcttcattttaaatgtatctcttcaaagttttgtatttatgaaattctgaattttgtctcattagtggaaatattaggtatatgtttatcagaaatttataatatagaggcatataagtaaatgaaggtttttttctttttttgagacaaagtctcactct

SEQ ID NO: 423139 - DNA, 3109 bp, Homo sapiens
  misc_feature (664)..(664): n is a, c, g, or t
  misc_feature (707)..(707): n is a, c, g, or t
  misc_feature (729)..(729): n is a, c, g, or t
  misc_feature (940)..(940): n is a, c, g, or t
  misc_feature (1051)..(1051): n is a, c, g, or t
  misc_feature (1244)..(1244): n is a, c, g, or t
  misc_feature (1631)..(1631): n is a, c, g, or t
  misc_feature (1821)..(1821): n is a, c, g, or t
  misc_feature (2204)..(2204): n is a, c, g, or t
  misc_feature (2238)..(2238): n is a, c, g, or t
  misc_feature (2280)..(2280): n is a, c, g, or t
tcttcctactccagtaaggttgctcatgtttgtgatgcaggttacgtcgctggatttgtagacttggaggtgagcaacagaccagacctctatgatgtgtttgtgaatctggcagagagtgagattaccattgctccccttgcaaaagaggccatggcaatgggcaaactgcacaaagaaatgggtcagctaattgttcagtctgcagaagatccagagaaatcagagagccacgttatacaggtaactccctcaccttctgacttactgaaagtcctgacccggtgtcgctgggtggtgtgcggcagagctgtgcacataagcagagtggggggctgtggtagaggccagcgggcaggtgcttagagagggtttacagacggccacagtgatgatggacaagcaggtgcaggctggcctgatctagttagttactgggctcgagggcaggtatacacaggggctggtgctgacaccgaccgctggcaatgagaaatgtaactaccaagtggtctggaaggcttttctgggccagccagtgcattctttcttcctaggagaatttccctggaggaacaaattataaaggggaggttgttgctgagcatggggaactagattgtcaaaattttgctttgcttgtctccaggacaacagaaatcangcagtcagactcctgtcccacttagtgactgttgccacatgcngcagagccagctccttgctggngtctacctggcatgctgaccagcgtccatgtggcccagtgggcacctgctctgcccttgccaaactgggatggcaaatgggttttatttcttgtgctttccacgtggtggcctgcagcccgcccagctccttgcatttggcctgttcccagctccttgctcctctcctgaaggatacacttccagcgttgccttatctagatgcctgactnataacctggggctggagggcccagaaggactgtctcccatctgcacctgtcctacctgggggtacgggggcacctctgatatgcaggctttactcattcggcccaacctgntgccttcttcatttatccattcatttactcagtgtttcttgagctctgtttgttaggcattgcactggcagtggggatgcagtggtgagcaaatccctgccctcatggagtctgtaatttagtggagtagatgcacagaaaataataaatgacaagataattacagcccatgttaggtgctgtgacagaaggngttgaggtggagaatattgggggatgggtaggccagatctctaaggaggtgacatgtcagcggaaagatgagaggggccatttctctgcagtgctggtggcctggccagctgtgagcaggaagagtgggctgatcttgccctgaggacctgaacactggagactctggggccgcttctttcctaccatgggaatcctcactgcccacctacccccaacattagagtaaagacatattcttacaatatcagcaacatatgtgaatctgagttttgcattactgtgttgttcacagactaaaagtgctacctagatgacttagtatgacgtatgagaccttggggagggcaagtgaaagtgctgggaatgctgtaagggttcaaaaatncatgaatgaattaatgatgtcagcaaacaaggaagaagacgtgacttttttttcccttttttgagtttcactgtcgcccagggtggagtgcagtggtgcaatcttggctcactgcaacctccaccacgtgggttcaaacgattctcctgcctcagcctcccgagtagctgggaccataggcatgcaccancatgcctggctaatttttttgtatttttagtagaggcagggtttcaccatgttggtcaggctggtcttgaacttctgacctcaaatgatccacctgcctcggcctcccaaagtgctgagattacaggcgtgagccaccatgcctggccagaagacatgattttaatgagtgctttagtgagtcctcagccacccaaaaggaataaagcctgcgtggcaggtgccgggttacttatcccaggcagaagaggacttttgggaagagattccttcaaaaaaacaatagcagcatttctcaaaaagttaaacatcaagttaccatatgatttagcaatgctgtttctgggtatatacccaaaataattgaaagcagggactcggccnggcccggtggctcatgcatgtaatcccagcactntgggaggccgaggcgggcggatcacctgaggtcaggagttcnagaccagcctggccaacatggtgaaacccatctctactaaaaatacaaaaattagccgggtgtggtggtgggcgcctgttaatcccagcgacttgggaagccgaggcaggagaatcgcttcaacccgggaggcgggggttgcagcgagccgagattgtgccattgcactccagcctgggcaacaagagcaaaactgtctcaaaaaaaaaaaaaaaaaaaaaaaagaaaaagaaaagaaacgatactgtaaaaatatagcattatcatcttatgggactaccattgtaaatgtggtccctggttgaccaaaacgtcattatgtggtgcatgactgtactcgtatggaaatatccatagcagtgttactcacagtagccaaaacgtggcagaagcaacccagtgtccttcagcagatgaatgggcaagcaaaatgtagtctttatatacagtagaatattactcagcttaaaaaggaatggaatgttttgaatgtggcttttgttgggggggagaaaaggaatagaattctgatacatgctatagcatggatgaaccttgaaaccatgctaatgaaataagccagacactaaagggtaaatgttgtatgattccacttatatgagctatctagagcagacaaattcacagagttagacggcagaatagaggttcccaggggctaagcgaggggaaatggggttattgtgtaatgggtagagtttctgtttgtgatggtgaaacgtgctggaaatagtggtgatggttgtgcaacgctgcaaatgtacttaatgccactgaattatacactcagaaaatgactaaaattgta

SEQ ID NO: 423140 - DNA, 3056 bp, Homo sapiens
ctggagacatttttgattgtcacaaatgatgggtgttgtgtttctggcatgggtagagggatgctactaaacatcctaccgtgcacaggatggccctccacaatggattctgtggccccaaatgttaatagtgccaaagttgagagaccctggggtagagacgtgtgatgggaaggaaagaaaattacctttagagctgcgcgccgcggcggcggaagatggctgcggccgaggtggcggacactcagctgatgcttggagtcgggctgatcgaaaaggacacaaatggagaagttctgtgggtgtggtgttatccttccacgacagccacattaaggaacctgctgctgagaaaatgctgccttacagatgaaaacaaacttctccatccctttgtctttggtcagtacagaagaacatggttttatatcacaacaattgaagttccagattcttccattttgaaaaaggtgactcatttttctattgtcctgaccgccaaagattttaacccagagaagtatgctgccttcactaggatattgtgtagaatgtacctgaaacatgggagcccagttaaaatgatggagagttatattgcagttctcacaaaggggatatgccagagtgaagaaaacggctctttccttagtaaggattttgatgcccgaaaggcctacctggctggctccatcaaagacattgtatctcagtttggaatggaaactgttatcttacacacagcactgatgctaaagaaaagaattgtggtgtatcaccccaagatagaagcggtccaggagttcaccaggactctgcctgccctggtgtggcaccgacaggactggaccatccttcactcttacgtgcacctcaacgccgatgagctggaagccctgcagatgtgcacaggttacgtcgctggatttgtagacttggaggtgagcaacagaccagacctctatgatgtgtttgtgaatctggcagagagtgagattaccattgctccccttgcaaaagaggccatggcaatgggcaaactgcacaaagaaatgggtcagctaattgttcagtctgcagaagatccagagaaatcagagagccacgttatacaggatattgctctaaaaacaagagaaatctttaccaacctagcaccattttcagaagtttcggctgatggagaaaagagagtccttaatttggaggcgctaaagcaaaaacgatttccaccagcaacagaaaacttcctttatcatctagcagcagccgaacaaatgctgaaaatctgactgtgtgacagaacgtatcactgatgactgatagaaagccctctttcactctgattacccactcactacatgaagtcctgaaaataacagagaaactgttatatctttttaatgatttatttgcaagtattgagatttgacctgaaaaacaatgaaacacatgaacacacttccgattttctcctcgctgattagcttcctgcctgctgtcagtgctggacgaagtgctataactactttatgtaacattacagaacagctagaggtcctggggtaagagaaaaaaagcacatcacaacaaatgtgaaagccttcattattacacgttccagtttgtctcgctgtgtaggcataagctaatggtttattttcagaaagctgcctgaaacgttgctttgtattcttctaggaagaactttaattcctcctgaggaactctactttctgagccaaactgctaattttctgcggaactgtctagaagatcattcaagagaccctgcagttgcactttctcgtaaaagttaaaaaaaaaaaaaaaaaaaaaaggtttttcccggcctttgaacattttgcctatgagagttttgcatatattttatacttgagtagacaactttaataatccatatttatactatcgcagaagtaagcatttggcaaacgttcagccattagcactcatttaaccctgttagcaatattcttttgaaaaaagtgccagtccttatgtgataaactaagaagcccattgaatataaaagtgtataggactgaaacagtgaccttatattattgctaagggaatatgagattaacttcctacaggggccaaaaccagagaaaggcttccagcaacttcgatgaaagtagtttggccacatgtcaagccaattgtttgtattatttatgtacctttttcataactggaattgccaaataagcatggagatctaaatgatgtacttgttagtgtattcattcatattgattgtaaaggattatttttcactcagtactgatgtccttggaaatcttacctggaaacatgtttgcaaaaaacattattgggtctttcatctttttcttggtattacatatttgttcaataaaaattaaacaccctcccttttttttgagtgagggcagggagtacctgaaataagacaatgtttactaaggcaaataattgaaaattaaatctgcactttatggaaatgagaaatattaacatcttttttctcatttttttgtattactatattagctaatgatcaaagttgttaaaattataaatttatgatgcagaaataaaattggtatattttgatattcaactacttttaggtgggtgacgaattgtcccctctttctctaatactgctcattccaaagaaaatggggaaaaaataccttttttcaactgtgagggcgctagggaattattaaaagacctgtctgaaagttcaagacggccaagggcgcggtggctcatgcctgtaatgccagcactttgggaggccgaggtgggcggatcacctgagatcaggagtttgagactagcctggccaacgtggtaaaaccccatctctactaaaagtacaaaaattagctgggtgtggtggcacatgcccgtaatcccagctacttgctatttgggaggctgaggcaggagaattgctcgaaccagggaggcggaggttgcagtgagccgagactgcaccattgcactccagcctggacaaaagagcgagacttggtttc

SEQ ID NO: 423141 - DNA, 2573 bp, Homo sapiens
ctggagacatttttgattgtcacaaatgatgggtgttgtgtttctggcatgggtagagggatgctactaaacatcctaccgtgcacaggatggccctccacaatggattctgtggccccaaatgttaatagtgccaaagttgagagaccctggggtagagacgtgtgatgggaaggaaagaaaattacctttagagctgcgcgccgcggcggcggaagatggctgcggccgaggtggcggacactcagctgatgcttggagtcgggctgatcgaaaaggacacaaatggagaagttctgtgggtgtggtgttatccttccacgacagccacattaaggaacctgctgctgagaaaatgctgccttacagatgaaaacaaacttctccatccctttgtctttggtcagtacagaagaacatggttttatatcacaacaattgaagttccagattcttccattttgaaaaaggtgactcatttttctattgtcctgaccgccaaagattttaacccagagaagtatgctgccttcactaggatattgtgtagaatgtacctgaaacatgggagcccagttaaaatgatggagagttatattgcagttctcacaaaggggatatgccagagtgaagaaaacggctctttccttagtaaggattttgatgcccgaaaggcctacctggctggctccatcaaagacattgtatctcagtttggaatggaaactgttatcttacacacagcactgatgctaaagaaaagaattgtggtgtatcaccccaagatagaagcggtccaggagttcaccaggactctgcctgccctggtgtggcaccgacaggactggaccatccttcactcttacgtgcacctcaacgccgatgagctggaagccctgcagatgtgcacaggttacgtcgctggatttgtagacttggaggtgagcaacagaccagacctctatgatgtgtttgtgaatctggcagagagtgagattaccattgctccccttgcaaaagaggccatggcaatgggcaaactgcacaaagaaatgggtcagctaattgttcagtctgcagaagatccagagaaatcagagagccacgttatacaggatattgctctaaaaacaagagaaatctttaccaacctagcaccattttcagaagtttcggctgatggagaaaagagagtccttaatttggaggcgctaaagcaaaaacgatttccaccagcaacagaaaacttcctttatcatctagcagcagccgaacaaatgctgaaaatctgactgtgtgacagaacgtatcactgatgactgatagaaagccctctttcactctgattacccactcactacatgaagtcctgaaaataacagagaaactgttatatctttttaatgatttatttgcaagtattgagatttgacttcctgcctgctgtcagtgctggacgaagtgctataactactttatgtaacattacagaacagctagaggtcctggggtaagagaaaaaaagcacatcacaacaaatgtgaaagccttcattattacacgttccagtttgtctcgctgtgtaggcataagctaatggtttattttcagaaagctgcctgaaacgttgctttgtattcttctaggaagaactttaattcctcctgaggaactctactttctgagccaaactgctaattttctgcggaactgtctagaagatcattcaagagaccctgcagttgcactttctcgtaaaagttaaaaaaaaaaaaaaaaaaaaaaggtttttcccggcctttgaacattttgcctatgagagttttgcatatattttatacttgagtagacaactttaataatccatatttatactatcgcagaagtaagcatttggcaaacgttcagccattagcactcatttaaccctgttagcaatattcttttgaaaaaagtgccagtccttatgtgataaactaagaagcccattgaatataaaagtgtataggactgaaacagtgaccttatattattgctaagggaatatgagattaacttcctacaggggccaaaaccagagaaaggcttccagcaacttcgatgaaagtagtttggccacatgtcaagccaattgtttgtattatttatgtacctttttcataactggaattgccaaataagcatggagatctaaatgatgtacttgttagtgtattcattcatattgattgtaaaggattatttttcactcagtactgatgtccttggaaatcttacctggaaacatgtttgcaaaaaacattattgggtctttcatctttttcttggtattacatatttgttcaataaaaattaaacaccctcccttttttttgagtgagggcagggagtacctgaaataagacaatgtttactaaggcaaataattgaaaattaaatctgcactttatggaaatgagaaatattaacatcttttttctcatttttttgtattactatattagctaatgatcaaagttgttaaaattataaatttatgatgcagaaataaaattggtatattttgatattca

SEQ ID NO: 423142 - DNA, 2536 bp, Homo sapiens
ctggagacatttttgattgtcacaaatgatgggtgttgtgtttctggcatgggtagagggatgctactaaacatcctaccgtgcacaggatggccctccacaatggattctgtggccccaaatgttaatagtgccaaagttgagagaccctggggtagagacgtgtgatgggaaggaaagaaaattacctttagagctgcgcgccgcggcggcggaagatggctgcggccgaggtggcggacactcagctgatgcttggagtcgggctgatcgtgaccatctttccaccgtagaaaaggacacaaatggagaagttctgtgggtgtggtgttatccttccacgacagccacattaaggaacctgctgctgagaaaatgctgccttacagatgaaaacaaacttctccatccctttgtctttggtcagtacagaagaacatggttttatatcacaacaattgaagttccagattcttccattttgaaaaaggtgactcatttttctattgtcctgaccgccaaagattttaacccagagaagtatgctgccttcactaggatattgtgtagaatgtacctgaaacatgggagcccagttaaaatgatggagagttatattgcagttctcacaaaggggatatgccagagtgaagaaaacggctctttccttagtaaggattttgatgcccgaaaggcctacctggctggctccatcaaaggactctgcctgccctggtgtggcaccgacaggactggaccatccttcactcttacgtgcacctcaacgccgatgagctggaagccctgcagatgtgcacaggttacgtcgctggatttgtagacttggaggtgagcaacagaccagacctctatgatgtgtttgtgaatctggcagagagtgagattaccattgctccccttgcaaaagaggccatggcaatgggcaaactgcacaaagaaatgggtcagctaattgttcagtctgcagaagatccagagaaatcagagagccacgttatacaggatattgctctaaaaacaagagaaatctttaccaacctagcaccattttcagaagtttcggctgatggagaaaagagagtccttaatttggaggcgctaaagcaaaaacgatttccaccagcaacagaaaacttcctttatcatctagcagcagccgaacaaatgctgaaaatctgactgtgtgacagaacgtatcactgatgactgatagaaagccctctttcactctgattacccactcactacatgaagtcctgaaaataacagagaaactgttatatctttttaatgatttatttgcaagtattgagatttgacctgaaaaacaatgaaacacatgaacacacttccgattttctcctcgctgattagcttcctgcctgctgtcagtgctggacgaagtgctataactactttatgtaacattacagaacagctagaggtcctggggtaagagaaaaaaagcacatcacaacaaatgtgaaagccttcattattacacgttccagtttgtctcgctgtgtaggcataagctaatggtttattttcagaaagctgcctgaaacgttgctttgtattcttctaggaagaactttaattcctcctgaggaactctactttctgagccaaactgctaattttctgcggaactgtctagaagatcattcaagagaccctgcagttgcactttctcgtaaaagttaaaaaaaaaaaaaaaaaaaaaaggtttttcccggcctttgaacattttgcctatgagagttttgcatatattttatacttgagtagacaactttaataatccatatttatactatcgcagaagtaagcatttggcaaacgttcagccattagcactcatttaaccctgttagcaatattcttttgaaaaaagtgccagtccttatgtgataaactaagaagcccattgaatataaaagtgtataggactgaaacagtgaccttatattattgctaagggaatatgagattaacttcctacaggggccaaaaccagagaaaggcttccagcaacttcgatgaaagtagtttggccacatgtcaagccaattgtttgtattatttatgtacctttttcataactggaattgccaaataagcatggagatctaaatgatgtacttgttagtgtattcattcatattgattgtaaaggattatttttcactcagtactgatgtccttggaaatcttacctggaaacatgtttgcaaaaaacattattgggtctttcatctttttcttggtattacatatttgttcaataaaaattaaacaccctcccttttttttgagtgagggcagggagtacctgaaataagacaatgtttactaaggcaaataattgaaaattaaatctgcactttatggaaatgagaaatattaacatcttttttctcatttttttgtattactatattagctaatgatcaaagttgttaaaattataaatttatgatgcagaaataaaattggtatattttgatattca

SEQ ID NO: 423143 - DNA, 1284 bp, Homo sapiens
ctggagacatttttgattgtcacaaatgatgggtgttgtgtttctggcatgggtagagggatgctactaaacatcctaccgtgcacaggatggccctccacaatggattctgtggccccaaatgttaatagtgccaaagttgagagaccctggggtagagacgtgtgatgggaaggaaagaaaattacctttagagctgcgcgccgcggcggcggaagatggctgcggccgaggtggcggacactcagctgatgcttggagtcgggctgatcgtgaccatctttccaccgtagaaaaggacacaaatggagaagttctgtgggtgtggtgttatccttccacgacagccacattaaggaacctgctgctgagaaaatgctgccttacagatgaaaacaaacttctccatccctttgtctttggtcagtacagaagaacatggttttatatcacaacaattgaagttccagattcttccattttgaaaaaggtgactcatttttctattgtcctgaccgccaaagattttaacccagagaagtatgctgccttcactaggatattgtgtagaggtctgtataaaaattgtattaaatgctaatatacaaaatgaagaccttagtatagttacatagcagatttctacactgagaaagcaaagttcagccttgtgtctccccagcataatctttagtagcccttcacagactgtaaagacggcctttctcttttgctctgttgatacttctcttatttgggtaaatgatctaggggaagagaaggagcagttttatagctattgtagctcctgggtgttttgaatcacttcctacttttgatctgttacttctgttcacttccagtctagaattcccttagtaggttggataagttaagggccttatgacatggtaaactggttcgtatgtgtcaaggtctgtgtgtacagtcattttggggaaagaattatgccgaagcacaataacacatttcttagctggaatgctgagaagctagggaattctgattaactggttagtcacgattcagctagactcttttagtttcatctccattgttgaaaaatttatctaaaatataccagtctattttcttttctttttctttttctttttcttttttttttttttttggagacagggtctcactctgttgctcagactgggagtgcagcggcttcatcatggctcactgcagtcttgacctcccaggactcaggtgatcctcccacctaagcctcccatgtagcaggactgcaggtgc

SEQ ID NO: 423144 - DNA, 2561 bp, Homo sapiens
ccgtctattttcctacgactccagctggccttgaacatgggaaacacgagcttcaatgaggtcatggaggcccagctaccctcacacggcggccctaaaccctcagctgagagtgacatgggcacccgcagggactacattatggccaagtatgtggagcataggtttgcacgccggtgcacacctgagcctcagcgactctggacagccatttgcaacagggacctcctgtcggtactggaggcctttgccaatgggcaggactttggacagccgctgccagggcctgatgcacaggcacctgaagaactcgtcttgcatttggctgtcaaagtcgccaaccaggcttccctgcctctggtggatttcatcatccagaacggtggtcacctggatgccaaggctgctgacgggaacacggctctgcactacgcagcactctacaaccagcccgactgcctcaagctgctgctgaaggggagagctttggttggcacagtaaatgaagcaggcgagacagctctggacatagccaggaagaagcaccacaaggagtgtgaggagctgctggagcaggcccaggcggggacctttgccttccctctacatgtggactactcctgggtaatttccacagagcctggctctgacagtgaggaggatgaggaagagaagcgctgcttgctgaagctcccggcccaggctcactgggccagtgggaggctggacatcagcaacaagacctatgagactgtcgccagcctgggagcagccacccctcagggcgagagtgaggactgtcccccgcccttgccagtcaaaaactcttctcggactttggtccaagggtgtgcaagacatgccagtggagatcgttctgaagtctccagcctgagttcagaggcccctgagacccctgagagcctgggcagtccagcctcctcctccagtctgatgagccccttggaacctggggatcccagccaagccccacccaactctgaagagggcctccgagagcccccaggcacctccagacccagcctgacatccgggaccaccccttcggagatgtacctccccgtcagattcagctccgagagcactcgctcctatcggcggggggcgcggagccctgaagatggtccctcagccaggcagcctctgcccagaaggaacgtgccggttggcatcactgaaggagatggctcaaggactgggagtctcccagcaagttctgtgcaacttttgcaagactagctccttgctggcccccacatgccccatgctaggccccaatgttcagagctgggacttgagctcacaaaactggggagctgagacatttgttctcttggatctcactctctctgtcccttgtgcctctgtagctggccttcttcctgccacaggccatgcctctaccaaggacacatggcctttccctgttagggctgatggcggttctttcctatctcattacccgctaggggcctgggagccctgtggctggatctgagtgctcctgagctggcttcagctgcagaactctcagtccctcatcagatcgagactctatttcccccgtcagtctgggggcttcacaagggcaggagagccctccatcactgacttccagatcagggaccctgccaagtagggactgtcttctcagccagccatttattagtctaatattccttcactaaattccaactctatgtctggacctgtgttaggcacttcagataccacacgagtaagacaagggccctgcaggggtggtcctttggtggaaagctggtcttaagggttgggcttgggaataggcagggtcagattccagggcatggctctggactcagctggtttatacctatatgaccattacagttgtctacagatcacatccattctggctggtcaacatgcatgctgtactggctgttaaataaaaatattctgaatgtcactccttttgagggacagcacagccttccctaggcattctcctatattccccagccaaattgtagagtcagatgcacccacatttgcctgtgtccttgatttagcaggaaggaaaggaatagtcggggttgatggatgcccacttctcttctctttctcttggtcaactcaggagccttttagtctgagggaatggagaggcaaagaaagaagggagagtaatagaattgggagggcagagacttaagggttctgcttcccagccctagaaattctatcattgctcagccccaatgagaaagcagatacacctaagccatcatcaaccactaacatctcaacttgccagttgctgggtgctgggccctggcaggaatgggccaagccaagcaggggagactagagagcaccaatggccaacacagctgcctggctggggaggctgtgctgtttcccctggagacctgactggtctgtggttcccacaggaacagggttgtcttttgagcccccagtgtctggtttcattcatctcagacttgttatttcactcatctctaataaaggattggggggtcagttaaaaatgg

SEQ ID NO: 423145 - DNA, 1751 bp, Homo sapiens
  misc_feature (66)..(66): n is a, c, g, or t
gaaaaggaagtgtggagtcaagtatggctgcctgaccatctcacacagcacgataaaccggccccnggtgaagctgaccctgctgacgtgccaagtgaggccaaaccctgaggagaaaaagtgcttcgacctggtgacccacaaccggacgtaccactttcaggcagaggacgagcacgagtgtgaggcgtgggtgtcagtgttgcagaacagcaaggacgaagccctgagcagcgccttcctcggggagcccagcgctggcccggggtcctgggggtccgccggccatgatggggagccgcacgacctcacaaagctgctcatcgcggaggtgaagagcaggcctgggaatagccagtgctgcgactgcggggctgcagaccccacgtggctcagcaccaacctgggcgtgctcacctgcatccagtgctcgggcgtccaccgcgaactgggcgtgcgcttttcgcgcatgcagtcactcaccttggacctgctgggcccctccgagttgttgctggccttgaacatgggaaacacgagcttcaatgaggtcatggaggcccagctaccctcacacggcggccctaaaccctcagctgagagtgacatgggcacccgcagggactacattatggccaagtatgtggagcataggtttgcacgccggtgcacacctgagcctcagcgactctggacagccatttgcaacagggacctcctgtcggtactggaggcctttgccaatgggcaggactttggacagccgctgccagggcctgatgcacaggcacctgaagaactcgtcttgcatttggctgtcaaagtcgccaaccaggcttccctgcctctggtggatttcatcatccagaacggtggtcacctggatgccaaggctgctgacgggaacacggctctgcactacgcagcactctacaaccagcccgactgcctcaagctgctgctgaaggggagagctttggttggcacagtaaatgaagcaggcgagacagctctggacatagccaggaagaagcaccacaaggagtgtgaggagctgctggagcaggcccaggcggggacctttgccttccctctacatgtggactactcctgggtaatttccacagagcctggctctgacagtgaggaggatgaggaagagaagcgctgcttgctgaagctcccggcccaggctcactgggccagtgggaggctggacatcagcaacaagacctatgagactgtcgccagcctgggagcagccacccctcagggcgagagtgaggactgtcccccgcccttgccagtcaaaaactcttctcggactttggtccaagggtgtgcaagacatgccagtggaggcaaagaaagaagggagagtaatagaattgggagggcagagacttaagggttctgcttcccagccctagaaattctatcattgctcagccccaatgagaaagcagatacacctaagccatcatcaaccactaacatctcaacttgccagttgctgggtgctgggccctggcaggaatgggccaagccaagcaggggagactagagagcaccaatggccaacacagctgcctggctggggaggctgtgctgtttcccctggagacctgactggtctgtggttcccacaggaacagggttgtcttttgagcccccagtgtctggtttcattcatctcagacttgttatttcactcatctctaataaaggattggggggtcagttaaaaatgg

SEQ ID NO: 423146 - DNA, 2997 bp, Homo sapiens
  misc_feature (66)..(66): n is a, c, g, or t
gaaaaggaagtgtggagtcaagtatggctgcctgaccatctcacacagcacgataaaccggccccnggtgaagctgaccctgctgacgtgccaagtgaggccaaaccctgaggagaaaaagtgcttcgacctggtgacccacaaccggacgtaccactttcaggcagaggacgagcacgagtgtgaggcgtgggtgtcagtgttgcagaacagcaaggacgaagccctgagcagcgccttcctcggggagcccagcgctggcccggggtcctgggggtccgccggccatgatggggagccgcacgacctcacaaagctgctcatcgcggaggtgaagagcaggcctgggaatagccagtgctgcgactgcggggctgcagaccccacgtggctcagcaccaacctgggcgtgctcacctgcatccagtgctcgggcgtccaccgcgaactgggcgtgcgcttttcgcgcatgcagtcactcaccttggacctgctgggcccctccgagttgttgctggccttgaacatgggaaacacgagcttcaatgaggtcatggaggcccagctaccctcacacggcggccctaaaccctcagctgagagtgacatgggcacccgcagggactacattatggccaagtatgtggagcataggtttgcacgccggtgcacacctgagcctcagcgactctggacagccatttgcaacagggacctcctgtcggtactggaggcctttgccaatgggcaggactttggacagccgctgccagggcctgatgcacaggcacctgaagaactcgtcttgcatttggctgtcaaagtcgccaaccaggcttccctgcctctggtggatttcatcatccagaacggtggtcacctggatgccaaggctgctgacgggaacacggctctgcactacgcagcactctacaaccagcccgactgcctcaagctgctgctgaaggggagagctttggttggcacagtaaatgaagcaggcgagacagctctggacatagccaggaagaagcaccacaaggagtgtgaggagctgctggagcaggcccaggcggggacctttgccttccctctacatgtggactactcctgggtaatttccacagagcctggctctgacagtgaggaggatgaggaagagaagcgctgcttgctgaagctcccggcccaggctcactgggccagtgggaggctggacatcagcaacaagacctatgagactgtcgccagcctgggagcagccacccctcagggcgagagtgaggactgtcccccgcccttgccagtcaaaaactcttctcggactttggtccaagggtgtgcaagacatgccagtggagatcgttctgaagtctccagcctgagttcagaggcccctgagacccctgagagcctgggcagtccagcctcctcctccagtctgatgagccccttggaacctggggatcccagccaagccccacccaactctgaagagggcctccgagagcccccaggcacctccagacccagcctgacatccgggaccaccccttcggagatgtacctccccgtcagattcagctccgagagcactcgctcctatcggcggggggcgcggagccctgaagatggtccctcagccaggcagcctctgcccagaaggaacgtgccggttggcatcactgaaggagatggctcaaggactgggagtctcccagcaagttctgtgcaacttttgcaagactagctccttgctggcccccacatgccccatgctaggccccaatgttcagagctgggacttgagctcacgtgcctctgtagctggccttcttcctgccacaggccatgcctctaccaaggacacatggcctttccctgttagggctgatggcggttctttcctatctcattacccgctaggggcctgggagccctgtggctggatctgagtgctcctgagctggcttcagctgcagaactctcagtccctcatcagatcgagactctatttcccccgtcagtctgggggcttcacaagggcaggagagccctccatcactgacttccagatcagggaccctgccaagtagggactgtcttctcagccagccatttattagtctaatattccttcactaaattccaactctatgtctggacctgtgttaggcacttcagataccacacgagtaagacaagggccctgcaggggtggtcctttggtggaaagctggtcttaagggttgggcttgggaataggcagggtcagattccagggcatggctctggactcagctggtttatacctatatgaccattacagttgtctacagatcacatccattctggctggtcaacatgcatgctgtactggctgttaaataaaaatattctgaatgtcactccttttgagggacagcacagccttccctaggcattctcctatattccccagccaaattgtagagtcagatgcacccacatttgcctgtgtccttgatttagcaggaaggaaaggaatagtcggggttgatggatgcccacttctcttctctttctcttggtcaactcaggagccttttagtctgagggaatggagaggcaaagaaagaagggagagtaatagaattgggagggcagagacttaagggttctgcttcccagccctagaaattctatcattgctcagccccaatgagaaagcagatacacctaagccatcatcaaccactaacatctcaacttgccagttgctgggtgctgggccctggcaggaatgggccaagccaagcaggggagactagagagcaccaatggccaacacagctgcctggctggggaggctgtgctgtttcccctggagacctgactggtctgtggttcccacaggaacagggttgtcttttgagcccccagtgtctggtttcattcatctcagacttgttatttcactcatctctaataaaggattggggggtcagttaaaaatgg

SEQ ID NO: 423147 - DNA, 2512 bp, Homo sapiens
ggtcccagctcacctcacacggtgggctcaagcctcagcgtgaagtgactagtggaacatccctgcagagggacttacactcattgtgcactgagtgatgctggatgcgatacgtgttggctagccagaccgagatgcctgcacctggaggcactcaggcaggactttctgcgaacatgccacatttcgtcagcacgcggagacctcgctgtcggcgtactaggaggcctttgtcaatgcgcaggatttcgagaccaagccgatgccatgtcctgatgcgacacggcactctggaatgaggctcgatcttggccttatggctgtcataagtcgctgaaacaggcttccctggcctctgggtggattgtcatcagtccagaactggtggtcacctggatgccaaggctgctgacgggaacacggctctgcactacgcagcactctacaaccagcccgactgcctcaagctgctgctgaaggggagagctttggttggcacagtaaatgaagcaggcgagacagctctggacatagccaggaagaagcaccacaaggagtgtgaggagctgctggagcaggcccaggcggggacctttgccttccctctacatgtggactactcctggcgctgcttgctgaagctcccggcccaggctcactgggccagtgggaggctggacatcagcaacaagacctatgagactgtcgccagcctgggagcagccacccctcagggcgagagtgaggactgtcccccgcccttgccagtcaaaaactcttctcggactttggtccaagggtgtgcaagacatgccagtggagatcgttctgaagtctccagcctgagttcagaggcccctgagacccctgagagcctgggcagtccagcctcctcctccagtctgatgagccccttggaacctggggatcccagccaagccccacccaactctgaagagggcctccgagagcccccaggcacctccagacccagcctgacatccgggaccaccccttcggagatgtacctccccgtcagattcagctccgagagcactcgctcctatcggcggggggcgcggagccctgaagatggtccctcagccaggcagcctctgcccagaaggaacgtgccggttggcatcactgaaggagatggctcaaggactgggagtctcccagcaagttctgtgcaacttttgcaagactagctccttgctggcccccacatgccccatgctaggccccaatgttcagagctgggacttgagctcacaaaactggggagctgagacatttgttctcttggatctcactctctctgtcccttgtgcctctgtagctggccttcttcctgccacaggccatgcctctaccaaggacacatggcctttccctgttagggctgatggcggttctttcctatctcattacccgctaggggcctgggagccctgtggctggatctgagtgctcctgagctggcttcagctgcagaactctcagtccctcatcagatcgagactctatttcccccgtcagtctgggggcttcacaagggcaggagagccctccatcactgacttccagatcagggaccctgccaagtagggactgtcttctcagccagccatttattagtctaatattccttcactaaattccaactctatgtctggacctgtgttaggcacttcagataccacacgagtaagacaagggccctgcaggggtggtcctttggtggaaagctggtcttaagggttgggcttgggaataggcagggtcagattccagggcatggctctggactcagctggtttatacctatatgaccattacagttgtctacagatcacatccattctggctggtcaacatgcatgctgtactggctgttaaataaaaatattctgaatgtcactccttttgagggacagcacagccttccctaggcattctcctatattccccagccaaattgtagagtcagatgcacccacatttgcctgtgtccttgatttagcaggaaggaaaggaatagtcggggttgatggatgcccacttctcttctctttctcttggtcaactcaggagccttttagtctgagggaatggagaggcaaagaaagaagggagagtaatagaattgggagggcagagacttaagggttctgcttcccagccctagaaattctatcattgctcagccccaatgagaaagcagatacacctaagccatcatcaaccactaacatctcaacttgccagttgctgggtgctgggccctggcaggaatgggccaagccaagcaggggagactagagagcaccaatggccaacacagctgcctggctggggaggctgtgctgtttcccctggagacctgactggtctgtggttcccacaggaacagggttgtcttttgagcccccagtgtctggtttcattcatctcagacttgttatttcactcatctctaataaaggattggggggtcagttaaaaatgg

SEQ ID NO: 423148 - DNA, 2663 bp, Homo sapiens
  misc_feature (66)..(66): n is a, c, g, or t
gaaaaggaagtgtggagtcaagtatggctgcctgaccatctcacacagcacgataaaccggccccnggtgaagctgaccctgctgacgtgccaagtgaggccaaaccctgaggagaaaaagtgcttcgacctggtgacccacaaccggacgtaccactttcaggcagaggacgagcacgagtgtgaggcgtgggtgtcagtgttgcagaacagcaaggacgaagccctgagcagcgccttcctcggggagcccagcgctggcccggggtcctgggggtccgccggccatgatggggagccgcacgacctcacaaagctgctcatcgcggaggtgaagagcaggcctgggaatagccagtgctgcgactgcggggctgcagaccccacgtggctcagcaccaacctgggcgtgctcacctgcatccagtgctcgggcgtccaccgcgaactgggcgtgcgcttttcgcgcatgcagtcactcaccttggacctgctgggcccctccgagttgttgctggccttgaacatgggaaacacgagcttcaatgaggtcatggaggcccagctaccctcacacggcggccctaaaccctcagctgagagtgacatgggcacccgcagggactacattatggccaagtatgtggagcataggtttgcacgccggtgcacacctgagcctcagcgactctggacagccatttgcaacagggacctcctgtcggtactggaggcctttgccaatgggcaggactttggacagccgctgccagggcctgatgcacaggcacctgaagaactcgtcttgcatttggctgtcaaagtcgccaaccaggcttccctgcctctggtggatttcatcatccagaacggtggtcacctggatgccaaggctgctgacgggaacacggctctgcactacgcagcactctacaaccagcccgactgcctcaagctgctgctgaaggggagagctttggttggcacagtaaatgaagcaggcgagacagctctggacatagccaggaagaagcaccacaaggagtgtgaggagctgctggagcaggcccaggcggggacctttgccttccctctacatgtggactactcctgggtaatttccacagagcctggctctgacagtgaggaggatgaggaagagaagcgctgcttgctgaagctcccggcccaggctcactgggccagtgggaggctggacatcagcaacaagacctatgagactgtcgccagcctgggagcagccacccctcagggcgagagtgaggactgtcccccgcccttgccagtcaaaaactcttctcggactttggtccaagggtgtgcaagacatgccagtggagatcgttctgaagtctccagcctgagttcagaggcccctgagacccctgagagcctgggcagtccagcctcctcctccagtctgatgagccccttggaacctggggatcccagccaagccccacccaactctgaagagggcctccgagagcccccaggcacctccagacccagcctgacatccgggaccaccccttcggagatgtacctccccgtcagattcagctccgagagcactcgctcctatcggcggggggcgcggagccctgaagatggtccctcagccaggcagcctctgcccagaaggaacgtgccggttggcatcactgaaggagatggctcaaggactgggagtctcccagcaagttctgtgcaacttttgcaagactagctccttgctggcccccacatgccccatgctaggccccaatgttcagagctgggacttgagctcacaaaactggggagctgagacatttgttctcttggatctcactctctctgtcccttgtgcctctgtagctggccttcttcctgccacaggccatgcctctaccaaggacacatggcctttccctgttagggctgatggcggttctttcctatctcattacccgctaggggcctgggagccctgtggctggatctgagtgctcctgagctggcttcagctgcagaactctcagtccctcatcagatcgagactctatttcccccgtcagtctgggggcttcacaagggcaggagagccctccatcactgacttccagatcagggaccctgccaagtagggactgtcttctcagccagccatttattagtctaatattccttcactaaattccaactctatgtctggacctgtgttaggcacttcagataccacacgagtaagacaagggccctgcaggggtggtcctttggtggaaagctggtcttaagggttgggcttgggaataggcagggtcagattccagggcatggctctggactcagctggtttatacctatatgaccattacagttgtctacagatcacatccattctggctggtcaacatgcatgctgtactggctgttaaataaaaatattctgaatgtcactccttttgagggacagcacagccttccctaggcattctcctatattccccagccaaattgtagagtcagatgcacccacatttgcctgtgtccttgatttagcaggaaggaaaggaatagtcggggttgatggatgcccacttctcttctctttctcttggtcaactcaggagaacgcgtaggagaacgcgtcaaaatcg

SEQ ID NO: 423149 - DNA, 2719 bp, Homo sapiens
  misc_feature (66)..(66): n is a, c, g, or t
gaaaaggaagtgtggagtcaagtatggctgcctgaccatctcacacagcacgataaaccggccccnggtgaagctgaccctgctgacgtgccaagtgaggccaaaccctgaggagaaaaagtgcttcgacctggtgacccacaaccggacgtaccactttcaggcagaggacgagcacgagtgtgaggcgtgggtgtcagtgttgcagaacagcaaggacgaagccctgagcagcgccttcctcggggagcccagcgctggcccggggtcctgggggtccgccggccatgatggggagccgcacgacctcacaaagctgctcatcgcggaggtgaagagcaggcctgggaatagccagtgctgcgactgcggggctgcagaccccacgtggctcagcaccaacctgggcgtgctcacctgcatccagtgctcgggcgtccaccgcgaactgggcgtgcgcttttcgcgcatgcagtcactcaccttggacctgctgggcccctccgagttgttgctggccttgaacatgggaaacacgagcttcaatgaggtcatggaggcccagctaccctcacacggcggccctaaaccctcagctgagagtgacatgggcacccgcagggactacattatggccaagtatgtggagcataggtttgcacgccggtgcacacctgagcctcagcgactctggacagccatttgcaacagggacctcctgtcggtactggaggcctttgccaatgggcaggactttggacagccgctgccagggcctgatgcacaggcacctgaagaactcgtcttgcatttggctgtcaaagtcgccaaccaggcttccctgcctctggtggatttcatcatccagaacggtggtcacctggatgccaaggctgctgacgggaacacggctctgcactacgcagcactctacaaccagcccgactgcctcaagctgctgctgaaggggagagctttggttggcacagtaaatgaagcaggcgagacagctctggacatagccaggaagaagcaccacaaggagtgtgaggagctgctggagcaggcccaggcggggacctttgccttccctctacatgtggactactcctgggtaatttccacagagcctggctctgacagtgaggaggatgaggaagagaagcgctgcttgctgaagctcccggcccaggctcactgggccagtgggaggctggacatcagcaacaagacctatgagactgtcgccagcctgggagcagccacccctcagggcgagagtgaggactgtcccccgcccttgccagtcaaaaactcttctcggactttggtccaagggtgtgcaagacatgccagtggagatcgttctgaagtctccagcctgagttcagaggcccctgagacccctgagagcctgggcagtccagcctcctcctccagtctgatgagccccttggaacctggggatcccagccaagccccacccaactctgaagagggcctccgagagcccccaggcacctccagacccagcctgacatccgggaccaccccttcggagatgtacctccccgtcagattcagctccgagagcactcgctcctatcggcggggggcgcggagccctgaagatggtccctcagccaggcagcctctgcccagaaggaacgtgccggttggcatcactgaaggagatggctcaaggactgggagtctcccagcaagttctgtgcaacttttgcaagactagctccttgctggcccccacatgccccatgctaggccccaatgttcagagctgggacttgagctcacaaaactggggagctgagacatttgttctcttggatctcactctctctgtcccttgtgcctctgtagctggccttcttcctgccacaggccatgcctctaccaaggacacatggcctttccctgttagggctgatggcggttctttcctatctcattacccgctaggggcctgggagccctgtggctggatctgagtgctcctgagctggcttcagctgcagaactctcagtccctcatcagatcgagactctatttcccccgtcagtctgggggcttcacaagggcaggagagccctccatcactgacttccagatcagggaccctgccaagtagggactgtcttctcagccagccatttattagtctaatattccttcactaaattccaactctatgtctggacctgtgttaggcacttcagataccacacgagtaagacaagggccctgcaggggtggtcctttggtggaaagctggtcttaagggttgggcttgggaataggcagggtcagattccagggcatggctctggactcagctggtttatacctatatgaccattacagttgtctacagatcacatccattctggctggtcaacatgcatgctgtactggctgttaaataaaaatattctgaatgtcactccttttgagggacagcacagccttccctaggcattctcctatattccccaccaagcaggggagactagagagcaccaatggccaacacagctgcctggctggggaggctgtgctgtttcccctggagacctgactggtctgtggttcccacaggaacagggttgtcttttgagcccccagtgtctggtttcattcatctcagacttgttatttcactcatctctaataaaggattggggggtcagttaaaaatgg

SEQ ID NO: 423150 - DNA, 848 bp, Homo sapiens
aggaagaagcaccacaaggagtgtgaggagctggtgaggactcggggaggcaaggggcccctgactctttctctctccctgctgagcccccaaccctctgaaccaccaagcctttgtttttggcagctggagcaggcccaggcggggacctttgccttccctctacatgtggactactcctgggtaatttccacagagcctggctctgacagtgaggaggatgaggaagagaaggtgggtcccagccctgtccctcaggcctctggatggcagaaggaaagagccagattgggcctggtgtgtgttggcgggggcggtgaggcggggggacagggctacaccggaggaaccaggctgtcctcatcctcaatcttttgctctggcagcgctgcttgctgaagctcccggcccaggctcactgggccagtgggaggctggacatcagcaacaagacctatgagactgtcgccagcctgggagcagccacccctcagggcgagagtgaggactgtcccccgcccttgccagtcaaaaactcttctcggactttggtccaagggtgtgcaagacatgccagtggagacagttggatgcccagataaatgctcaccatgccattcacagaggacctgtatatgctggggcactgagctgagtgcatatgttagtccgtactatccttatgatgacctcccaggaaggggttctcatcttccccttacagataaaagaacagaggtgttaagtcacatgtttaagatcccacagctaataagtctctgatgtaggattcaaatctcagcccatcttattccaaattcctcaatgctccacttaacaagagagaa

SEQ ID NO: 423151 - DNA, 3168 bp, Homo sapiens
  misc_feature (66)..(66): n is a, c, g, or t
  misc_feature (1801)..(1801): n is a, c, g, or t
  misc_feature (1833)..(1833): n is a, c, g, or t
gaaaaggaagtgtggagtcaagtatggctgcctgaccatctcacacagcacgataaaccggccccnggtgaagctgaccctgctgacgtgccaagtgaggccaaaccctgaggagaaaaagtgcttcgacctggtgacccacaaccggacgtaccactttcaggcagaggacgagcacgagtgtgaggcgtgggtgtcagtgttgcagaacagcaaggacgaagccctgagcagcgccttcctcggggagcccagcgctggcccggggtcctgggggtccgccggccatgatggggagccgcacgacctcacaaagctgctcatcgcggaggtgaagagcaggcctgggaatagccagtgctgcgactgcggggctgcagaccccacgtggctcagcaccaacctgggcgtgctcacctgcatccagtgctcgggcgtccaccgcgaactgggcgtgcgcttttcgcgcatgcagtcactcaccttggacctgctgggcccctccgagttgttgctggccttgaacatgggaaacacgagcttcaatgaggtcatggaggcccagctaccctcacacggcggccctaaaccctcagctgagagtgacatgggcacccgcagggactacattatggccaagtatgtggagcataggtttgcacgccggtgcacacctgagcctcagcgactctggacagccatttgcaacagggacctcctgtcggtactggaggcctttgccaatgggcaggactttggacagccgctgccagggcctgatgcacaggcacctgaagaactcgtcttgcatttggctgtcaaagtcgccaaccaggcttccctgcctctggtggatttcatcatccagaacggtggtcacctggatgccaaggctgctgacgggaacacggctctgcactacgcagcactctacaaccagcccgactgcctcaagctgctgctgaaggggagagctttggttggcacagtaaatgaagcaggcgagacagctctggacatagccaggaagaagcaccacaaggagtgtgaggagctgctggagcaggcccaggcggggacctttgccttccctctacatgtggactactcctgggtaatttccacagagcctggctctgacagtgaggaggatgaggaagagaagcgctgcttgctgaagctcccggcccaggctcactgggccagtgggaggctggacatcagcaacaagacctatgagactgtcgccagcctgggagcagccacccctcagggcgagagtgaggactgtcccccgcccttgccagtcaaaaactcttctcggactttggtccaagggtgtgcaagacatgccagtggagatcgttctgaagtctccagcctgagttcagaggcccctgagacccctgagagcctgggcagtccagcctcctcctccagtctgatgagccccttggaacctggggatcccagccaagccccacccaactctgaagagggcctccgagagcccccaggcacctccagacccagcctgacatccgggaccaccccttcggagatgtacctccccgtcagattcagctccgagagcactcgctcctatcggcggggggcgcggagccctgaagatggtccctcagccaggcagcctctgcccagaaggaacgtgccggttggcatcactgaaggagatggctcaaggactgggagtctcccagcaagttctgtgcaacttttgcaagactagctccttgctggcccccacatgccccatgctaggccccaagtggggttgttngccagcaacgcaaggggaacccccacgccgangagaagacaaaacaaagggaaaagggagggggggtggtgtgcgaggtgggggtggggtggggggtgctgcgagatgggagtggtgggggggggggggggaaaactggggagctgagacatttgttctcttggatctcactctctctgtcccttgtgcctctgtagctggccttcttcctgccacaggccatgcctctaccaaggacacatggcctttccctgttagggctgatggcggttctttcctatctcattacccgctaggggcctgggagccctgtggctggatctgagtgctcctgagctggcttcagctgcagaactctcagtccctcatcagatcgagactctatttcccccgtcagtctgggggcttcacaagggcaggagagccctccatcactgacttccagatcagggaccctgccaagtagggactgtcttctcagccagccatttattagtctaatattccttcactaaattccaactctatgtctggacctgtgttaggcacttcagataccacacgagtaagacaagggccctgcaggggtggtcctttggtggaaagctggtcttaagggttgggcttgggaataggcagggtcagattccagggcatggctctggactcagctggtttatacctatatgaccattacagttgtctacagatcacatccattctggctggtcaacatgcatgctgtactggctgttaaataaaaatattctgaatgtcactccttttgagggacagcacagccttccctaggcattctcctatattccccagccaaattgtagagtcagatgcacccacatttgcctgtgtccttgatttagcaggaaggaaaggaatagtcggggttgatggatgcccacttctcttctctttctcttggtcaactcaggagccttttagtctgagggaatggagaggcaaagaaagaagggagagtaatagaattgggagggcagagacttaagggttctgcttcccagccctagaaattctatcattgctcagccccaatgagaaagcagatacacctaagccatcatcaaccactaacatctcaacttgccagttgctgggtgctgggccctggcaggaatgggccaagccaagcaggggagactagagagcaccaatggccaacacagctgcctggctggggaggctgtgctgtttcccctggagacctgactggtctgtggttcccacaggaacagggttgtcttttgagcccccagtgtctggtttcattcatctcagacttgttatttcactcatctctaataaaggattggggggtcagttaaaaatgg

SEQ ID NO: 423152 - DNA, 2970 bp, Homo sapiens
  misc_feature (66)..(66): n is a, c, g, or t
gaaaaggaagtgtggagtcaagtatggctgcctgaccatctcacacagcacgataaaccggccccnggtgaagctgaccctgctgacgtgccaagtgaggccaaaccctgaggagaaaaagtgcttcgacctggtgacccacaaccggacgtaccactttcaggcagaggacgagcacgagtgtgaggcgtgggtgtcagtgttgcagaacagcaaggacgaagccctgagcagcgccttcctcggggagcccagcgctggcccggggtcctgggggtccgccggccatgatggggagccgcacgacctcacaaagctgctcatcgcggaggtgaagagcaggcctgggaatagccagtgctgcgactgcggggctgcagaccccacgtggctcagcaccaacctgggcgtgctcacctgcatccagtgctcgggcgtccaccgcgaactgggcgtgcgcttttcgcgcatgcagtcactcaccttggacctgctgggcccctccgagttgttgctggccttgaacatgggaaacacgagcttcaatgaggtcatggaggcccagctaccctcacacggcggccctaaaccctcagctgagagtgacatgggcacccgcagggactacattatggccaagtatgtggagcataggtttgcacgccggtgcacacctgagcctcagcgactctggacagccatttgcaacagggacctcctgtcggtactggaggcctttgccaatgggcaggactttggacagccgctgccagggcctgatgcacaggcacctgaagaactcgtcttgcatttggctgtcaaagtcgccaaccaggcttccctgcctctggtggatttcatcatccagaacggtggtcacctggatgccaaggctgctgacgggaacacggctctgcactacgcagcactctacaaccagcccgactgcctcaagctgctgctgaaggggagagctttggttggcacagtaaatgaagcaggcgagacagctctggacatagccaggaagaagcaccacaaggagtgtgaggagctgctggagcaggcccaggcggggacctttgccttccctctacatgtggactactcctgggtaatttccacagagcctggctctgacagtgaggaggatgaggaagagaagcgctgcttgctgaagctcccggcccaggctcactgggccagtgggaggctggacatcagcaacaagacctatgagactgtcgccagcctgggagcagccacccctcagggcgagaatcgttctgaagtctccagcctgagttcagaggcccctgagacccctgagagcctgggcagtccagcctcctcctccagtctgatgagccccttggaacctggggatcccagccaagccccacccaactctgaagagggcctccgagagcccccaggcacctccagacccagcctgacatccgggaccaccccttcggagatgtacctccccgtcagattcagctccgagagcactcgctcctatcggcggggggcgcggagccctgaagatggtccctcagccaggcagcctctgcccagaaggaacgtgccggttggcatcactgaaggagatggctcaaggactgggagtctcccagcaagttctgtgcaacttttgcaagactagctccttgctggcccccacatgccccatgctaggccccaatgttcagagctgggacttgagctcacaaaactggggagctgagacatttgttctcttggatctcactctctctgtcccttgtgcctctgtagctggccttcttcctgccacaggccatgcctctaccaaggacacatggcctttccctgttagggctgatggcggttctttcctatctcattacccgctaggggcctgggagccctgtggctggatctgagtgctcctgagctggcttcagctgcagaactctcagtccctcatcagatcgagactctatttcccccgtcagtctgggggcttcacaagggcaggagagccctccatcactgacttccagatcagggaccctgccaagtagggactgtcttctcagccagccatttattagtctaatattccttcactaaattccaactctatgtctggacctgtgttaggcacttcagataccacacgagtaagacaagggccctgcaggggtggtcctttggtggaaagctggtcttaagggttgggcttgggaataggcagggtcagattccagggcatggctctggactcagctggtttatacctatatgaccattacagttgtctacagatcacatccattctggctggtcaacatgcatgctgtactggctgttaaataaaaatattctgaatgtcactccttttgagggacagcacagccttccctaggcattctcctatattccccagccaaattgtagagtcagatgcacccacatttgcctgtgtccttgatttagcaggaaggaaaggaatagtcggggttgatggatgcccacttctcttctctttctcttggtcaactcaggagccttttagtctgagggaatggagaggcaaagaaagaagggagagtaatagaattgggagggcagagacttaagggttctgcttcccagccctagaaattctatcattgctcagccccaatgagaaagcagatacacctaagccatcatcaaccactaacatctcaacttgccagttgctgggtgctgggccctggcaggaatgggccaagccaagcaggggagactagagagcaccaatggccaacacagctgcctggctggggaggctgtgctgtttcccctggagacctgactggtctgtggttcccacaggaacagggttgtcttttgagcccccagtgtctggtttcattcatctcagacttgttatttcactcatctctaataaaggattggggggtcagttaaaaatgg

SEQ ID NO: 423153 - DNA, 1932 bp, Homo sapiens
ccctcaggcctctggatggcagaaggaaagagccagattgggcctgcgctgcttgctgaagctcccggcccaggctcactgggccagtgggaggctggacatcagcaacaagacctatgagactgtcgccagcctgggagcagccacccctcagggcgagagtgaggactgtcccccgcccttgccagtcaaaaactcttctcggactttggtccaagggtgtgcaagacatgccagtggagatcgttctgaagtctccagcctgagttcagaggcccctgagacccctgagagcctgggcagtccagcctcctcctccagtctgatgagccccttggaacctggggatcccagccaagccccacccaactctgaagagggcctccgagagcccccaggcacctccagacccagcctgacatccgggaccaccccttcggagatgtacctccccgtcagattcagctccgagagcactcgctcctatcggcggggggcgcggagccctgaagatggtccctcagccaggcagcctctgcccagaaggaacgtgccggttggcatcactgaaggagatggctcaaggactgggagtctcccagcaagttctgtgcaacttttgcaagactagctccttgctggcccccacatgccccatgctaggccccaatgttcagagctgggacttgagctcacaaaactggggagctgagacatttgttctcttggatctcactctctctgtcccttgtgcctctgtagctggccttcttcctgccacaggccatgcctctaccaaggacacatggcctttccctgttagggctgatggcggttctttcctatctcattacccgctaggggcctgggagccctgtggctggatctgagtgctcctgagctggcttcagctgcagaactctcagtccctcatcagatcgagactctatttcccccgtcagtctgggggcttcacaagggcaggagagccctccatcactgacttccagatcagggaccctgccaagtagggactgtcttctcagccagccatttattagtctaatattccttcactaaattccaactctatgtctggacctgtgttaggcacttcagataccacacgagtaagacaagggccctgcaggggtggtcctttggtggaaagctggtcttaagggttgggcttgggaataggcagggtcagattccagggcatggctctggactcagctggtttatacctatatgaccattacagttgtctacagatcacatccattctggctggtcaacatgcatgctgtactggctgttaaataaaaatattctgaatgtcactccttttgagggacagcacagccttccctaggcattctcctatattccccagccaaattgtagagtcagatgcacccacatttgcctgtgtccttgatttagcaggaaggaaaggaatagtcggggttgatggatgcccacttctcttctctttctcttggtcaactcaggagccttttagtctgagggaatggagaggcaaagaaagaagggagagtaatagaattgggagggcagagacttaagggttctgcttcccagccctagaaattctatcattgctcagccccaatgagaaagcagatacacctaagccatcatcaaccactaacatctcaacttgccagttgctgggtgctgggccctggcaggaatgggccaagccaagcaggggagactagagagcaccaatggccaacacagctgcctggctggggaggctgtgctgtttcccctggagacctgactggtctgtggttcccacaggaacagggttgtcttttgagcccccagtgtctggtttcattcatctcagacttgttatttcactcatctctaataaaggattggggggtcagttaaaaatgg

SEQ ID NO: 423154 - DNA, 814 bp, Homo sapiens
  misc_feature (66)..(66): n is a, c, g, or t
gaaaaggaagtgtggagtcaagtatggctgcctgaccatctcacacagcacgataaaccggccccnggtgaagctgaccctgctgacgtgccaagtgaggccaaaccctgaggagaaaaagtgcttcgacctggtgacccacaaccggacgtaccactttcaggcagaggacgagcacgagtgtgaggcgtgggtgtcagtgttgcagaacagcaaggacgaagccctgagcagcgccttcctcggggagcccagcgctggcccggggtcctgggggtccgccggccatgatggggagccgcacgacctcacaaagctgctcatcgcggaggtgaagagcaggcctgggaatagccagtgctgcgactgcggggctgcagaccccacgtggctcagcaccaacctgggcgtgctcacctgcatccagtgctcgggcgtccaccgcgaactgggcgtgcgcttttcgcgcatgcagtcactcaccttggacctgctgggcccctccgagttgttgctggccttgaacatgggaaacacgagcttcaatgaggtcatggaggcccagctaccctcacacggcggccctaaaccctcagctgagagtgacatgggcacccgcagggactacattatggccaagtatgtggagcataggtttgcacgccggtgcacacctgagcctcagcgactctggacagccatttgcaacagggacctcctgtcggtactggaggcctttgccaatgggcaggactttggacagccgctgccagggcctgatgcacaggtgagaacccctccaagggccacttat

SEQ ID NO: 423155 - DNA, 1505 bp, Homo sapiens
  misc_feature (946)..(946): n is a, c, g, or t
catcgttgtggtcccttgcccctcgctgtgtgtcgtcattgtattgtgcttgttccgtctgtcttataagagaggatcgtttgttgtcatccggattgcggtccctttctgctcgtgtgttgtgtctctttccccgtgtgtgttgttgtgtcgcgcctcgttctgttttgtctgttctgtgcgtttttttgtgtgtttcttctctctttctttctgtgtctgtttgcgttttgtgttgtttgtgtgttttttttagtatggtctgaataaaatccagcatagatgtattagttttattctgggtataatggctcggtgtctgtgtcccaacagctttcttcttaagcgcaaaccacccttaagtgaaacttgccatttgtttttgtgttctttttaagtctccagatcttgctaggacacttcttccagaccaacagtcagatagttgtggcacgtgatcctatttgaaatagaggtggtttaaatcagccaagcttggtgatctggaggtctccatttatctttatggtgtcaattgcagataacgtttgaatgcgatggtaaaaatctaaaagttggtgtccatccacatacactcggaaacgtgggtgctcacaaagaatttccaccctgaatggctggtctggaatgaatggaaagtaagggattgctgactgttcttcacccctctccccagatatacaagaatttctgagtagctgccgatctgtgaacacagctttgagttcgattgccacatcggcaggagggtcttctgagtccccacaggtcaagctgattgcaaagctctctgggttgaggtctacgatgcccatcactaacaccttcttgcctggtctcatgccacctttaatgtgcccacaaaatggaactatcagtcgtgggaagtacacgtccgcttgaactggcggacgcgtgggtcgancccacgcgtttctctttaattcccacctaagcctctgggtaatattgtaaatattgttttaaaatgcatcagcctatgctatacaatctgaatgttattttaacttatagttttttttaatatatatatttaactataaggacagtttagggaacaagttacctaccacatttcactttagtgtacctatttacagaaagattaaactgccacctgcgggcacattcccataaatgtgtactttactttaaaaagaacatgccacgattttgtctttctgtggactcaacattcacttcgattaaaaatagcaatttgaccaagttggacttccactacaaagcagctgttttccaaagttcaatgctgacatatatgtatattaaaataattgcctatttattaatctacaaatagacaacgttggcatgttcttttctgtttgtctattaatgggcctgcttcttagcaatattagaatgttttataaaagcaattcatgttacttttctggtcttttcatggcatatgagcaaataataaactatttacactacta

SEQ ID NO: 423156 - DNA, 837 bp, Homo sapiens
  misc_feature (717)..(717): n is a, c, g, or t
tgcttgatctaagtcattaatctactagaagaggggaatgagtatctgtttatagggcagtttttatcctccttggagtatttttcattttctgatccaccccaaagccccagataaattcctttgtacctttatgaactaacttgagtatatattgccttccccctttcctgcccatcttccccacccccatccccaggtatgattaacaatgcactaaccatgtactaatgcaatagatcttggctttttattctcttctgtttgtgttgtttggctgtcattttcaatgcagtgctgaagactgtgccctttactgctcgcaccgccaagcgtggctctcggtttttctgcgaacctgttctcactgaggaataccattactaaactattactctttctcacctgatgctcttaaaaggttgctacaggttttttgatgtcttatgtccccctctgtgtgtctgtcagggcccaccaacatgctagcatggaattgccatctccatcatgttatattttgtgttgttctcatgctgcatggttttgcatttcaattattattgctcactcactggccactttcaatacatgtatgtattcacattgctgtaacagtctggatgtgtttgacagctgaattcatagaattgttcacagaaattttcagaaaaatagagcaaaaatattaagagcacttctttgagaatcagtatntggtaccaagtagattgcttataagatttttgagctaatgtccttcaacatatccattaataacataactgctatacctaacatgtattaagaacttactgtgttcaggttggatgcagt

SEQ ID NO: 423157 - DNA, 1462 bp, Homo sapiens
ttgttgtcctggactcaagctgtaccccccgcctcagcctcctgagtagctgggactggaggcacaaatcattgcatctggcattcttgaaatttttaatagagaaatatgctctgacagtgatatactagagacataagtgcatttataatggtgtaagtttcattaggtagatacttcgggtttttggttttaaatcaatactgacagttccctaacttgtctcccaatgctttgtgtttctttttttttccatgttaattttagtatggtttcaacatggtcatgtctcatccacacgctgtcaatgagattgcactaagcctgaacaacaagaatcccagaacaaaagcccttgtcttagaactgttggcagccgtttgtcttgtcagaggcgggcatgaaatcattttatcagcatttgataactttaaagaggtttgtggagaaaaacagcgctttgagaagttgatggaacatttcaggaatgaagacaataacatagattttatggtgagttatttcagtattcaataaagcaaactcagtttcaatactttttttctaaatacacacacacacacacacacacacacacacacacacatatttatattacaaaggacagggaattgcaattaatatgctatagatccaatctagaatgtccctcttaatctgtatttctctttgatttccattttattccttacatacacggtatagtaaagacaaaagtactaatcatagcaaataaaggggaagccgtgcagttggaaacagccatgcctggtgcaaatgctgccattgtttaattgttgatgatgctgcataagaatccttaaggtagaagcaatcttgaccttttttatttttgcaggcccctgccagtgcccttctccagactatattcttaaaaattaaagtgctttggtttgtagagttgactgtatgtatctccaaaatgaatatgcagcagtgattttttttttcctccctgatctctttccctgctttggtaattctgtgagggtgtaatcatattggggctgtccttggcaggttaggtgacatacaagaacatgcggttccacagcagtcctgtcattctcgggtaagaacatcaaagtgagttgcagcacttctgcattcatacacgtaaatcttaatctggaaggaagatagaatctaccatagtgaatttctccagaagttttacgcttgagtgcacccagatctgtaggcgttgacccaatccagttgccctagggaaattctagacccaggagatcctaaccgggctgtaatttcccagatcacttctaacctgaagcagacgtaccaatgactccttaccttgcagagcctatgcttaggatgccaagtgaatttttcatttgaattgcttcagtgattataaaacatgaaacatagctttgcagatttctaaccctttttgtga

SEQ ID NO: 423158 - DNA, 8040 bp, Homo sapiens
  misc_feature (2077)..(2077): n is a, c, g, or t
gcggccgcgggcccggcagaaggccgagtaggagggaccacgcgccgggggccgcgatctctggcagggggcggtgtgccagcggagcaccatgcacataggcgcccagcgccccgactacccctcccgaggaaaagaggccggggccgcgctggggcggcggagagcatgagggaggccggggggcggctcggcttggagcgctgctagggagcggtgcgcgccgcacacccgcctgggcgcggcggagggcggggagccgggcaggtcgcgcctgcgggcggcagccgaccgccgggagctgttctgatttccgacgcgcacgctaggggcccggagcagcccccggccccggcgcgccgccgacatgggcaacgcagggagcatggattcgcagcagaccgatttcagggcgcacaacgtgcctttgaagctgccgatgccagagccaggtgaactggaggagcgatttgccatcgtgctgaacgctatgaacctacctcctgacaaagccaggttactgcggcagtatgataatgagaaaaaatgggaactgatttgtgatcaggaacgattccaggtgaagaatcctccccatacatacattcaaaagctcaaaggctatctggatccagctgtaaccaggaagaaattcagacggcgtgttcaagaatctacacaagtgctaagagaactggaaatttctttgagaactaaccacattggatgggtcagagaatttctgaatgaagaaaacaaaggtcttgatgttctagtggaatatctctcatttgcacagtacgcggtaacttttgactttgaaagtgtggagagtactgtggagagctcggtggacaaatcaaagccctggagtaggtccatcgaggacctgcacagagggagcaacctgccctcacctgtgggcaacagtgtctcccgctctggaagacattctgcactgcgatataatacattgccaagcagaagaactctgaaaaattcaagattagtgagtaagaaagatgatgtgcatgtctgtatcatgtgtttacgtgccatcatgaattatcagtatggtttcaacatggtcatgtctcatccacacgctgtcaatgagattgcactaagcctgaacaacaagaatcccagaacaaaagcccttgtcttagaactgttggcagccgtttgtcttgtcagaggcgggcatgaaatcattttatcagcatttgataactttaaagaggtttgtggagaaaaacagcgctttgagaagttgatggaacatttcaggaatgaagacaataacatagattttatggtggcttctatgcagtttattaatattgtagtccattcagtagaagatatgaatttcagagttcacctgcagtatgaatttaccaaattaggcctggacgaatacttggacaagctgaaacacactgagagtgacaagcttcaagtccagatccaggcttacctggacaatgtttttgatgtaggagctctactggaagatgctgaaactaagaatgctgccttggagagggtggaagaactggaagaaaacatttctcatttatctgaaaaactgcaagacacagagaatgaagccatgtccaagattgtggaactggaaaagcaactcatgcagaggaacaaggagctggatgtcgttcgggaaatctacaaagatgcaaatactcaagttcacacattaagaaaaatggtcaaagaaaaagaagaagcaattcaaagacagtctaccctggaaaaaaagattcatgagctagagaaacaagggaccattaaaattcagaagaaaggggatggggatatcgccatactgccagttgtggcttctggcacattgtccatggggtcagaagtggtagcaggtaactctgtgggacccacaatgggggccgcttcctcaggacccttgccccctcctccaccaccactgcctccctcatcagacacacctgaaacagtgcaaaatggtccagtaacaccacctatgccaccgccgccgccgccccctcctccacctcctcctcccccaccgccccctccncctcctcctctcccaggccctgcagctgagactgtaccagctcctcccttagcacctccccttccctctgcacctccgctgcctggaacatcttcacccacagtggttttcaactcaggattagcagatgggccaatcaagcttttctctgtgaaaattaagaagccaatcaagacgaagttcagaatgccagtgtttaactgggttgctctgaagcccaatcagatcaatggcacagtcttcaatgaaattgatgatgagcgaattctggaggatttaaatgtggatgaatttgaggaaatattcaagacaaaagcccaaggacctgccattgatctttcttcaagcaaacagaagataccacagaagggatcaaacaaagtgacattactagaagcaaacagggccaaaaatcttgccataactttaaggaaagctggaaagactgctgatgaaatatgtaaagctattcatgtatttgacttgaagacactgcctgtggactttgtggaatgcttgatgcggttcctaccaactgagaatgaagtgaaagtgcttcggctctacgagcgggaaaggaagcctctggaaaacttgtcagatgaagatcggttcatgatgcagtttagtaaaatcgagaggctcatgcagaagatgaccatcatggccttcattgggaactttgctgaaagcattcagatgctgactcctcaactacatgcgattatagcagcatctgtctctataaagtcgtcccaaaaactcaagaaaattctggagatcatcttagcccttggaaactacatgaatagcagtaaaagaggagcagtttatggatttaaacttcagagtttagatctgctcttagatacaaagtcaacagacagaaagcaaacactgttgcactatatatccaatgtggtgaaagaaaaatatcaccaagtgtccctgttttataatgagcttcattatgtggaaaaagctgctgcagtctcccttgagaatgttttgctggatgtcaaggagctccagaggggaatggacttgaccaagagagagtacaccatgcatgaccataacacgctgctgaaggagttcatcctcaacaatgaggggaagctgaagaagctgcaggatgatgccaagatcgcacaggatgcctttgatgatgttgtgaagtattttggagaaaaccccaagacaacaccaccctctgtcttctttcctgtctttgtccggtttgtgaaagcatataagcaagcagaagaggaaaatgagctgaggaaaaagcaggaacaagctctcatggaaaaactcctagagcaagaagctctgatggagcagcaggatccaaagtctccttctcataaatcaaagaggcagcagcaagagttaattgcagaattaagaagacgacaagttaaagataacagacatgtatatgagggaaaagatggtgccattgaagatattatcacagccttaaagaagaataatatcactaaatttccaaatgttcactcgaggatcttagaaaccaaccatacagacgagccgatgcggtgaggagaagcgtcaggcggcgctttgatgatcagaacttgcgttctgttaatggtgccgaaataacaatgtgaacctgagactggcctgcatgaatacagggtgtgcgtgaatgaaactgcccacatgaactttatgtgctacgatttaactgcagccttgaacacacacaaaaatattcttaagggctcagatttagcaaacacggaagaattttaaaatgagctctcctttcaacccttgttaacaagtgcctaaaaatggaagtacctgttcagattaatcaaagcaataggatttgatttgattaggtatctttttacaccagtatgttatttttaaccaaaatgtaaagttcttattaaactcattacctgccattgtgattgtcccatcatggcccacctggtttcctgatgttgtaaataacatcaatgcatctgctgtgggtcctttgctgagatgtcttcgaaggaattttgttttagccatatccatcaactttgtattttacttgcaatttggaagaaggaaagtcacatgatgaaactccttttgtctataaccaggccctggcaaagtgcaaacaggatgcaactgcagtggcacaaaggtcactcaatcctttgtttccagtttcacattctactacttctgtgctagagaacgatgctctgtgagaggcattcactagtatgaatgtggggatatagtgtataagacttatttgcagtactgtgttcttcagctagaggcagctttttaaataatgcaagtgtatttattagcattaaaattaacatctcagtaatcagcattagcatttctgaggaccattattaattctgagaacagaaattggtgccttgcaaggaagtttactagctctatcaacaagcattcaaggttacatctgctagcagagtagtgttaggaacctggccttactctcctctgacaatcgcaattttttcttattttttataaattcaagaagatacacttggcatcgtgtatcgaggctaagtttttcatgcatttcccagactacttatggagaattgcagtttaagttgctgaaaagtattaacatggtattaagcttaaataatacgtaatgggactagatggcccactaagccactgttattttccttcctctctggcagggcacttgatccattccaaagtcaaaaactggactgaagctaaatttgtacttttcataatatacattctgcttctggcttatcttcttggtacatcaatatattaattgtaaagtttattgtatagtatttaaccgctgaagttcctattttatgttgtgcttatgtgaaccccttggtgaaggtcccttttccttggatgtgtagttatatgatctttttaaatgtacagatattttgctataaaatcggtgcagttttttatggtttttacacttctctttaattcccacctaagcctctgggtaatattgtaaatattgttttaaaatgcatcagcctatgctatacaatctgaatgttattttaacttatagttttttttaatatatatatttaactataaggacagtttagggaacaagttacctaccacatttcactttagtgtacctatttacagaaagattaaactgccacctgcgggcacattcccataaatgtgtactttactttaaaaagaacatgccacgattttgtctttctgtggactcaacattcacttcgattaaaaatagcaatttgaccaagttggacttccactacaaagcagctgttttccaaagttcaatgctgacatatatgtatattaaaataattgcctatttattaatctacaaatagacaacgttggcatgttcttttctgtttgtctattaatgggcctgcttcttagcaatattagaatgttttataaaagcaattcatgttacttttctggtcttttcatggcatatgagcaaataataaactatttacactactaaaaaaaaaaaaaaactcgagttttttttttttttttttgtagaaaattcctttattatagtgcaaattactttcagcagtgacataatgtaacaacacatttagcaacattttacaccacacagtaaataagaaagtgtttctttgaaaatatgtcatcataggaacattatttctacattaatgccagaaaatgccaaggccgtttatctcaaggcaaacagggctccctccttccttttgggtattttctttttaacacaaatgaaatgacttgccattttaacaaatcctcaattctaaaagtgatctctcagggggctttgaactaaggtcggcaagatttgaaatggggcttcaaaattttaaataataattttaaaatacttctggaatagcccaaaaagtagaagtcacttctattaagttttaagtagatatacacactcactccaattttactgtagaaatggacagattgtctaaagcctgctttctattcccccagagcctgattgttatttatactccttggttttggttattgcagaactagggctctggtcagaaataacaccttacatacccgaatactttcctgtggaagctttacattgcattttccatcctgaaattctcaccttagaccttacaggcccaggagagggtgtgaatattgttttcagtttacagctaaagccccttactaatttgggctatacctgaatcaaatcatcacatcatttagattaatcccaataggcttatccaagaggttcccactaacctcacagagaaacaaacagttaacattgtattttcacactaagctgcctaagggcttggctgctaatgagttagctgataggtagacagaataagcgtgtcaattccaatcagtacacgccctgctcctctagtttctgctgaattatgcagtgggtgggaatggttggccactcaaaacagtcttcctatggggctcttccaccataagttggatcaaaactccacaaatgtatttcaaggtgccctttaagtctctcaaatttagggacttttaagtgacaagccatgagaagttaatcacaggcttgaaaatacctggaaccacagaacagcccccacggaacaggctgaatatggttaaataagttggctggtacataaagcttttcaatgtacagccagtcttgttggatacagtgtcttcttatataatacaatggaactgtgctaaacagtttcaaagttgagaagaatccaaatgtatcacctataaaaaattcataattttagtttattttagactttggtactgaaacactgtctacattcttgacacttgaaaatgacatggtcacttcagtgcctctgcatgttgtgtaaaaaaaaaaaaaaaactcaaaaaaggaaagcaggacaaggatgtgtcattacaagacacagtatgctgtacaaacaaaacctaaattatatataaatacacccccaccccagaaccctgtcttccctcactacctgatcaaagcaatgccaagggtccctccctccagggccaatgtagcttttaaagtccagaacccaggactttaagcatcccttgccttgcggtgacgtttacagtactgcaacctcctgttggagtcacctgtttgatcagttccgtaagtgcagggtaacacctacagcttaattggaagcattcactctactggctggattcaaagacctggagtcctgggagttaacctttcagataaactaactggatcatttcctaatctggatcctatctaatcctactatctcctcagagccaacacagtaggaagcatcttctactctgaagcttccaaaggcattacttagggatattggtgagggtcacataagaaaagttatacaatgagctaacagcttaagttgatataaattacttccaagtaagttattcagggccgtttgcttctgctttacactgcattccacagtcattttcatattattcttttaaaagtttatactatagtcactttaaaaattgtctaagcaatcacctctttgtgtttttgattaataacaacttaatgagctattatataaatcaagagagaaataattagtcttaaggaagccaataatgtgctaattcccagtaaggagaaaaagcaatgtaaatagaattttacataaccaacaataacttggaaagcagttttatcaaaatggttttgcaaaggtttcccaaaagcacttacagcagtttatatcaagagatcctaagtttaggggtatggagaatctcaattctttaaagcagaaattcacctgtttcataattgtaatatgtaattttctccccttggacctaagatatttatacattcaaaagtttacaacttg

SEQ ID NO: 423159 - DNA, 8303 bp, Homo sapiens
  misc_feature (2077)..(2077): n is a, c, g, or t
gcggccgcgggcccggcagaaggccgagtaggagggaccacgcgccgggggccgcgatctctggcagggggcggtgtgccagcggagcaccatgcacataggcgcccagcgccccgactacccctcccgaggaaaagaggccggggccgcgctggggcggcggagagcatgagggaggccggggggcggctcggcttggagcgctgctagggagcggtgcgcgccgcacacccgcctgggcgcggcggagggcggggagccgggcaggtcgcgcctgcgggcggcagccgaccgccgggagctgttctgatttccgacgcgcacgctaggggcccggagcagcccccggccccggcgcgccgccgacatgggcaacgcagggagcatggattcgcagcagaccgatttcagggcgcacaacgtgcctttgaagctgccgatgccagagccaggtgaactggaggagcgatttgccatcgtgctgaacgctatgaacctacctcctgacaaagccaggttactgcggcagtatgataatgagaaaaaatgggaactgatttgtgatcaggaacgattccaggtgaagaatcctccccatacatacattcaaaagctcaaaggctatctggatccagctgtaaccaggaagaaattcagacggcgtgttcaagaatctacacaagtgctaagagaactggaaatttctttgagaactaaccacattggatgggtcagagaatttctgaatgaagaaaacaaaggtcttgatgttctagtggaatatctctcatttgcacagtacgcggtaacttttgactttgaaagtgtggagagtactgtggagagctcggtggacaaatcaaagccctggagtaggtccatcgaggacctgcacagagggagcaacctgccctcacctgtgggcaacagtgtctcccgctctggaagacattctgcactgcgatataatacattgccaagcagaagaactctgaaaaattcaagattagtgagtaagaaagatgatgtgcatgtctgtatcatgtgtttacgtgccatcatgaattatcagtatggtttcaacatggtcatgtctcatccacacgctgtcaatgagattgcactaagcctgaacaacaagaatcccagaacaaaagcccttgtcttagaactgttggcagccgtttgtcttgtcagaggcgggcatgaaatcattttatcagcatttgataactttaaagaggtttgtggagaaaaacagcgctttgagaagttgatggaacatttcaggaatgaagacaataacatagattttatggtggcttctatgcagtttattaatattgtagtccattcagtagaagatatgaatttcagagttcacctgcagtatgaatttaccaaattaggcctggacgaatacttggacaagctgaaacacactgagagtgacaagcttcaagtccagatccaggcttacctggacaatgtttttgatgtaggagctctactggaagatgctgaaactaagaatgctgccttggagagggtggaagaactggaagaaaacatttctcatttatctgaaaaactgcaagacacagagaatgaagccatgtccaagattgtggaactggaaaagcaactcatgcagaggaacaaggagctggatgtcgttcgggaaatctacaaagatgcaaatactcaagttcacacattaagaaaaatggtcaaagaaaaagaagaagcaattcaaagacagtctaccctggaaaaaaagattcatgagctagagaaacaagggaccattaaaattcagaagaaaggggatggggatatcgccatactgccagttgtggcttctggcacattgtccatggggtcagaagtggtagcaggtaactctgtgggacccacaatgggggccgcttcctcaggacccttgccccctcctccaccaccactgcctccctcatcagacacacctgaaacagtgcaaaatggtccagtaacaccacctatgccaccgccgccgccgccccctcctccacctcctcctcccccaccgccccctccncctcctcctctcccaggccctgcagctgagactgtaccagctcctcccttagcacctccccttccctctgcacctccgctgcctggaacatcttcacccacagtggttttcaactcaggattagcagatgggccaatcaagcttttctctgtgaaaattaagaagccaatcaagacgaagttcagaatgccagtgtttaactgggttgctctgaagcccaatcagatcaatggcacagtcttcaatgaaattgatgatgagcgaattctggaggatttaaatgtggatgaatttgaggaaatattcaagacaaaagcccaaggacctgccattgatctttcttcaagcaaacagaagataccacagaagggatcaaacaaagtgacattactagaagcaaacagggccaaaaatcttgccataactttaaggaaagctggaaagactgctgatgaaatatgtaaagctattcatgtatttgacttgaagacactgcctgtggactttgtggaatgcttgatgcggttcctaccaactgagaatgaagtgaaagtgcttcggctctacgagcgggaaaggaagcctctggaaaacttgtcagatgaagatcggttcatgatgcagtttagtaaaatcgagaggctcatgcagaagatgaccatcatggccttcattgggaactttgctgaaagcattcagatgctgactcctcaactacatgcgattatagcagcatctgtctctataaagtcgtcccaaaaactcaagaaaattctggagatcatcttagcccttggaaactacatgaatagcagtaaaagaggagcagtttatggatttaaacttcagagtttagatctgctcttagatacaaagtcaacagacagaaagcaaacactgttgcactatatatccaatgtggtgaaagaaaaatatcaccaagtgtccctgttttataatgagcttcattatgtggaaaaagctgctgcagtctcccttgagaatgttttgctggatgtcaaggagctccagaggggaatggacttgaccaagagagagtacaccatgcatgaccataacacgctgctgaaggagttcatcctcaacaatgaggggaagctgaagaagctgcaggatgatgccaagatcgcacaggatgcctttgatgatgttgtgaagtattttggagaaaaccccaagacaacaccaccctctgtcttctttcctgtctttgtccggtttgtgaaagcatataagcaagcagaagaggaaaatgagctgaggaaaaagcaggaacaagctctcatggaaaaactcctagagcaagaagctctgatggagcagcaggatccaaagtctccttctcataaatcaaagaggcagcagcaagagttaattgcagaattaagaagacgacaagttaaagataacagacatgtatatgagggaaaagatggtgccattgaagatattatcacagccttaaagaagaataatatcactaaatttccaaatgttcactcgagggtaaggatttcttctagcacaccggtggtggaggatacacagagctggcaagcatcactttttacttagcttcctcctctctctgtatgcagatcaatggttttcaatctatggctgagggtaatactggtgagaatctgaccagggagtttttgtacctcacattccaatgatgcagggattgagcctctctgttggactctttctcggcctgcttttaagttctaagtgtgatggcttgggcaagggtatttgctgatgattgtatttgctttgagtgttgggctgtccttcccttacccctgtcttggcctttgagttactcagttaaacccattttgatctgaagcgactgaaagcaggtcctggccaggtaacattacagcctttgaaggattaagatctttagaactaattgctcagaggatgaagaaccacaaagctgcatatgaggcaaaagtgtaattctggcctttcattaccagtgtgggctaggaagcagaggcttgagaggattggggtatgcaaaactattttttccttaaatttaagagtagaggctgggcatagtggctcacacctgtaatctgtaatcccagcactctgggaggccgaggtgggcaaatctgttgagttcaagatcaccctgggcaatgaagcaaaatccccatctctgccattgtgattgtcccatcatggcccacctggtttcctgatgttgtaaataacatcaatgcatctgctgtgggtcctttgctgagatgtcttcgaaggaattttgttttagccatatccatcaactttgtattttacttgcaatttggaagaaggaaagtcacatgatgaaactccttttgtctataaccaggccctggcaaagtgcaaacaggatgcaactgcagtggcacaaaggtcactcaatcctttgtttccagtttcacattctactacttctgtgctagagaacgatgctctgtgagaggcattcactagtatgaatgtggggatatagtgtataagacttatttgcagtactgtgttcttcagctagaggcagctttttaaataatgcaagtgtatttattagcattaaaattaacatctcagtaatcagcattagcatttctgaggaccattattaattctgagaacagaaattggtgccttgcaaggaagtttactagctctatcaacaagcattcaaggttacatctgctagcagagtagtgttaggaacctggccttactctcctctgacaatcgcaattttttcttattttttataaattcaagaagatacacttggcatcgtgtatcgaggctaagtttttcatgcatttcccagactacttatggagaattgcagtttaagttgctgaaaagtattaacatggtattaagcttaaataatacgtaatgggactagatggcccactaagccactgttattttccttcctctctggcagggcacttgatccattccaaagtcaaaaactggactgaagctaaatttgtacttttcataatatacattctgcttctggcttatcttcttggtacatcaatatattaattgtaaagtttattgtatagtatttaaccgctgaagttcctattttatgttgtgcttatgtgaaccccttggtgaaggtcccttttccttggatgtgtagttatatgatctttttaaatgtacagatattttgctataaaatcggtgcagttttttatggtttttacacttctctttaattcccacctaagcctctgggtaatattgtaaatattgttttaaaatgcatcagcctatgctatacaatctgaatgttattttaacttatagttttttttaatatatatatttaactataaggacagtttagggaacaagttacctaccacatttcactttagtgtacctatttacagaaagattaaactgccacctgcgggcacattcccataaatgtgtactttactttaaaaagaacatgccacgattttgtctttctgtggactcaacattcacttcgattaaaaatagcaatttgaccaagttggacttccactacaaagcagctgttttccaaagttcaatgctgacatatatgtatattaaaataattgcctatttattaatctacaaatagacaacgttggcatgttcttttctgtttgtctattaatgggcctgcttcttagcaatattagaatgttttataaaagcaattcatgttacttttctggtcttttcatggcatatgagcaaataataaactatttacactactaaaaaaaaaaaaaaactcgagttttttttttttttttttgtagaaaattcctttattatagtgcaaattactttcagcagtgacataatgtaacaacacatttagcaacattttacaccacacagtaaataagaaagtgtttctttgaaaatatgtcatcataggaacattatttctacattaatgccagaaaatgccaaggccgtttatctcaaggcaaacagggctccctccttccttttgggtattttctttttaacacaaatgaaatgacttgccattttaacaaatcctcaattctaaaagtgatctctcagggggctttgaactaaggtcggcaagatttgaaatggggcttcaaaattttaaataataattttaaaatacttctggaatagcccaaaaagtagaagtcacttctattaagttttaagtagatatacacactcactccaattttactgtagaaatggacagattgtctaaagcctgctttctattcccccagagcctgattgttatttatactccttggttttggttattgcagaactagggctctggtcagaaataacaccttacatacccgaatactttcctgtggaagctttacattgcattttccatcctgaaattctcaccttagaccttacaggcccaggagagggtgtgaatattgttttcagtttacagctaaagccccttactaatttgggctatacctgaatcaaatcatcacatcatttagattaatcccaataggcttatccaagaggttcccactaacctcacagagaaacaaacagttaacattgtattttcacactaagctgcctaagggcttggctgctaatgagttagctgataggtagacagaataagcgtgtcaattccaatcagtacacgccctgctcctctagtttctgctgaattatgcagtgggtgggaatggttggccactcaaaacagtcttcctatggggctcttccaccataagttggatcaaaactccacaaatgtatttcaaggtgccctttaagtctctcaaatttagggacttttaagtgacaagccatgagaagttaatcacaggcttgaaaatacctggaaccacagaacagcccccacggaacaggctgaatatggttaaataagttggctggtacataaagcttttcaatgtacagccagtcttgttggatacagtgtcttcttatataatacaatggaactgtgctaaacagtttcaaagttgagaagaatccaaatgtatcacctataaaaaattcataattttagtttattttagactttggtactgaaacactgtctacattcttgacacttgaaaatgacatggtcacttcagtgcctctgcatgttgtgtaaaaaaaaaaaaaaaactcaaaaaaggaaagcaggacaaggatgtgtcattacaagacacagtatgctgtacaaacaaaacctaaattatatataaatacacccccaccccagaaccctgtcttccctcactacctgatcaaagcaatgccaagggtccctccctccagggccaatgtagcttttaaagtccagaacccaggactttaagcatcccttgccttgcggtgacgtttacagtactgcaacctcctgttggagtcacctgtttgatcagttccgtaagtgcagggtaacacctacagcttaattggaagcattcactctactggctggattcaaagacctggagtcctgggagttaacctttcagataaactaactggatcatttcctaatctggatcctatctaatcctactatctcctcagagccaacacagtaggaagcatcttctactctgaagcttccaaaggcattacttagggatattggtgagggtcacataagaaaagttatacaatgagctaacagcttaagttgatataaattacttccaagtaagttattcagggccgtttgcttctgctttacactgcattccacagtcattttcatattattcttttaaaagtttatactatagtcactttaaaaattgtctaagcaatcacctctttgtgtttttgattaataacaacttaatgagctattatataaatcaagagagaaataattagtcttaaggaagccaataatgtgctaattcccagtaaggagaaaaagcaatgtaaatagaattttacataaccaacaataacttggaaagcagttttatcaaaatggttttgcaaaggtttcccaaaagcacttacagcagtttatatcaagagatcctaagtttaggggtatggagaatctcaattctttaaagcagaaattcacctgtttcataattgtaatatgtaattttctccccttggacctaagatatttatacattcaaaagtttacaacttg

SEQ ID NO: 423160 - DNA, 5436 bp, Homo sapiens
atagctttatgtcaccctactttagtaggccacctctattccttctgaatgtcatgcccatgttcaactatcagtaattccatgttggagcaaagctgtgaggcaggacatgaatacaaaggcttaggtcctcccactgtcttatctcattcacgcatcttcaccggtagctctgttccatgtcaaacccaggctatttcttctgtgatcagatcatatcttgacctgcttctttggtcaggatgatggcaccagaaatactaacagcaaatatcattggaaaatgccactgtttttaaattgggggggaaaaaaggatcaaacttttcaaagtaacctcctgggcacagtttttgatgcctaataagaaacgaacttctctccagtgtctagttgattagaaaagagacaagggaaacacatactctaattggacgtagccattgactcctgtgctgagattgacatggaattgggtatgtgtttattttgtggcataactattctatgaattgcacttatgtatgttcttctatctctgatatcaaaggacatagagtgtcattgcctgctctgcagtgtacttacccaccagtgcttattaacaggctagaaaactgtcatctgcttggctgatgtttgctgtcagttttgctgttggactatatctatctttctggagccaatcttcaaagcagcttggaactgggtggtcagagagctgggtgggaagatgcactcatccttcccttatttgatctaacatttcttgtagtaatggcttctcattctcttcctctgttggctaacatgcctgggaatgttgagcactaagttgagttgctttccattttcatcccattttttcttaaccatcattttgtgtttttgtttttttctgtttagccttaaagaagaataatatcactaaatttccaaatgttcactcgagggtaaggatttcttctagcacaccggtggtggaggatacacagagctgatcttagaaaccaaccatacagacgagccgatgcggtgaggagaagcgtcaggcggcgctttgatgatcagaacttgcgttctgttaatggtgccgaaataacaatgtgaacctgagactggcctgcatgaatacagggtgtgcgtgaatgaaactgcccacatgaactttatgtgctacgatttaactgcagccttgaacacacacaaaaatattcttaagggctcagatttagcaaacacggaagaattttaaaatgagctctcctttcaacccttgttaacaagtgcctaaaaatggaagtacctgttcagattaatcaaagcaataggatttgatttgattaggtatctttttacaccagtatgttatttttaaccaaaatgtaaagttcttattaaactcattacctgccattgtgattgtcccatcatggcccacctggtttcctgatgttgtaaataacatcaatgcatctgctgtgggtcctttgctgagatgtcttcgaaggaattttgttttagccatatccatcaactttgtattttacttgcaatttggaagaaggaaagtcacatgatgaaactccttttgtctataaccaggccctggcaaagtgcaaacaggatgcaactgcagtggcacaaaggtcactcaatcctttgtttccagtttcacattctactacttctgtgctagagaacgatgctctgtgagaggcattcactagtatgaatgtggggatatagtgtataagacttatttgcagtactgtgttcttcagctagaggcagctttttaaataatgcaagtgtatttattagcattaaaattaacatctcagtaatcagcattagcatttctgaggaccattattaattctgagaacagaaattggtgccttgcaaggaagtttactagctctatcaacaagcattcaaggttacatctgctagcagagtagtgttaggaacctggccttactctcctctgacaatcgcaattttttcttattttttataaattcaagaagatacacttggcatcgtgtatcgaggctaagtttttcatgcatttcccagactacttatggagaattgcagtttaagttgctgaaaagtattaacatggtattaagcttaaataatacgtaatgggactagatggcccactaagccactgttattttccttcctctctggcagggcacttgatccattccaaagtcaaaaactggactgaagctaaatttgtacttttcataatatacattctgcttctggcttatcttcttggtacatcaatatattaattgtaaagtttattgtatagtatttaaccgctgaagttcctattttatgttgtgcttatgtgaaccccttggtgaaggtcccttttccttggatgtgtagttatatgatctttttaaatgtacagatattttgctataaaatcggtgcagttttttatggtttttacacttctctttaattcccacctaagcctctgggtaatattgtaaatattgttttaaaatgcatcagcctatgctatacaatctgaatgttattttaacttatagttttttttaatatatatatttaactataaggacagtttagggaacaagttacctaccacatttcactttagtgtacctatttacagaaagattaaactgccacctgcgggcacattcccataaatgtgtactttactttaaaaagaacatgccacgattttgtctttctgtggactcaacattcacttcgattaaaaatagcaatttgaccaagttggacttccactacaaagcagctgttttccaaagttcaatgctgacatatatgtatattaaaataattgcctatttattaatctacaaatagacaacgttggcatgttcttttctgtttgtctattaatgggcctgcttcttagcaatattagaatgttttataaaagcaattcatgttacttttctggtcttttcatggcatatgagcaaataataaactatttacactactaaaaaaaaaaaaaaactcgagttttttttttttttttttgtagaaaattcctttattatagtgcaaattactttcagcagtgacataatgtaacaacacatttagcaacattttacaccacacagtaaataagaaagtgtttctttgaaaatatgtcatcataggaacattatttctacattaatgccagaaaatgccaaggccgtttatctcaaggcaaacagggctccctccttccttttgggtattttctttttaacacaaatgaaatgacttgccattttaacaaatcctcaattctaaaagtgatctctcagggggctttgaactaaggtcggcaagatttgaaatggggcttcaaaattttaaataataattttaaaatacttctggaatagcccaaaaagtagaagtcacttctattaagttttaagtagatatacacactcactccaattttactgtagaaatggacagattgtctaaagcctgctttctattcccccagagcctgattgttatttatactccttggttttggttattgcagaactagggctctggtcagaaataacaccttacatacccgaatactttcctgtggaagctttacattgcattttccatcctgaaattctcaccttagaccttacaggcccaggagagggtgtgaatattgttttcagtttacagctaaagccccttactaatttgggctatacctgaatcaaatcatcacatcatttagattaatcccaataggcttatccaagaggttcccactaacctcacagagaaacaaacagttaacattgtattttcacactaagctgcctaagggcttggctgctaatgagttagctgataggtagacagaataagcgtgtcaattccaatcagtacacgccctgctcctctagtttctgctgaattatgcagtgggtgggaatggttggccactcaaaacagtcttcctatggggctcttccaccataagttggatcaaaactccacaaatgtatttcaaggtgccctttaagtctctcaaatttagggacttttaagtgacaagccatgagaagttaatcacaggcttgaaaatacctggaaccacagaacagcccccacggaacaggctgaatatggttaaataagttggctggtacataaagcttttcaatgtacagccagtcttgttggatacagtgtcttcttatataatacaatggaactgtgctaaacagtttcaaagttgagaagaatccaaatgtatcacctataaaaaattcataattttagtttattttagactttggtactgaaacactgtctacattcttgacacttgaaaatgacatggtcacttcagtgcctctgcatgttgtgtaaaaaaaaaaaaaaaactcaaaaaaggaaagcaggacaaggatgtgtcattacaagacacagtatgctgtacaaacaaaacctaaattatatataaatacacccccaccccagaaccctgtcttccctcactacctgatcaaagcaatgccaagggtccctccctccagggccaatgtagcttttaaagtccagaacccaggactttaagcatcccttgccttgcggtgacgtttacagtactgcaacctcctgttggagtcacctgtttgatcagttccgtaagtgcagggtaacacctacagcttaattggaagcattcactctactggctggattcaaagacctggagtcctgggagttaacctttcagataaactaactggatcatttcctaatctggatcctatctaatcctactatctcctcagagccaacacagtaggaagcatcttctactctgaagcttccaaaggcattacttagggatattggtgagggtcacataagaaaagttatacaatgagctaacagcttaagttgatataaattacttccaagtaagttattcagggccgtttgcttctgctttacactgcattccacagtcattttcatattattcttttaaaagtttatactatagtcactttaaaaattgtctaagcaatcacctctttgtgtttttgattaataacaacttaatgagctattatataaatcaagagagaaataattagtcttaaggaagccaataatgtgctaattcccagtaaggagaaaaagcaatgtaaatagaattttacataaccaacaataacttggaaagcagttttatcaaaatggttttgcaaaggtttcccaaaagcacttacagcagtttatatcaagagatcctaagtttaggggtatggagaatctcaattctttaaagcagaaattcacctgtttcataattgtaatatgtaattttctccccttggacctaagatatttatacattcaaaagtttacaacttg

SEQ ID NO: 423161 - DNA, 4857 bp, Homo sapiens
tgcttgatctaagtcattaatctactagaagaggggaatgagtatctgtttatagggcagtttttatcctccttggagtatttttcattttctgatccaccccaaagccccagataaattcctttgtacctttatgaactaacttgagtatatattgccttccccctttcctgcccatcttccccacccccatccccaggtatgattaacaatgcactaaccatgtactaatgcaatagatcttggctttttattctcttctgtttgtgttgtttggctgtcattttcaatgcagtgctgaagactgtgccctttactgctcgcaccgccaagcgtggctctcggtttttctgcgaacctgttctcactgaggaataccattactaaactattactctttctcacctgatgctcttaaaagatcttagaaaccaaccatacagacgagccgatgcggtgaggagaagcgtcaggcggcgctttgatgatcagaacttgcgttctgttaatggtgccgaaataacaatgtgaacctgagactggcctgcatgaatacagggtgtgcgtgaatgaaactgcccacatgaactttatgtgctacgatttaactgcagccttgaacacacacaaaaatattcttaagggctcagatttagcaaacacggaagaattttaaaatgagctctcctttcaacccttgttaacaagtgcctaaaaatggaagtacctgttcagattaatcaaagcaataggatttgatttgattaggtatctttttacaccagtatgttatttttaaccaaaatgtaaagttcttattaaactcattacctgccattgtgattgtcccatcatggcccacctggtttcctgatgttgtaaataacatcaatgcatctgctgtgggtcctttgctgagatgtcttcgaaggaattttgttttagccatatccatcaactttgtattttacttgcaatttggaagaaggaaagtcacatgatgaaactccttttgtctataaccaggccctggcaaagtgcaaacaggatgcaactgcagtggcacaaaggtcactcaatcctttgtttccagtttcacattctactacttctgtgctagagaacgatgctctgtgagaggcattcactagtatgaatgtggggatatagtgtataagacttatttgcagtactgtgttcttcagctagaggcagctttttaaataatgcaagtgtatttattagcattaaaattaacatctcagtaatcagcattagcatttctgaggaccattattaattctgagaacagaaattggtgccttgcaaggaagtttactagctctatcaacaagcattcaaggttacatctgctagcagagtagtgttaggaacctggccttactctcctctgacaatcgcaattttttcttattttttataaattcaagaagatacacttggcatcgtgtatcgaggctaagtttttcatgcatttcccagactacttatggagaattgcagtttaagttgctgaaaagtattaacatggtattaagcttaaataatacgtaatgggactagatggcccactaagccactgttattttccttcctctctggcagggcacttgatccattccaaagtcaaaaactggactgaagctaaatttgtacttttcataatatacattctgcttctggcttatcttcttggtacatcaatatattaattgtaaagtttattgtatagtatttaaccgctgaagttcctattttatgttgtgcttatgtgaaccccttggtgaaggtcccttttccttggatgtgtagttatatgatctttttaaatgtacagatattttgctataaaatcggtgcagttttttatggtttttacacttctctttaattcccacctaagcctctgggtaatattgtaaatattgttttaaaatgcatcagcctatgctatacaatctgaatgttattttaacttatagttttttttaatatatatatttaactataaggacagtttagggaacaagttacctaccacatttcactttagtgtacctatttacagaaagattaaactgccacctgcgggcacattcccataaatgtgtactttactttaaaaagaacatgccacgattttgtctttctgtggactcaacattcacttcgattaaaaatagcaatttgaccaagttggacttccactacaaagcagctgttttccaaagttcaatgctgacatatatgtatattaaaataattgcctatttattaatctacaaatagacaacgttggcatgttcttttctgtttgtctattaatgggcctgcttcttagcaatattagaatgttttataaaagcaattcatgttacttttctggtcttttcatggcatatgagcaaataataaactatttacactactaaaaaaaaaaaaaaactcgagttttttttttttttttttgtagaaaattcctttattatagtgcaaattactttcagcagtgacataatgtaacaacacatttagcaacattttacaccacacagtaaataagaaagtgtttctttgaaaatatgtcatcataggaacattatttctacattaatgccagaaaatgccaaggccgtttatctcaaggcaaacagggctccctccttccttttgggtattttctttttaacacaaatgaaatgacttgccattttaacaaatcctcaattctaaaagtgatctctcagggggctttgaactaaggtcggcaagatttgaaatggggcttcaaaattttaaataataattttaaaatacttctggaatagcccaaaaagtagaagtcacttctattaagttttaagtagatatacacactcactccaattttactgtagaaatggacagattgtctaaagcctgctttctattcccccagagcctgattgttatttatactccttggttttggttattgcagaactagggctctggtcagaaataacaccttacatacccgaatactttcctgtggaagctttacattgcattttccatcctgaaattctcaccttagaccttacaggcccaggagagggtgtgaatattgttttcagtttacagctaaagccccttactaatttgggctatacctgaatcaaatcatcacatcatttagattaatcccaataggcttatccaagaggttcccactaacctcacagagaaacaaacagttaacattgtattttcacactaagctgcctaagggcttggctgctaatgagttagctgataggtagacagaataagcgtgtcaattccaatcagtacacgccctgctcctctagtttctgctgaattatgcagtgggtgggaatggttggccactcaaaacagtcttcctatggggctcttccaccataagttggatcaaaactccacaaatgtatttcaaggtgccctttaagtctctcaaatttagggacttttaagtgacaagccatgagaagttaatcacaggcttgaaaatacctggaaccacagaacagcccccacggaacaggctgaatatggttaaataagttggctggtacataaagcttttcaatgtacagccagtcttgttggatacagtgtcttcttatataatacaatggaactgtgctaaacagtttcaaagttgagaagaatccaaatgtatcacctataaaaaattcataattttagtttattttagactttggtactgaaacactgtctacattcttgacacttgaaaatgacatggtcacttcagtgcctctgcatgttgtgtaaaaaaaaaaaaaaaactcaaaaaaggaaagcaggacaaggatgtgtcattacaagacacagtatgctgtacaaacaaaacctaaattatatataaatacacccccaccccagaaccctgtcttccctcactacctgatcaaagcaatgccaagggtccctccctccagggccaatgtagcttttaaagtccagaacccaggactttaagcatcccttgccttgcggtgacgtttacagtactgcaacctcctgttggagtcacctgtttgatcagttccgtaagtgcagggtaacacctacagcttaattggaagcattcactctactggctggattcaaagacctggagtcctgggagttaacctttcagataaactaactggatcatttcctaatctggatcctatctaatcctactatctcctcagagccaacacagtaggaagcatcttctactctgaagcttccaaaggcattacttagggatattggtgagggtcacataagaaaagttatacaatgagctaacagcttaagttgatataaattacttccaagtaagttattcagggccgtttgcttctgctttacactgcattccacagtcattttcatattattcttttaaaagtttatactatagtcactttaaaaattgtctaagcaatcacctctttgtgtttttgattaataacaacttaatgagctattatataaatcaagagagaaataattagtcttaaggaagccaataatgtgctaattcccagtaaggagaaaaagcaatgtaaatagaattttacataaccaacaataacttggaaagcagttttatcaaaatggttttgcaaaggtttcccaaaagcacttacagcagtttatatcaagagatcctaagtttaggggtatggagaatctcaattctttaaagcagaaattcacctgtttcataattgtaatatgtaattttctccccttggacctaagatatttatacattcaaaagtttacaacttg

SEQ ID NO: 423162 - DNA, 7045 bp, Homo sapiens
  misc_feature (2077)..(2077): n is a, c, g, or t
gcggccgcgggcccggcagaaggccgagtaggagggaccacgcgccgggggccgcgatctctggcagggggcggtgtgccagcggagcaccatgcacataggcgcccagcgccccgactacccctcccgaggaaaagaggccggggccgcgctggggcggcggagagcatgagggaggccggggggcggctcggcttggagcgctgctagggagcggtgcgcgccgcacacccgcctgggcgcggcggagggcggggagccgggcaggtcgcgcctgcgggcggcagccgaccgccgggagctgttctgatttccgacgcgcacgctaggggcccggagcagcccccggccccggcgcgccgccgacatgggcaacgcagggagcatggattcgcagcagaccgatttcagggcgcacaacgtgcctttgaagctgccgatgccagagccaggtgaactggaggagcgatttgccatcgtgctgaacgctatgaacctacctcctgacaaagccaggttactgcggcagtatgataatgagaaaaaatgggaactgatttgtgatcaggaacgattccaggtgaagaatcctccccatacatacattcaaaagctcaaaggctatctggatccagctgtaaccaggaagaaattcagacggcgtgttcaagaatctacacaagtgctaagagaactggaaatttctttgagaactaaccacattggatgggtcagagaatttctgaatgaagaaaacaaaggtcttgatgttctagtggaatatctctcatttgcacagtacgcggtaacttttgactttgaaagtgtggagagtactgtggagagctcggtggacaaatcaaagccctggagtaggtccatcgaggacctgcacagagggagcaacctgccctcacctgtgggcaacagtgtctcccgctctggaagacattctgcactgcgatataatacattgccaagcagaagaactctgaaaaattcaagattagtgagtaagaaagatgatgtgcatgtctgtatcatgtgtttacgtgccatcatgaattatcagtatggtttcaacatggtcatgtctcatccacacgctgtcaatgagattgcactaagcctgaacaacaagaatcccagaacaaaagcccttgtcttagaactgttggcagccgtttgtcttgtcagaggcgggcatgaaatcattttatcagcatttgataactttaaagaggtttgtggagaaaaacagcgctttgagaagttgatggaacatttcaggaatgaagacaataacatagattttatggtggcttctatgcagtttattaatattgtagtccattcagtagaagatatgaatttcagagttcacctgcagtatgaatttaccaaattaggcctggacgaatacttggacaagctgaaacacactgagagtgacaagcttcaagtccagatccaggcttacctggacaatgtttttgatgtaggagctctactggaagatgctgaaactaagaatgctgccttggagagggtggaagaactggaagaaaacatttctcatttatctgaaaaactgcaagacacagagaatgaagccatgtccaagattgtggaactggaaaagcaactcatgcagaggaacaaggagctggatgtcgttcgggaaatctacaaagatgcaaatactcaagttcacacattaagaaaaatggtcaaagaaaaagaagaagcaattcaaagacagtctaccctggaaaaaaagattcatgagctagagaaacaagggaccattaaaattcagaagaaaggggatggggatatcgccatactgccagttgtggcttctggcacattgtccatggggtcagaagtggtagcaggtaactctgtgggacccacaatgggggccgcttcctcaggacccttgccccctcctccaccaccactgcctccctcatcagacacacctgaaacagtgcaaaatggtccagtaacaccacctatgccaccgccgccgccgccccctcctccacctcctcctcccccaccgccccctccncctcctcctctcccaggccctgcagctgagactgtaccagctcctcccttagcacctccccttccctctgcacctccgctgcctggaacatcttcacccacagtggttttcaactcaggattagcagatgggccaatcaagcttttctctgtgaaaattaagaagccaatcaagacgaagttcagaatgccagtgtttaactgggttgctctgaagcccaatcagatcaatggcacagtcttcaatgaaattgatgatgagcgaattctggaggatttaaatgtggatgaatttgaggaaatattcaagacaaaagcccaaggacctgccattgatctttcttcaagcaaacagaagataccacagaagggatcaaacaaagtgacattactagaagcaaacagggccaaaaatcttgccataactttaaggaaagctggaaagactgctgatgaaatatgtaaagctattcatgtatttgacttgaagacactgcctgtggactttgtggaatgcttgatgcggttcctaccaactgagaatgaagtgaaagtgcttcggctctacgagcgggaaaggaagcctctggaaaacttgtcagatgaagatcggttcatgatgcagtttagtaaaatcgagaggctcatgcagaagatgaccatcatggccttcattgggaactttgctgaaagcattcagatgctgactcctcaactacatgcgattatagcagcatctgtctctataaagtcgtcccaaaaactcaagaaaattctggagatcatcttagcccttggaaactacatgaatagcagtaaaagaggagcagtttatggatttaaacttcagagtttagatctgctcttagatacaaagtcaacagacagaaagcaaacactgttgcactatatatccaatgtggtgaaagaaaaatatcaccaagtgtccctgttttataatgagcttcattatgtggaaaaagctgctgcagtctcccttgagaatgttttgctggatgtcaaggagctccagaggggaatggacttgaccaagagagagtacaccatgcatgaccataacacgctgctgaaggagttcatcctcaacaatgaggggaagctgaagaagctgcaggatgatgccaagatcgcacaggatgcctttgatgatgttgtgaagtattttggagaaaaccccaagacaacaccaccctctgtcttctttcctgtctttgtccggtttgtgaaagcatataagcaagcagaagaggaaaatgagctgaggaaaaagcaggaacaagctctcatggaaaaactcctagagcaagaagctctgatggagcagcaggatccaaagtctccttctcataaatcaaagaggcagcagcaagagttaattgcagaattaagaagacgacaagttaaagataacagacatgtatatgagggaaaagatggtgccattgaagatattatcacagccttaaagaagaataatatcactaaatttccaaatgttcactcgaggatcttagaaaccaaccatacagacgagccgatgcggtgaggagaagcgtcaggcggcgctttgatgatcagaacttgcgttctgttaatggtgccgaaataacaatgtgaacctgagactggcctgcatgaatacagggtgtgcgtgaatgaaactgcccacatgaactttatgtgctacgatttaactgcagccttgaacacacacaaaaatattcttaagggctcagatttagcaaacacggaagaattttaaaatgagctctcctttcaacccttgttaacaagtgcctaaaaatggaagtacctgttcagattaatcaaagcaataggatttgatttgattaggtatctttttacaccagtatgttatttttaaccaaaatgtaaagttcttattaaactcattacctgccattgtgattgtcccatcatggcccacctggtttcctgatgttgtaaataacatcaatgcatctgctgtgggtcctttgctgagatgtcttcgaaggaattttgttttagccatatccatcaactttgtattttacttgcaatttggaagaaggaaagtcacatgatgaaactccttttgtctataaccaggccctggcaaagtgcaaacaggatgcaactgcagtggcacaaaggtcactcaatcctttgtttccagtttcacattctactacttctgtgctagagaacgatgctctgtgagaggcattcactagtatgaatgtggggatatagtgtataagacttatttgcagtactgtgttcttcagctagaggcagctttttaaataatgcaagtgtatttattagcattaaaattaacatctcagtaatcagcattagcatttctgaggaccattattaattctgagaacagaaattggtgccttgcaaggaagtttactagctctatcaacaagcattcaaggttacatctgctagcagagtagtgttaggaacctggccttactctcctctgacaatcgcaattttttcttattttttataaattcaagaagatacacttggcatcgtgtatcgaggctaagtttttcatgcatttcccagactacttatggagaattgcagtttaagttgctgaaaagtattaacatggtattaagcttaaataatacgtaatgggactagatggcccactaagccactgttattttccttcctctctggcagggcacttgatccattccaaagtcaaaaactggactgaagctaaatttgtacttttcataatatacattctgcttctggcttatcttcttggtacatcaatatattaattgtaaagtttattgtatagtatttaaccgctgaagttcctattttatgttgtgcttatgtgaaccccttggtgaaggtcccttttccttggatgtgtagttatatgatctttttaaatgtacagatattttgctataaaatcggtgcagttttttatggtttttacacttctctttaattcccacctaagcctctgggtaatattgtaaatattgttttaaaatgcatcagcctatgctatacaatctgaatgttattttaacttatagttttttttaatatatatatttaactataaggacagtttagggaacaagttacctaccacatttcactttagtgtacctatttacagaaagattaaactgccacctgcgggcacattcccataaatgtgtactttactttaaaaagaacatgccacgattttgtctttctgtggactcaacattcacttcgattaaaaatagcaatttgaccaagttggacttccactacaaagcagctgttttccaaagttcaatgctgacatatatgtatattaaaataattgcctatttattaatctacaaatagacaacgttggcatgttcttttctgtttgtctattaatgggcctgcttcttagcaatattagaatgttttataaaagcaattcatgttacttttctggtcttttcatggcatatgagcaaataataaactatttacactactaaaaaaaaaaaaaaactcgagttttttttttttttttttgtagaaaattcctttattatagtgcaaattactttcagcagtgacataatgtaacaacacatttagcaacattttacaccacacagtaaataagaaagtgtttctttgaaaatatgtcatcataggaacattatttctacattaatgccagaaaatgccaaggccgtttatctcaaggcaaacagggctccctccttccttttgggtattttctttttaacacaaatgaaatgacttgccattttaacaaatcctcaattctaaaagtgatctctcagggggctttgaactaaggtcggcaagatttgaaatggggcttcaaaattttaaataataattttaaaatacttctggaatagcccaaaaagtagaagtcacttctattaagttttaagtagatatacacactcactccaattttactgtagaaatggacagattgtctaaagcctgctttctattcccccagagcctgattgttatttatactccttggttttggttattgcagaactagggctctggtcagaaataacaccttacatacccgaatactttcctgtggaagctttacattgcattttccatcctgaaattctcaccttagaccttacaggcccaggagagggtgtgaatattgttttcagtttacagctaaagccccttactaatttgggctatacctgaatcaaatcatcacatcatttagattaatcccaataggcttatccaagaggttcccactaacctcacagagaaacaaacagttaacattgtattttcacactaagctgcctaagggcttggctgctaatgagttagctgataggtagacagaataagcgtgtcaattccaatcagtacacgccctgctcctctagtttctgctgaattatgcagtgggtgggaatggttggccactcaaaacagtcttcctatggggctcttccaccataagttggatcaaaactccacaaatgtatttcaaggtgccctttaagtctctcaaatttagggacttttaagtgacaagccatgagaagttaatcacaggcttgaaaatacctggaaccacagaacagcccccacggaacaggctgaatatggttaaataagttggctggtacataaagcttttcaatgtacagccagtcttgttggatacagtgtcttcttatataatacaatggaactgtgctaaacagtttcaaagttgagaagaatccaaatgtatcacctataaaaaattcataattttagtttattttagactttggtactgaaacactgtctacattcttgacacttgaagtgaccatgtcattttcaagtgtcaagaatgtagactttggtactgaaacctgtctacatt

SEQ ID NO: 423163 - DNA, 5025 bp, Homo sapiens
atagctttatgtcaccctactttagtaggccacctctattccttctgaatgtcatgcccatgttcaactatcagtaattccatgttggagcaaagctgtgaggcaggacatgaatacaaaggcttaggtcctcccactgtcttatctcattcacgcatcttcaccggtagctctgttccatgtcaaacccaggctatttcttctgtgatcagatcatatcttgacctgcttctttggtcaggatgatggcaccagaaatactaacagcaaatatcattggaaaatgccactgtttttaaattgggggggaaaaaaggatcaaacttttcaaagtaacctcctgggcacagtttttgatgcctaataagaaacgaacttctctccagtgtctagttgattagaaaagagacaagggaaacacatactctaattggacgtagccattgactcctgtgctgagattgacatggaattgggtatgtgtttattttgtggcataactattctatgaattgcacttatgtatgttcttctatctctgatatcaaaggacatagagtgtcattgcctgctctgcagtgtacttacccaccagtgcttattaacaggctagaaaactgtcatctgcttggctgatgtttgctgtcagttttgctgttggactatatctatctttctggagccaatcttcaaagcagcttggaactgggtggtcagagagctgggtgggaagatgcactcatccttcccttatttgatctaacatttcttgtagtaatggcttctcattctcttcctctgttggctaacatgcctgggaatgttgagcactaagttgagttgctttccattttcatcccattttttcttaaccatcattttgtgtttttgtttttttctgtttagctgtaatctgtaatcccagcactctgggaggccgaggtgggcaaatctgttgagttcaagatcaccctgggcaatgaagcaaaatccccatctctgccattgtgattgtcccatcatggcccacctggtttcctgatgttgtaaataacatcaatgcatctgctgtgggtcctttgctgagatgtcttcgaaggaattttgttttagccatatccatcaactttgtattttacttgcaatttggaagaaggaaagtcacatgatgaaactccttttgtctataaccaggccctggcaaagtgcaaacaggatgcaactgcagtggcacaaaggtcactcaatcctttgtttccagtttcacattctactacttctgtgctagagaacgatgctctgtgagaggcattcactagtatgaatgtggggatatagtgtataagacttatttgcagtactgtgttcttcagctagaggcagctttttaaataatgcaagtgtatttattagcattaaaattaacatctcagtaatcagcattagcatttctgaggaccattattaattctgagaacagaaattggtgccttgcaaggaagtttactagctctatcaacaagcattcaaggttacatctgctagcagagtagtgttaggaacctggccttactctcctctgacaatcgcaattttttcttattttttataaattcaagaagatacacttggcatcgtgtatcgaggctaagtttttcatgcatttcccagactacttatggagaattgcagtttaagttgctgaaaagtattaacatggtattaagcttaaataatacgtaatgggactagatggcccactaagccactgttattttccttcctctctggcagggcacttgatccattccaaagtcaaaaactggactgaagctaaatttgtacttttcataatatacattctgcttctggcttatcttcttggtacatcaatatattaattgtaaagtttattgtatagtatttaaccgctgaagttcctattttatgttgtgcttatgtgaaccccttggtgaaggtcccttttccttggatgtgtagttatatgatctttttaaatgtacagatattttgctataaaatcggtgcagttttttatggtttttacacttctctttaattcccacctaagcctctgggtaatattgtaaatattgttttaaaatgcatcagcctatgctatacaatctgaatgttattttaacttatagttttttttaatatatatatttaactataaggacagtttagggaacaagttacctaccacatttcactttagtgtacctatttacagaaagattaaactgccacctgcgggcacattcccataaatgtgtactttactttaaaaagaacatgccacgattttgtctttctgtggactcaacattcacttcgattaaaaatagcaatttgaccaagttggacttccactacaaagcagctgttttccaaagttcaatgctgacatatatgtatattaaaataattgcctatttattaatctacaaatagacaacgttggcatgttcttttctgtttgtctattaatgggcctgcttcttagcaatattagaatgttttataaaagcaattcatgttacttttctggtcttttcatggcatatgagcaaataataaactatttacactactaaaaaaaaaaaaaaactcgagttttttttttttttttttgtagaaaattcctttattatagtgcaaattactttcagcagtgacataatgtaacaacacatttagcaacattttacaccacacagtaaataagaaagtgtttctttgaaaatatgtcatcataggaacattatttctacattaatgccagaaaatgccaaggccgtttatctcaaggcaaacagggctccctccttccttttgggtattttctttttaacacaaatgaaatgacttgccattttaacaaatcctcaattctaaaagtgatctctcagggggctttgaactaaggtcggcaagatttgaaatggggcttcaaaattttaaataataattttaaaatacttctggaatagcccaaaaagtagaagtcacttctattaagttttaagtagatatacacactcactccaattttactgtagaaatggacagattgtctaaagcctgctttctattcccccagagcctgattgttatttatactccttggttttggttattgcagaactagggctctggtcagaaataacaccttacatacccgaatactttcctgtggaagctttacattgcattttccatcctgaaattctcaccttagaccttacaggcccaggagagggtgtgaatattgttttcagtttacagctaaagccccttactaatttgggctatacctgaatcaaatcatcacatcatttagattaatcccaataggcttatccaagaggttcccactaacctcacagagaaacaaacagttaacattgtattttcacactaagctgcctaagggcttggctgctaatgagttagctgataggtagacagaataagcgtgtcaattccaatcagtacacgccctgctcctctagtttctgctgaattatgcagtgggtgggaatggttggccactcaaaacagtcttcctatggggctcttccaccataagttggatcaaaactccacaaatgtatttcaaggtgccctttaagtctctcaaatttagggacttttaagtgacaagccatgagaagttaatcacaggcttgaaaatacctggaaccacagaacagcccccacggaacaggctgaatatggttaaataagttggctggtacataaagcttttcaatgtacagccagtcttgttggatacagtgtcttcttatataatacaatggaactgtgctaaacagtttcaaagttgagaagaatccaaatgtatcacctataaaaaattcataattttagtttattttagactttggtactgaaacactgtctacattcttgacacttgaaaatgacatggtcacttcagtgcctctgcatgttgtgtaaaaaaaaaaaaaaaactcaaaaaaggaaagcaggacaaggatgtgtcattacaagacacagtatgctgtacaaacaaaacctaaattatatataaatacacccccaccccagaaccctgtcttccctcactacctgatcaaagcaatgccaagggtccctccctccagggccaatgtagcttttaaagtccagaacccaggactttaagcatcccttgccttgcggtgacgtttacagtactgcaacctcctgttggagtcacctgtttgatcagttccgtaagtgcagggtaacacctacagcttaattggaagcattcactctactggctggattcaaagacctggagtcctgggagttaacctttcagataaactaactggatcatttcctaatctggatcctatctaatcctactatctcctcagagccaacacagtaggaagcatcttctactctgaagcttccaaaggcattacttagggatattggtgagggtcacataagaaaagttatacaatgagctaacagcttaagttgatataaattacttccaagtaagttattcagggccgtttgcttctgctttacactgcattccacagtcattttcatattattcttttaaaagtttatactatagtcactttaaaaattgtctaagcaatcacctctttgtgtttttgattaataacaacttaatgagctattatataaatcaagagagaaataattagtcttaaggaagccaataatgtgctaattcccagtaaggagaaaaagcaatgtaaatagaattttacataaccaacaataacttggaaagcagttttatcaaaatggttttgcaaaggtttcccaaaagcacttacagcagtttatatcaagagatcctaagtttaggggtatggagaatctcaattctttaaagcagaaattcacctgtttcataattgtaatatgtaattttctccccttggacctaagatatttatacattcaaaagtttacaacttg

SEQ ID NO: 423164 - DNA, 3328 bp, Homo sapiens
  misc_feature (946)..(946): n is a, c, g, or t
catcgttgtggtcccttgcccctcgctgtgtgtcgtcattgtattgtgcttgttccgtctgtcttataagagaggatcgtttgttgtcatccggattgcggtccctttctgctcgtgtgttgtgtctctttccccgtgtgtgttgttgtgtcgcgcctcgttctgttttgtctgttctgtgcgtttttttgtgtgtttcttctctctttctttctgtgtctgtttgcgttttgtgttgtttgtgtgttttttttagtatggtctgaataaaatccagcatagatgtattagttttattctgggtataatggctcggtgtctgtgtcccaacagctttcttcttaagcgcaaaccacccttaagtgaaacttgccatttgtttttgtgttctttttaagtctccagatcttgctaggacacttcttccagaccaacagtcagatagttgtggcacgtgatcctatttgaaatagaggtggtttaaatcagccaagcttggtgatctggaggtctccatttatctttatggtgtcaattgcagataacgtttgaatgcgatggtaaaaatctaaaagttggtgtccatccacatacactcggaaacgtgggtgctcacaaagaatttccaccctgaatggctggtctggaatgaatggaaagtaagggattgctgactgttcttcacccctctccccagatatacaagaatttctgagtagctgccgatctgtgaacacagctttgagttcgattgccacatcggcaggagggtcttctgagtccccacaggtcaagctgattgcaaagctctctgggttgaggtctacgatgcccatcactaacaccttcttgcctggtctcatgccacctttaatgtgcccacaaaatggaactatcagtcgtgggaagtacacgtccgcttgaactggcggacgcgtgggtcgancccacgcgtttttttgtagaaaattcctttattatagtgcaaattactttcagcagtgacataatgtaacaacacatttagcaacattttacaccacacagtaaataagaaagtgtttctttgaaaatatgtcatcataggaacattatttctacattaatgccagaaaatgccaaggccgtttatctcaaggcaaacagggctccctccttccttttgggtattttctttttaacacaaatgaaatgacttgccattttaacaaatcctcaattctaaaagtgatctctcagggggctttgaactaaggtcggcaagatttgaaatggggcttcaaaattttaaataataattttaaaatacttctggaatagcccaaaaagtagaagtcacttctattaagttttaagtagatatacacactcactccaattttactgtagaaatggacagattgtctaaagcctgctttctattcccccagagcctgattgttatttatactccttggttttggttattgcagaactagggctctggtcagaaataacaccttacatacccgaatactttcctgtggaagctttacattgcattttccatcctgaaattctcaccttagaccttacaggcccaggagagggtgtgaatattgttttcagtttacagctaaagccccttactaatttgggctatacctgaatcaaatcatcacatcatttagattaatcccaataggcttatccaagaggttcccactaacctcacagagaaacaaacagttaacattgtattttcacactaagctgcctaagggcttggctgctaatgagttagctgataggtagacagaataagcgtgtcaattccaatcagtacacgccctgctcctctagtttctgctgaattatgcagtgggtgggaatggttggccactcaaaacagtcttcctatggggctcttccaccataagttggatcaaaactccacaaatgtatttcaaggtgccctttaagtctctcaaatttagggacttttaagtgacaagccatgagaagttaatcacaggcttgaaaatacctggaaccacagaacagcccccacggaacaggctgaatatggttaaataagttggctggtacataaagcttttcaatgtacagccagtcttgttggatacagtgtcttcttatataatacaatggaactgtgctaaacagtttcaaagttgagaagaatccaaatgtatcacctataaaaaattcataattttagtttattttagactttggtactgaaacactgtctacattcttgacacttgaaaatgacatggtcacttcagtgcctctgcatgttgtgtaaaaaaaaaaaaaaaactcaaaaaaggaaagcaggacaaggatgtgtcattacaagacacagtatgctgtacaaacaaaacctaaattatatataaatacacccccaccccagaaccctgtcttccctcactacctgatcaaagcaatgccaagggtccctccctccagggccaatgtagcttttaaagtccagaacccaggactttaagcatcccttgccttgcggtgacgtttacagtactgcaacctcctgttggagtcacctgtttgatcagttccgtaagtgcagggtaacacctacagcttaattggaagcattcactctactggctggattcaaagacctggagtcctgggagttaacctttcagataaactaactggatcatttcctaatctggatcctatctaatcctactatctcctcagagccaacacagtaggaagcatcttctactctgaagcttccaaaggcattacttagggatattggtgagggtcacataagaaaagttatacaatgagctaacagcttaagttgatataaattacttccaagtaagttattcagggccgtttgcttctgctttacactgcattccacagtcattttcatattattcttttaaaagtttatactatagtcactttaaaaattgtctaagcaatcacctctttgtgtttttgattaataacaacttaatgagctattatataaatcaagagagaaataattagtcttaaggaagccaataatgtgctaattcccagtaaggagaaaaagcaatgtaaatagaattttacataaccaacaataacttggaaagcagttttatcaaaatggttttgcaaaggtttcccaaaagcacttacagcagtttatatcaagagatcctaagtttaggggtatggagaatctcaattctttaaagcagaaattcacctgtttcataattgtaatatgtaattttctccccttggacctaagatatttatacattcaaaagtttacaacttg

SEQ ID NO: 423165 - DNA, 5834 bp, Homo sapiens
  misc_feature (2077)..(2077): n is a, c, g, or t
gcggccgcgggcccggcagaaggccgagtaggagggaccacgcgccgggggccgcgatctctggcagggggcggtgtgccagcggagcaccatgcacataggcgcccagcgccccgactacccctcccgaggaaaagaggccggggccgcgctggggcggcggagagcatgagggaggccggggggcggctcggcttggagcgctgctagggagcggtgcgcgccgcacacccgcctgggcgcggcggagggcggggagccgggcaggtcgcgcctgcgggcggcagccgaccgccgggagctgttctgatttccgacgcgcacgctaggggcccggagcagcccccggccccggcgcgccgccgacatgggcaacgcagggagcatggattcgcagcagaccgatttcagggcgcacaacgtgcctttgaagctgccgatgccagagccaggtgaactggaggagcgatttgccatcgtgctgaacgctatgaacctacctcctgacaaagccaggttactgcggcagtatgataatgagaaaaaatgggaactgatttgtgatcaggaacgattccaggtgaagaatcctccccatacatacattcaaaagctcaaaggctatctggatccagctgtaaccaggaagaaattcagacggcgtgttcaagaatctacacaagtgctaagagaactggaaatttctttgagaactaaccacattggatgggtcagagaatttctgaatgaagaaaacaaaggtcttgatgttctagtggaatatctctcatttgcacagtacgcggtaacttttgactttgaaagtgtggagagtactgtggagagctcggtggacaaatcaaagccctggagtaggtccatcgaggacctgcacagagggagcaacctgccctcacctgtgggcaacagtgtctcccgctctggaagacattctgcactgcgatataatacattgccaagcagaagaactctgaaaaattcaagattagtgagtaagaaagatgatgtgcatgtctgtatcatgtgtttacgtgccatcatgaattatcagtatggtttcaacatggtcatgtctcatccacacgctgtcaatgagattgcactaagcctgaacaacaagaatcccagaacaaaagcccttgtcttagaactgttggcagccgtttgtcttgtcagaggcgggcatgaaatcattttatcagcatttgataactttaaagaggtttgtggagaaaaacagcgctttgagaagttgatggaacatttcaggaatgaagacaataacatagattttatggtggcttctatgcagtttattaatattgtagtccattcagtagaagatatgaatttcagagttcacctgcagtatgaatttaccaaattaggcctggacgaatacttggacaagctgaaacacactgagagtgacaagcttcaagtccagatccaggcttacctggacaatgtttttgatgtaggagctctactggaagatgctgaaactaagaatgctgccttggagagggtggaagaactggaagaaaacatttctcatttatctgaaaaactgcaagacacagagaatgaagccatgtccaagattgtggaactggaaaagcaactcatgcagaggaacaaggagctggatgtcgttcgggaaatctacaaagatgcaaatactcaagttcacacattaagaaaaatggtcaaagaaaaagaagaagcaattcaaagacagtctaccctggaaaaaaagattcatgagctagagaaacaagggaccattaaaattcagaagaaaggggatggggatatcgccatactgccagttgtggcttctggcacattgtccatggggtcagaagtggtagcaggtaactctgtgggacccacaatgggggccgcttcctcaggacccttgccccctcctccaccaccactgcctccctcatcagacacacctgaaacagtgcaaaatggtccagtaacaccacctatgccaccgccgccgccgccccctcctccacctcctcctcccccaccgccccctccncctcctcctctcccaggccctgcagctgagactgtaccagctcctcccttagcacctccccttccctctgcacctccgctgcctggaacatcttcacccacagtggttttcaactcaggattagcagatgggccaatcaagcttttctctgtgaaaattaagaagccaatcaagacgaagttcagaatgccagtgtttaactgggttgctctgaagcccaatcagatcaatggcacagtcttcaatgaaattgatgatgagcgaattctggaggatttaaatgtggatgaatttgaggaaatattcaagacaaaagcccaaggacctgccattgatctttcttcaagcaaacagaagataccacagaagggatcaaacaaagtgacattactagaagcaaacagggccaaaaatcttgccataactttaaggaaagctggaaagactgctgatgaaatatgtaaagctattcatgtatttgacttgaagacactgcctgtggactttgtggaatgcttgatgcggttcctaccaactgagaatgaagtgaaagtgcttcggctctacgagcgggaaaggaagcctctggaaaacttgtcagatgaagatcggttcatgatgcagtttagtaaaatcgagaggctcatgcagaagatgaccatcatggccttcattgggaactttgctgaaagcattcagatgctgactcctcaactacatgcgattatagcagcatctgtctctataaagtcgtcccaaaaactcaagaaaattctggagatcatcttagcccttggaaactacatgaatagcagtaaaagaggagcagtttatggatttaaacttcagagtttagatctgctcttagatacaaagtcaacagacagaaagcaaacactgttgcactatatatccaatgtggtgaaagaaaaatatcaccaagtgtccctgttttataatgagcttcattatgtggaaaaagctgctgcagtctcccttgagaatgttttgctggatgtcaaggagctccagaggggaatggacttgaccaagagagagtacaccatgcatgaccataacacgctgctgaaggagttcatcctcaacaatgaggggaagctgaagaagctgcaggatgatgccaagatcgcacaggatgcctttgatgatgttgtgaagtattttggagaaaaccccaagacaacaccaccctctgtcttctttcctgtctttgtccggtttgtgaaagcatataagcaagcagaagaggaaaatgagctgaggaaaaagcaggaacaagctctcatggaaaaactcctagagcaagaagctctgatggagcagcaggatccaaagtctccttctcataaatcaaagaggcagcagcaagagttaattgcagaattaagaagacgacaagttaaagataacagacatgtatatgagggaaaagatggtgccattgaagatattatcacagccttaaagaagaataatatcactaaatttccaaatgttcactcgaggatcttagaaaccaaccatacagacgagccgatgcggtgaggagaagcgtcaggcggcgctttgatgatcagaacttgcgttctgttaatggtgccgaaataacaatgtgaacctgagactggcctgcatgaatacagggtgtgcgtgaatgaaactgcccacatgaactttatgtgctacgatttaactgcagccttgaacacacacaaaaatattcttaagggctcagatttagcaaacacggaagaattttaaaatgagctctcctttcaacccttgttaacaagtgcctaaaaatggaagtacctgttcagattaatcaaagcaataggatttgatttgattaggtatctttttacaccagtatgttatttttaaccaaaatgtaaagttcttattaaactcattacctgccattgtgattgtcccatcatggcccacctggtttcctgatgttgtaaataacatcaatgcatctgctgtgggtcctttgctgagatgtcttcgaaggaattttgttttagccatatccatcaactttgtattttacttgcaatttggaagaaggaaagtcacatgatgaaactccttttgtctataaccaggccctggcaaagtgcaaacaggatgcaactgcagtggcacaaaggtcactcaatcctttgtttccagtttcacattctactacttctgtgctagagaacgatgctctgtgagaggcattcactagtatgaatgtggggatatagtgtataagacttatttgcagtactgtgttcttcagctagaggcagctttttaaataatgcaagtgtatttattagcattaaaattaacatctcagtaatcagcattagcatttctgaggaccattattaattctgagaacagaaattggtgccttgcaaggaagtttactagctctatcaacaagcattcaaggttacatctgctagcagagtagtgttaggaacctggccttactctcctctgacaatcgcaattttttcttattttttataaattcaagaagatacacttggcatcgtgtatcgaggctaagtttttcatgcatttcccagactacttatggagaattgcagtttaagttgctgaaaagtattaacatggtattaagcttaaataatacgtaatgggactagatggcccactaagccactgttattttccttcctctctggcagggcacttgatccattccaaagtcaaaaactggactgaagctaaatttgtacttttcataatatacattctgcttctggcttatcttcttggtacatcaatatattaattgtaaagtttattgtatagtatttaaccgctgaagttcctattttatgttgtgcttatgtgaaccccttggtgaaggtcccttttccttggatgtgtagttatatgatctttttaaatgtacagatattttgctataaaatcggtgcagttttttatggtttttacacttctctttaattcccacctaagcctctgggtaatattgtaaatattgttttaaaatgcatcagcctatgctatacaatctgaatgttattttaacttatagttttttttaatatatatatttaactataaggacagtttagggaacaagttacctaccacatttcactttagtgtacctatttacagaaagattaaactgccacctgcgggcacattcccataaatgtgtactttactttaaaaagaacatgccacgattttgtctttctgtggactcaacattcacttcgattaaaaatagcaatttgaccaagttggacttccactacaaagcagctgttttccaaagttcaatgctgacatatatgtatattaaaataattgcctatttattaatctacaaatagacaacgttggcatgttcttttctgtttgtctattaatgggcctgcttcttagcaatattagaatgttttataaaagcaattcatgttacttttctggtcttttcatggcatatgagcaaataataaactatttacactactagtaaaaaaaaaaagaaaaaaaaaaaagaaaaacacaaaatgaatgaaaacacaggcgacaaccaaaagctcgaatagagagggagaagagacaacacaaaaaaaaccgcactagacaacacgcgaggaatacaacagacacaaaaacacggggaacagaacacgtagagaacagaaaggcaaacaaggacaaagagaca

SEQ ID NO: 423166 - DNA, 4099 bp, Homo sapiens
  misc_feature (2077)..(2077): n is a, c, g, or t
  misc_feature (3979)..(3979): n is a, c, g, or t
gcggccgcgggcccggcagaaggccgagtaggagggaccacgcgccgggggccgcgatctctggcagggggcggtgtgccagcggagcaccatgcacataggcgcccagcgccccgactacccctcccgaggaaaagaggccggggccgcgctggggcggcggagagcatgagggaggccggggggcggctcggcttggagcgctgctagggagcggtgcgcgccgcacacccgcctgggcgcggcggagggcggggagccgggcaggtcgcgcctgcgggcggcagccgaccgccgggagctgttctgatttccgacgcgcacgctaggggcccggagcagcccccggccccggcgcgccgccgacatgggcaacgcagggagcatggattcgcagcagaccgatttcagggcgcacaacgtgcctttgaagctgccgatgccagagccaggtgaactggaggagcgatttgccatcgtgctgaacgctatgaacctacctcctgacaaagccaggttactgcggcagtatgataatgagaaaaaatgggaactgatttgtgatcaggaacgattccaggtgaagaatcctccccatacatacattcaaaagctcaaaggctatctggatccagctgtaaccaggaagaaattcagacggcgtgttcaagaatctacacaagtgctaagagaactggaaatttctttgagaactaaccacattggatgggtcagagaatttctgaatgaagaaaacaaaggtcttgatgttctagtggaatatctctcatttgcacagtacgcggtaacttttgactttgaaagtgtggagagtactgtggagagctcggtggacaaatcaaagccctggagtaggtccatcgaggacctgcacagagggagcaacctgccctcacctgtgggcaacagtgtctcccgctctggaagacattctgcactgcgatataatacattgccaagcagaagaactctgaaaaattcaagattagtgagtaagaaagatgatgtgcatgtctgtatcatgtgtttacgtgccatcatgaattatcagtatggtttcaacatggtcatgtctcatccacacgctgtcaatgagattgcactaagcctgaacaacaagaatcccagaacaaaagcccttgtcttagaactgttggcagccgtttgtcttgtcagaggcgggcatgaaatcattttatcagcatttgataactttaaagaggtttgtggagaaaaacagcgctttgagaagttgatggaacatttcaggaatgaagacaataacatagattttatggtggcttctatgcagtttattaatattgtagtccattcagtagaagatatgaatttcagagttcacctgcagtatgaatttaccaaattaggcctggacgaatacttggacaagctgaaacacactgagagtgacaagcttcaagtccagatccaggcttacctggacaatgtttttgatgtaggagctctactggaagatgctgaaactaagaatgctgccttggagagggtggaagaactggaagaaaacatttctcatttatctgaaaaactgcaagacacagagaatgaagccatgtccaagattgtggaactggaaaagcaactcatgcagaggaacaaggagctggatgtcgttcgggaaatctacaaagatgcaaatactcaagttcacacattaagaaaaatggtcaaagaaaaagaagaagcaattcaaagacagtctaccctggaaaaaaagattcatgagctagagaaacaagggaccattaaaattcagaagaaaggggatggggatatcgccatactgccagttgtggcttctggcacattgtccatggggtcagaagtggtagcaggtaactctgtgggacccacaatgggggccgcttcctcaggacccttgccccctcctccaccaccactgcctccctcatcagacacacctgaaacagtgcaaaatggtccagtaacaccacctatgccaccgccgccgccgccccctcctccacctcctcctcccccaccgccccctccncctcctcctctcccaggccctgcagctgagactgtaccagctcctcccttagcacctccccttccctctgcacctccgctgcctggaacatcttcacccacagtggttttcaactcaggattagcagatgggccaatcaagcttttctctgtgaaaattaagaagccaatcaagacgaagttcagaatgccagtgtttaactgggttgctctgaagcccaatcagatcaatggcacagtcttcaatgaaattgatgatgagcgaattctggaggatttaaatgtggatgaatttgaggaaatattcaagacaaaagcccaaggacctgccattgatctttcttcaagcaaacagaagataccacagaagggatcaaacaaagtgacattactagaagcaaacagggccaaaaatcttgccataactttaaggaaagctggaaagactgctgatgaaatatgtaaagctattcatgtatttgacttgaagacactgcctgtggactttgtggaatgcttgatgcggttcctaccaactgagaatgaagtgaaagtgcttcggctctacgagcgggaaaggaagcctctggaaaacttgtcagatgaagatcggttcatgatgcagtttagtaaaatcgagaggctcatgcagaagatgaccatcatggccttcattgggaactttgctgaaagcattcagatgctgactcctcaactacatgcgattatagcagcatctgtctctataaagtcgtcccaaaaactcaagaaaattctggagatcatcttagcccttggaaactacatgaatagcagtaaaagaggagcagtttatggatttaaacttcagagtttagatctgctcttagatacaaagtcaacagacagaaagcaaacactgttgcactatatatccaatgtggtgaaagaaaaatatcaccaagtgtccctgttttataatgagcttcattatgtggaaaaagctgctgcagtctcccttgagaatgttttgctggatgtcaaggagctccagaggggaatggacttgaccaagagagagtacaccatgcatgaccataacacgctgctgaaggagttcatcctcaacaatgaggggaagctgaagaagctgcaggatgatgccaagatcgcacaggatgcctttgatgatgttgtgaagtattttggagaaaaccccaagacaacaccaccctctgtcttctttcctgtctttgtccggtttgtgaaagcatataagcaagcagaagaggaaaatgagctgaggaaaaagcaggaacaagctctcatggaaaaactcctagagcaagaagctctgatggagcagcaggatccaaagtctccttctcataaatcaaagaggcagcagcaagagttaattgcagaattaagaagacgacaagttaaagataacagacatgtatatgagggaaaagatggtgccattgaagatattatcacagtgctgaagactgtgccctttactgctcgcaccgccaagcgtggctctcggtttttctgcgaacctgttctcactgaggaataccattactaaactattactctttctcacctgatgctcttaaaaggttgctacaggttttttgatgtcttatgtccccctctgtgtgtctgtcagggcccaccaacatgctagcatggaattgccatctccatcatgttatattttgtgttgttctcatgctgcatggttttgcatttcaattattattgctcactcactggccactttcaatacatgtatgtattcacattgctgtaacagtctggatgtgtttgacagctgaattcatagaattgttcacagaaattttcagaaaaatagagcaaaaatattaagagcacttctttgagaatcagtatntggtaccaagtagattgcttataagatttttgagctaatgtccttcaacatatccattaataacataactgctatacctaacatgtattaagaacttactgtgttcaggttggatgcagt

SEQ ID NO: 423167 - DNA, 3898 bp, Homo sapiens
  misc_feature (2077)..(2077): n is a, c, g, or t
  misc_feature (3873)..(3873): n is a, c, g, or t
gcggccgcgggcccggcagaaggccgagtaggagggaccacgcgccgggggccgcgatctctggcagggggcggtgtgccagcggagcaccatgcacataggcgcccagcgccccgactacccctcccgaggaaaagaggccggggccgcgctggggcggcggagagcatgagggaggccggggggcggctcggcttggagcgctgctagggagcggtgcgcgccgcacacccgcctgggcgcggcggagggcggggagccgggcaggtcgcgcctgcgggcggcagccgaccgccgggagctgttctgatttccgacgcgcacgctaggggcccggagcagcccccggccccggcgcgccgccgacatgggcaacgcagggagcatggattcgcagcagaccgatttcagggcgcacaacgtgcctttgaagctgccgatgccagagccaggtgaactggaggagcgatttgccatcgtgctgaacgctatgaacctacctcctgacaaagccaggttactgcggcagtatgataatgagaaaaaatgggaactgatttgtgatcaggaacgattccaggtgaagaatcctccccatacatacattcaaaagctcaaaggctatctggatccagctgtaaccaggaagaaattcagacggcgtgttcaagaatctacacaagtgctaagagaactggaaatttctttgagaactaaccacattggatgggtcagagaatttctgaatgaagaaaacaaaggtcttgatgttctagtggaatatctctcatttgcacagtacgcggtaacttttgactttgaaagtgtggagagtactgtggagagctcggtggacaaatcaaagccctggagtaggtccatcgaggacctgcacagagggagcaacctgccctcacctgtgggcaacagtgtctcccgctctggaagacattctgcactgcgatataatacattgccaagcagaagaactctgaaaaattcaagattagtgagtaagaaagatgatgtgcatgtctgtatcatgtgtttacgtgccatcatgaattatcagtatggtttcaacatggtcatgtctcatccacacgctgtcaatgagattgcactaagcctgaacaacaagaatcccagaacaaaagcccttgtcttagaactgttggcagccgtttgtcttgtcagaggcgggcatgaaatcattttatcagcatttgataactttaaagaggtttgtggagaaaaacagcgctttgagaagttgatggaacatttcaggaatgaagacaataacatagattttatggtggcttctatgcagtttattaatattgtagtccattcagtagaagatatgaatttcagagttcacctgcagtatgaatttaccaaattaggcctggacgaatacttggacaagctgaaacacactgagagtgacaagcttcaagtccagatccaggcttacctggacaatgtttttgatgtaggagctctactggaagatgctgaaactaagaatgctgccttggagagggtggaagaactggaagaaaacatttctcatttatctgaaaaactgcaagacacagagaatgaagccatgtccaagattgtggaactggaaaagcaactcatgcagaggaacaaggagctggatgtcgttcgggaaatctacaaagatgcaaatactcaagttcacacattaagaaaaatggtcaaagaaaaagaagaagcaattcaaagacagtctaccctggaaaaaaagattcatgagctagagaaacaagggaccattaaaattcagaagaaaggggatggggatatcgccatactgccagttgtggcttctggcacattgtccatggggtcagaagtggtagcaggtaactctgtgggacccacaatgggggccgcttcctcaggacccttgccccctcctccaccaccactgcctccctcatcagacacacctgaaacagtgcaaaatggtccagtaacaccacctatgccaccgccgccgccgccccctcctccacctcctcctcccccaccgccccctccncctcctcctctcccaggccctgcagctgagactgtaccagctcctcccttagcacctccccttccctctgcacctccgctgcctggaacatcttcacccacagtggttttcaactcaggattagcagatgggccaatcaagcttttctctgtgaaaattaagaagccaatcaagacgaagttcagaatgccagtgtttaactgggttgctctgaagcccaatcagatcaatggcacagtcttcaatgaaattgatgatgagcgaattctggaggatttaaatgtggatgaatttgaggaaatattcaagacaaaagcccaaggacctgccattgatctttcttcaagcaaacagaagataccacagaagggatcaaacaaagtgacattactagaagcaaacagggccaaaaatcttgccataactttaaggaaagctggaaagactgctgatgaaatatgtaaagctattcatgtatttgacttgaagacactgcctgtggactttgtggaatgcttgatgcggttcctaccaactgagaatgaagtgaaagtgcttcggctctacgagcgggaaaggaagcctctggaaaacttgtcagatgaagatcggttcatgatgcagtttagtaaaatcgagaggctcatgcagaagatgaccatcatggccttcattgggaactttgctgaaagcattcagatgctgactcctcaactacatgcgattatagcagcatctgtctctataaagtcgtcccaaaaactcaagaaaattctggagatcatcttagcccttggaaactacatgaatagcagtaaaagaggagcagtttatggatttaaacttcagagtttagatctgctcttagatacaaagtcaacagacagaaagcaaacactgttgcactatatatccaatgtggtgaaagaaaaatatcaccaagtgtccctgttttataatgagcttcattatgtggaaaaagctgctgcagtctcccttgagaatgttttgctggatgtcaaggagctccagaggggaatggacttgaccaagagagagtacaccatgcatgaccataacacgctgctgaaggagttcatcctcaacaatgaggggaagctgaagaagctgcaggatgatgccaagatcgcacaggatgcctttgatgatgttgtgaagtattttggagaaaaccccaagacaacaccaccctctgtcttctttcctgtctttgtccggtttgtgaaagcatataagcaagcagaagaggaaaatgagctgaggaaaaagcaggaacaagctctcatggaaaaactcctagagcaagaagctctgatggagcagcaggatccaaagtctccttctcataaatcaaagaggcagcagcaagagttaattgcagaattaagaagacgacaagttaaagataacagacatgtatatgagggaaaagatggtgccattgaagatattatcacagtgctgaagactgtgccctttactgctcgcaccgccaagcgtggctctcggtttttctgcgaacctgttctcactgaggaataccattactaaactattactctttctcacctgatgctcttaaaagatcttagaaaccaaccatacagacgagccgatgcggtgaggagaagcgtcaggcggcgctttgatgatcagaacttgcgttctgttaatggtgccgaaataacaatgtgaacctgagactggcctgcatgaatacagggtgtgcgtgttcaggaggttttctgttgcggtcacccatgatggcgggcctncccatttgggccaacttttcctggg

SEQ ID NO: 423168 - DNA, 1275 bp, Homo sapiens
gcggccgcgggcccggcagaaggccgagtaggagggaccacgcgccgggggccgcgatctctggcagggggcggtgtgccagcggagcaccatgcacataggcgcccagcgccccgactacccctcccgaggaaaagaggccggggccgcgctggggcggcggagagcatgagggaggccggggggcggctcggcttggagcgctgctagggagcggtgcgcgccgcacacccgcctgggcgcggcggagggcggggagccgggcaggtcgcgcctgcgggcggcagccgaccgccgggagctgttctgatttccgacgcgcacgctaggggcccggagcagcccccggccccggcgcgccgccgacatgggcaacgcagggagcatggattcgcagcagaccgatttcagggcgcacaacgtgcctttgaagctgccgatgccagagccaggtgaactggaggagcgatttgccatcgtgctgaacgctatgaacctacctcctgacaaagccaggttactgcggcagtatgataatgagaaaaaatgggaactgatttgtgatcaggaacgattccaggtgaagaatcctccccatacatacattcaaaagctcaaaggctatctggatccagctgtaaccaggaagaaattcagacggcgtgttcaagaatctacacaagtgctaagagaactggaaatttctttgagaactaaccacattggatgggtcagagaatttctgaatgaagaaaacaaaggtcttgatgttctagtggaatatctctcatttgcacagtacgcggtaacttttgactttgaaagtgtggagagtactgtggagagctcggtggacaaatcaaagccctggagtaggtccatcgaggacctgcacagagggagcaacctgccctcacctgtgggcaacagtgtctcccgctctggaagacattctgcactgcgatataatacattgccaagcagaagaactctgaaaaattcaagattagtgagtaagaaagatgatgtgcatgtctgtatcatgtgtttacgtgccatcatgaattatcaggtatgttggagcttctggttcttttaaaaaaaacctgaattaatcagactcagaaatgactgctgggtgcagtgtacaccgcttgggcgaagggtacaataaaagcccagacttcatcatcctacaatttatctgtgttaccaaaagctgcttgtacccctaaagctgttgaaatttttttaaaaaagaagaaaaaccaacca

SEQ ID NO: 423169 - DNA, 1122 bp, Homo sapiens
gtagtagcatgatcagcactgaattcaggccatctctgagccagtggccatgctctcagccctgcctccaatgctgcctcccacatgaaaattaatgttgtgtaaaaaaaaaaaaaaaactcaaaaaaggaaagcaggacaaggatgtgtcattacaagacacagtatgctgtacaaacaaaacctaaattatatataaatacacccccaccccagaaccctgtcttccctcactacctgatcaaagcaatgccaagggtccctccctccagggccaatgtagcttttaaagtccagaacccaggactttaagcatcccttgccttgcggtgacgtttacagtactgcaacctcctgttggagtcacctgtttgatcagttccgtaagtgcagggtaacacctacagcttaattggaagcattcactctactggctggattcaaagacctggagtcctgggagttaacctttcagataaactaactggatcatttcctaatctggatcctatctaatcctactatctcctcagagccaacacagtaggaagcatcttctactctgaagcttccaaaggcattacttagggatattggtgagggtcacataagaaaagttatacaatgagctaacagcttaagttgatataaattacttccaagtaagttattcagggccgtttgcttctgctttacactgcattccacagtcattttcatattattcttttaaaagtttatactatagtcactttaaaaattgtctaagcaatcacctctttgtgtttttgattaataacaacttaatgagctattatataaatcaagagagaaataattagtcttaaggaagccaataatgtgctaattcccagtaaggagaaaaagcaatgtaaatagaattttacataaccaacaataacttggaaagcagttttatcaaaatggttttgcaaaggtttcccaaaagcacttacagcagtttatatcaagagatcctaagtttaggggtatggagaatctcaattctttaaagcagaaattcacctgtttcataattgtaatatgtaattttctccccttggacctaagatatttatacattcaaaagtttacaacttg

SEQ ID NO: 423170 - DNA, 479 bp, Homo sapiens
tcagaagaaaggggatggggatatcgccatactgccagttgtggcttctggcacattgtccatggggtcagaagtggtagcaggtaactctgtgggacccacaatgggggccgcttcctcaggacccttgccccctcctccaccaccactgcctccctcatcagacacacctgaaacaggtaagaagccttggcaggaggactgaggaagttttggaatatttgtatttcttcttttgccaactgtccacttctgtcctttgtccgtttttgttggcatgttctttaagaattggttttcttgagtagttcttaactgtttacattttgagattaaatttataaatcctcatttcacatatgttgaaatatttttcccacatgtcaatgaggacattttttggtttttgaaaacagtcctttgtccttttaagtgtgttgttttcagatggctttatatgcacatggcttattgcagga

SEQ ID NO: 423171 - DNA, 660 bp, Homo sapiens
acagaaataatctatgtatttttctctcaaagtcctagaatcctaccagtattacatcctgttttgtttgattgtaaatattgaaggcaaatgttttatgtctttgattcaatgctcagtgagtttgaagggcccattagctgacttttctacacaagctgctttgattggctgccagctggcctttgtcctgcttagacacatgctattaaaggttgctattctctcactggcactctcccctttacagatcttagaaaccaaccatacagacgagccgatgcggtgaggagaagcgtcaggcggcgctttgatgatcagaacttgcgttctgttaatggtgccgaaataacaatgtgaacctgagactggcctgcatgaatacagggtgtgcgtgaatgaaactgcccacatgaactttatgtgctacgatttaactgcagccttgaacacacacaaaaatattcttaagggctcagatttagcaaacacggaagaattttaaaatgagctctcctttcaacccttgttaacaagtgcctaaaaatggaagtacctgttcagattaatcaaagcaataggatttgatttgattaggtatctttttacaccagtatgttatttttaaccaaaatgtaaagttcttattaaactcattac

SEQ ID NO: 423172 - DNA, 612 bp, Homo sapiens
acagaggggacaaaaaatagttgcattgttgtcttttttttttttaattcttttcctcatagttgtttatcaaagtgagtataatttgaatctatcagtgattctgatcattgtgttctcttttggtgttttctgttttgtgtctggtggggctacagtgctttacaaagaaattggataccttgtgacctttttgttgagtagaaagggagtctgccaaagcgacaaggcatcacctttgctaaaatgcaagtctgattgttcaaagcagatcatctcacatgtcccaccatagaacttcagaatttcccgcctctcatctaaccgatttgatgtttaagtgacttctgtgggtgttttggtttaatcagatactaggaattgagagaaagtcatgaaaaaaccatagtggtattatttggtctgcctgcaagttaccaatttggaagcctgctgtggaatgtgacatcttttctctctttattttttttaaacagaacgctatgaacctacctcctgacaaagccaggttactgcggcagtatgataatgagaaaaaatgggaactgatttgtgatcaggtaagaaacagtgacactttcttttatgaaa

SEQ ID NO: 423173 - DNA, 5567 bp, Homo sapiens
  misc_feature (2077)..(2077): n is a, c, g, or t
gcggccgcgggcccggcagaaggccgagtaggagggaccacgcgccgggggccgcgatctctggcagggggcggtgtgccagcggagcaccatgcacataggcgcccagcgccccgactacccctcccgaggaaaagaggccggggccgcgctggggcggcggagagcatgagggaggccggggggcggctcggcttggagcgctgctagggagcggtgcgcgccgcacacccgcctgggcgcggcggagggcggggagccgggcaggtcgcgcctgcgggcggcagccgaccgccgggagctgttctgatttccgacgcgcacgctaggggcccggagcagcccccggccccggcgcgccgccgacatgggcaacgcagggagcatggattcgcagcagaccgatttcagggcgcacaacgtgcctttgaagctgccgatgccagagccaggtgaactggaggagcgatttgccatcgtgctgaacgctatgaacctacctcctgacaaagccaggttactgcggcagtatgataatgagaaaaaatgggaactgatttgtgatcaggaacgattccaggtgaagaatcctccccatacatacattcaaaagctcaaaggctatctggatccagctgtaaccaggaagaaattcagacggcgtgttcaagaatctacacaagtgctaagagaactggaaatttctttgagaactaaccacattggatgggtcagagaatttctgaatgaagaaaacaaaggtcttgatgttctagtggaatatctctcatttgcacagtacgcggtaacttttgactttgaaagtgtggagagtactgtggagagctcggtggacaaatcaaagccctggagtaggtccatcgaggacctgcacagagggagcaacctgccctcacctgtgggcaacagtgtctcccgctctggaagacattctgcactgcgatataatacattgccaagcagaagaactctgaaaaattcaagattagtgagtaagaaagatgatgtgcatgtctgtatcatgtgtttacgtgccatcatgaattatcagtatggtttcaacatggtcatgtctcatccacacgctgtcaatgagattgcactaagcctgaacaacaagaatcccagaacaaaagcccttgtcttagaactgttggcagccgtttgtcttgtcagaggcgggcatgaaatcattttatcagcatttgataactttaaagaggtttgtggagaaaaacagcgctttgagaagttgatggaacatttcaggaatgaagacaataacatagattttatggtggcttctatgcagtttattaatattgtagtccattcagtagaagatatgaatttcagagttcacctgcagtatgaatttaccaaattaggcctggacgaatacttggacaagctgaaacacactgagagtgacaagcttcaagtccagatccaggcttacctggacaatgtttttgatgtaggagctctactggaagatgctgaaactaagaatgctgccttggagagggtggaagaactggaagaaaacatttctcatttatctgaaaaactgcaagacacagagaatgaagccatgtccaagattgtggaactggaaaagcaactcatgcagaggaacaaggagctggatgtcgttcgggaaatctacaaagatgcaaatactcaagttcacacattaagaaaaatggtcaaagaaaaagaagaagcaattcaaagacagtctaccctggaaaaaaagattcatgagctagagaaacaagggaccattaaaattcagaagaaaggggatggggatatcgccatactgccagttgtggcttctggcacattgtccatggggtcagaagtggtagcaggtaactctgtgggacccacaatgggggccgcttcctcaggacccttgccccctcctccaccaccactgcctccctcatcagacacacctgaaacagtgcaaaatggtccagtaacaccacctatgccaccgccgccgccgccccctcctccacctcctcctcccccaccgccccctccncctcctcctctcccaggccctgcagctgagactgtaccagctcctcccttagcacctccccttccctctgcacctccgctgcctggaacatcttcacccacagtggttttcaactcaggattagcagctgtgaaaattaagaagccaatcaagacgaagttcagaatgccagtgtttaactgggttgctctgaagcccaatcagatcaatggcacagtcttcaatgaaattgatgatgagcgaattctggaggatttaaatgtggatgaatttgaggaaatattcaagacaaaagcccaaggacctgccattgatctttcttcaagcaaacagaagataccacagaagggatcaaacaaagtgacattactagaagcaaacagggccaaaaatcttgccataactttaaggaaagctggaaagactgctgatgaaatatgtaaagctattcatgtatttgacttgaagacactgcctgtggactttgtggaatgcttgatgcggttcctaccaactgagaatgaagtgaaagtgcttcggctctacgagcgggaaaggaagcctctggaaaacttgtcagatgaagatcggttcatgatgcagtttagtaaaatcgagaggctcatgcagaagatgaccatcatggccttcattgggaactttgctgaaagcattcagatgctgactcctcaactacatgcgattatagcagcatctgtctctataaagtcgtcccaaaaactcaagaaaattctggagatcatcttagcccttggaaactacatgaatagcagtaaaagaggagcagtttatggatttaaacttcagagtttagatctgctcttagatacaaagtcaacagacagaaagcaaacactgttgcactatatatccaatgtggtgaaagaaaaatatcaccaagtgtccctgttttataatgagcttcattatgtggaaaaagctgctgcagtctcccttgagaatgttttgctggatgtcaaggagctccagaggggaatggacttgaccaagagagagtacaccatgcatgaccataacacgctgctgaaggagttcatcctcaacaatgaggggaagctgaagaagctgcaggatgatgccaagatcgcacaggatgcctttgatgatgttgtgaagtattttggagaaaaccccaagacaacaccaccctctgtcttctttcctgtctttgtccggtttgtgaaagcatataagcaagcagaagaggaaaatgagctgaggaaaaagcaggaacaagctctcatggaaaaactcctagagcaagaagctctgatggagcagcaggatccaaagtctccttctcataaatcaaagaggcagcagcaagagttaattgcagaattaagaagacgacaagttaaagataacagacatgtatatgagggaaaagatggtgccattgaagatattatcacagatcttagaaaccaaccatacagacgagccgatgcggtgaggagaagcgtcaggcggcgctttgatgatcagaacttgcgttctgttaatggtgccgaaataacaatgtgaacctgagactggcctgcatgaatacagggtgtgcgtgaatgaaactgcccacatgaactttatgtgctacgatttaactgcagccttgaacacacacaaaaatattcttaagggctcagatttagcaaacacggaagaattttaaaatgagctctcctttcaacccttgttaacaagtgcctaaaaatggaagtacctgttcagattaatcaaagcaataggatttgatttgattaggtatctttttacaccagtatgttatttttaaccaaaatgtaaagttcttattaaactcattacctgccattgtgattgtcccatcatggcccacctggtttcctgatgttgtaaataacatcaatgcatctgctgtgggtcctttgctgagatgtcttcgaaggaattttgttttagccatatccatcaactttgtattttacttgcaatttggaagaaggaaagtcacatgatgaaactccttttgtctataaccaggccctggcaaagtgcaaacaggatgcaactgcagtggcacaaaggtcactcaatcctttgtttccagtttcacattctactacttctgtgctagagaacgatgctctgtgagaggcattcactagtatgaatgtggggatatagtgtataagacttatttgcagtactgtgttcttcagctagaggcagctttttaaataatgcaagtgtatttattagcattaaaattaacatctcagtaatcagcattagcatttctgaggaccattattaattctgagaacagaaattggtgccttgcaaggaagtttactagctctatcaacaagcattcaaggttacatctgctagcagagtagtgttaggaacctggccttactctcctctgacaatcgcaattttttcttattttttataaattcaagaagatacacttggcatcgtgtatcgaggctaagtttttcatgcatttcccagactacttatggagaattgcagtttaagttgctgaaaagtattaacatggtattaagcttaaataatacgtaatgggactagatggcccactaagccactgttattttccttcctctctggcagggcacttgatccattccaaagtcaaaaactggactgaagctaaatttgtacttttcataatatacattctgcttctggcttatcttcttggtacatcaatatattaattgtaaagtttattgtatagtatttaaccgctgaagttcctattttatgttgtgcttatgtgaaccccttggtgaaggtcccttttccttggatgtgtagttatatgatctttttaaatgtacagatattttgctataaaatcggtgcagttttttatggtttttacacttctctttaattcccacctaagcctctgggtaatattgtaaatattgttttaaaatgcatcagcctatgctatacaatctgaatgttattttaacttatagttttttttaatatatatatttaactataaggacagtttagggaacaagttacctaccacatttcactttagtgtacctatttacagaaagattaaactgccacctgcgggcacattcccataaatgtgtactttactttaaaaagaacatgccacgattttgtctttctgtggactcaacattcacttcgattaaaaatagcaatttgaccaagttggacttccactacaaagcagctgttttccaaagttcaatgctgacatatatgtatattaaaataattgcctatttattaatctacaaatagacaacgttggcatgttcttttctgtttgtctattaatgggcctgcttcttagcaatattagaatgttttataaaagcaattcatgttacttttctggtcttttcatggcatatgagcaaataataaactatttacactacta

SEQ ID NO: 423174 - DNA, 8087 bp, Homo sapiens
  misc_feature (2077)..(2077): n is a, c, g, or t
gcggccgcgggcccggcagaaggccgagtaggagggaccacgcgccgggggccgcgatctctggcagggggcggtgtgccagcggagcaccatgcacataggcgcccagcgccccgactacccctcccgaggaaaagaggccggggccgcgctggggcggcggagagcatgagggaggccggggggcggctcggcttggagcgctgctagggagcggtgcgcgccgcacacccgcctgggcgcggcggagggcggggagccgggcaggtcgcgcctgcgggcggcagccgaccgccgggagctgttctgatttccgacgcgcacgctaggggcccggagcagcccccggccccggcgcgccgccgacatgggcaacgcagggagcatggattcgcagcagaccgatttcagggcgcacaacgtgcctttgaagctgccgatgccagagccaggtgaactggaggagcgatttgccatcgtgctgaacgctatgaacctacctcctgacaaagccaggttactgcggcagtatgataatgagaaaaaatgggaactgatttgtgatcaggaacgattccaggtgaagaatcctccccatacatacattcaaaagctcaaaggctatctggatccagctgtaaccaggaagaaattcagacggcgtgttcaagaatctacacaagtgctaagagaactggaaatttctttgagaactaaccacattggatgggtcagagaatttctgaatgaagaaaacaaaggtcttgatgttctagtggaatatctctcatttgcacagtacgcggtaacttttgactttgaaagtgtggagagtactgtggagagctcggtggacaaatcaaagccctggagtaggtccatcgaggacctgcacagagggagcaacctgccctcacctgtgggcaacagtgtctcccgctctggaagacattctgcactgcgatataatacattgccaagcagaagaactctgaaaaattcaagattagtgagtaagaaagatgatgtgcatgtctgtatcatgtgtttacgtgccatcatgaattatcagtatggtttcaacatggtcatgtctcatccacacgctgtcaatgagattgcactaagcctgaacaacaagaatcccagaacaaaagcccttgtcttagaactgttggcagccgtttgtcttgtcagaggcgggcatgaaatcattttatcagcatttgataactttaaagaggtttgtggagaaaaacagcgctttgagaagttgatggaacatttcaggaatgaagacaataacatagattttatggtggcttctatgcagtttattaatattgtagtccattcagtagaagatatgaatttcagagttcacctgcagtatgaatttaccaaattaggcctggacgaatacttggacaagctgaaacacactgagagtgacaagcttcaagtccagatccaggcttacctggacaatgtttttgatgtaggagctctactggaagatgctgaaactaagaatgctgccttggagagggtggaagaactggaagaaaacatttctcatttatctgaaaaactgcaagacacagagaatgaagccatgtccaagattgtggaactggaaaagcaactcatgcagaggaacaaggagctggatgtcgttcgggaaatctacaaagatgcaaatactcaagttcacacattaagaaaaatggtcaaagaaaaagaagaagcaattcaaagacagtctaccctggaaaaaaagattcatgagctagagaaacaagggaccattaaaattcagaagaaaggggatggggatatcgccatactgccagttgtggcttctggcacattgtccatggggtcagaagtggtagcaggtaactctgtgggacccacaatgggggccgcttcctcaggacccttgccccctcctccaccaccactgcctccctcatcagacacacctgaaacagtgcaaaatggtccagtaacaccacctatgccaccgccgccgccgccccctcctccacctcctcctcccccaccgccccctccncctcctcctctcccaggccctgcagctgagactgtaccagctcctcccttagcacctccccttccctctgcacctccgctgcctggaacatcttcacccacagtggttttcaactcaggattagcagatgggccaatcaagcttttctctgtgaaaattaagaagccaatcaagacgaagttcagaatgccagtgtttaactgggttgctctgaagcccaatcagatcaatggcacagtcttcaatgaaattgatgatgagcgaattctggaggatttaaatgtggatgaatttgaggaaatattcaagacaaaagcccaaggacctgccattgatctttcttcaagcaaacagaagataccacagaagggatcaaacaaagtgacattactagaagcaaacagggccaaaaatcttgccataactttaaggaaagctggaaagactgctgatgaaatatgtaaagctattcatgtatttgacttgaagacactgcctgtggactttgtggaatgcttgatgcggttcctaccaactgagaatgaagtgaaagtgcttcggctctacgagcgggaaaggaagcctctggaaaacttgtcagatgaagatcggttcatgatgcagtttagtaaaatcgagaggctcatgcagaagatgaccatcatggccttcattgggaactttgctgaaagcattcagatgctgactcctcaactacatgcgattatagcagcatctgtctctataaagtcgtcccaaaaactcaagaaaattctggagatcatcttagcccttggaaactacatgaatagcagtaaaagaggagcagtttatggatttaaacttcagagtttagatctgctcttagatacaaagtcaacagacagaaagcaaacactgttgcactatatatccaatgtggtgaaagaaaaatatcaccaagtgtccctgttttataatgagcttcattatgtggaaaaagctgctgcagtctcccttgagaatgttttgctggatgtcaaggagctccagaggggaatggacttgaccaagagagagtacaccatgcatgaccataacacgctgctgaaggagttcatcctcaacaatgaggggaagctgaagaagctgcaggatgatgccaagatcgcacaggatgcctttgatgatgttgtgaagtattttggagaaaaccccaagacaacaccaccctctgtcttctttcctgtctttgtccggtttgtgaaagcatataagcaagcagaagaggaaaatgagctgaggaaaaagcaggaacaagctctcatggaaaaactcctagagcaagaagctctgatggagcagcaggatccaaagtctccttctcataaatcaaagaggcagcagcaagagttaattgcagaattaagaagacgacaagttaaagataacagacatgtatatgagggaaaagatggtgccattgaagatattatcacagccttaaagaagaataatatcactaaatttccaaatgttcactcgagggtaaggatttcttctagcacaccggtggtggaggatacacagagctgatcttagaaaccaaccatacagacgagccgatgcggtgaggagaagcgtcaggcggcgctttgatgatcagaacttgcgttctgttaatggtgccgaaataacaatgtgaacctgagactggcctgcatgaatacagggtgtgcgtgaatgaaactgcccacatgaactttatgtgctacgatttaactgcagccttgaacacacacaaaaatattcttaagggctcagatttagcaaacacggaagaattttaaaatgagctctcctttcaacccttgttaacaagtgcctaaaaatggaagtacctgttcagattaatcaaagcaataggatttgatttgattaggtatctttttacaccagtatgttatttttaaccaaaatgtaaagttcttattaaactcattacctgccattgtgattgtcccatcatggcccacctggtttcctgatgttgtaaataacatcaatgcatctgctgtgggtcctttgctgagatgtcttcgaaggaattttgttttagccatatccatcaactttgtattttacttgcaatttggaagaaggaaagtcacatgatgaaactccttttgtctataaccaggccctggcaaagtgcaaacaggatgcaactgcagtggcacaaaggtcactcaatcctttgtttccagtttcacattctactacttctgtgctagagaacgatgctctgtgagaggcattcactagtatgaatgtggggatatagtgtataagacttatttgcagtactgtgttcttcagctagaggcagctttttaaataatgcaagtgtatttattagcattaaaattaacatctcagtaatcagcattagcatttctgaggaccattattaattctgagaacagaaattggtgccttgcaaggaagtttactagctctatcaacaagcattcaaggttacatctgctagcagagtagtgttaggaacctggccttactctcctctgacaatcgcaattttttcttattttttataaattcaagaagatacacttggcatcgtgtatcgaggctaagtttttcatgcatttcccagactacttatggagaattgcagtttaagttgctgaaaagtattaacatggtattaagcttaaataatacgtaatgggactagatggcccactaagccactgttattttccttcctctctggcagggcacttgatccattccaaagtcaaaaactggactgaagctaaatttgtacttttcataatatacattctgcttctggcttatcttcttggtacatcaatatattaattgtaaagtttattgtatagtatttaaccgctgaagttcctattttatgttgtgcttatgtgaaccccttggtgaaggtcccttttccttggatgtgtagttatatgatctttttaaatgtacagatattttgctataaaatcggtgcagttttttatggtttttacacttctctttaattcccacctaagcctctgggtaatattgtaaatattgttttaaaatgcatcagcctatgctatacaatctgaatgttattttaacttatagttttttttaatatatatatttaactataaggacagtttagggaacaagttacctaccacatttcactttagtgtacctatttacagaaagattaaactgccacctgcgggcacattcccataaatgtgtactttactttaaaaagaacatgccacgattttgtctttctgtggactcaacattcacttcgattaaaaatagcaatttgaccaagttggacttccactacaaagcagctgttttccaaagttcaatgctgacatatatgtatattaaaataattgcctatttattaatctacaaatagacaacgttggcatgttcttttctgtttgtctattaatgggcctgcttcttagcaatattagaatgttttataaaagcaattcatgttacttttctggtcttttcatggcatatgagcaaataataaactatttacactactaaaaaaaaaaaaaaactcgagttttttttttttttttttgtagaaaattcctttattatagtgcaaattactttcagcagtgacataatgtaacaacacatttagcaacattttacaccacacagtaaataagaaagtgtttctttgaaaatatgtcatcataggaacattatttctacattaatgccagaaaatgccaaggccgtttatctcaaggcaaacagggctccctccttccttttgggtattttctttttaacacaaatgaaatgacttgccattttaacaaatcctcaattctaaaagtgatctctcagggggctttgaactaaggtcggcaagatttgaaatggggcttcaaaattttaaataataattttaaaatacttctggaatagcccaaaaagtagaagtcacttctattaagttttaagtagatatacacactcactccaattttactgtagaaatggacagattgtctaaagcctgctttctattcccccagagcctgattgttatttatactccttggttttggttattgcagaactagggctctggtcagaaataacaccttacatacccgaatactttcctgtggaagctttacattgcattttccatcctgaaattctcaccttagaccttacaggcccaggagagggtgtgaatattgttttcagtttacagctaaagccccttactaatttgggctatacctgaatcaaatcatcacatcatttagattaatcccaataggcttatccaagaggttcccactaacctcacagagaaacaaacagttaacattgtattttcacactaagctgcctaagggcttggctgctaatgagttagctgataggtagacagaataagcgtgtcaattccaatcagtacacgccctgctcctctagtttctgctgaattatgcagtgggtgggaatggttggccactcaaaacagtcttcctatggggctcttccaccataagttggatcaaaactccacaaatgtatttcaaggtgccctttaagtctctcaaatttagggacttttaagtgacaagccatgagaagttaatcacaggcttgaaaatacctggaaccacagaacagcccccacggaacaggctgaatatggttaaataagttggctggtacataaagcttttcaatgtacagccagtcttgttggatacagtgtcttcttatataatacaatggaactgtgctaaacagtttcaaagttgagaagaatccaaatgtatcacctataaaaaattcataattttagtttattttagactttggtactgaaacactgtctacattcttgacacttgaaaatgacatggtcacttcagtgcctctgcatgttgtgtaaaaaaaaaaaaaaaactcaaaaaaggaaagcaggacaaggatgtgtcattacaagacacagtatgctgtacaaacaaaacctaaattatatataaatacacccccaccccagaaccctgtcttccctcactacctgatcaaagcaatgccaagggtccctccctccagggccaatgtagcttttaaagtccagaacccaggactttaagcatcccttgccttgcggtgacgtttacagtactgcaacctcctgttggagtcacctgtttgatcagttccgtaagtgcagggtaacacctacagcttaattggaagcattcactctactggctggattcaaagacctggagtcctgggagttaacctttcagataaactaactggatcatttcctaatctggatcctatctaatcctactatctcctcagagccaacacagtaggaagcatcttctactctgaagcttccaaaggcattacttagggatattggtgagggtcacataagaaaagttatacaatgagctaacagcttaagttgatataaattacttccaagtaagttattcagggccgtttgcttctgctttacactgcattccacagtcattttcatattattcttttaaaagtttatactatagtcactttaaaaattgtctaagcaatcacctctttgtgtttttgattaataacaacttaatgagctattatataaatcaagagagaaataattagtcttaaggaagccaataatgtgctaattcccagtaaggagaaaaagcaatgtaaatagaattttacataaccaacaataacttggaaagcagttttatcaaaatggttttgcaaaggtttcccaaaagcacttacagcagtttatatcaagagatcctaagtttaggggtatggagaatctcaattctttaaagcagaaattcacctgtttcataattgtaatatgtaattttctccccttggacctaagatatttatacattcaaaagtttacaacttg

SEQ ID NO: 423175 - DNA, 7985 bp, Homo sapiens
  misc_feature (2077)..(2077): n is a, c, g, or t
gcggccgcgggcccggcagaaggccgagtaggagggaccacgcgccgggggccgcgatctctggcagggggcggtgtgccagcggagcaccatgcacataggcgcccagcgccccgactacccctcccgaggaaaagaggccggggccgcgctggggcggcggagagcatgagggaggccggggggcggctcggcttggagcgctgctagggagcggtgcgcgccgcacacccgcctgggcgcggcggagggcggggagccgggcaggtcgcgcctgcgggcggcagccgaccgccgggagctgttctgatttccgacgcgcacgctaggggcccggagcagcccccggccccggcgcgccgccgacatgggcaacgcagggagcatggattcgcagcagaccgatttcagggcgcacaacgtgcctttgaagctgccgatgccagagccaggtgaactggaggagcgatttgccatcgtgctgaacgctatgaacctacctcctgacaaagccaggttactgcggcagtatgataatgagaaaaaatgggaactgatttgtgatcaggaacgattccaggtgaagaatcctccccatacatacattcaaaagctcaaaggctatctggatccagctgtaaccaggaagaaattcagacggcgtgttcaagaatctacacaagtgctaagagaactggaaatttctttgagaactaaccacattggatgggtcagagaatttctgaatgaagaaaacaaaggtcttgatgttctagtggaatatctctcatttgcacagtacgcggtaacttttgactttgaaagtgtggagagtactgtggagagctcggtggacaaatcaaagccctggagtaggtccatcgaggacctgcacagagggagcaacctgccctcacctgtgggcaacagtgtctcccgctctggaagacattctgcactgcgatataatacattgccaagcagaagaactctgaaaaattcaagattagtgagtaagaaagatgatgtgcatgtctgtatcatgtgtttacgtgccatcatgaattatcagtatggtttcaacatggtcatgtctcatccacacgctgtcaatgagattgcactaagcctgaacaacaagaatcccagaacaaaagcccttgtcttagaactgttggcagccgtttgtcttgtcagaggcgggcatgaaatcattttatcagcatttgataactttaaagaggtttgtggagaaaaacagcgctttgagaagttgatggaacatttcaggaatgaagacaataacatagattttatggtggcttctatgcagtttattaatattgtagtccattcagtagaagatatgaatttcagagttcacctgcagtatgaatttaccaaattaggcctggacgaatacttggacaagctgaaacacactgagagtgacaagcttcaagtccagatccaggcttacctggacaatgtttttgatgtaggagctctactggaagatgctgaaactaagaatgctgccttggagagggtggaagaactggaagaaaacatttctcatttatctgaaaaactgcaagacacagagaatgaagccatgtccaagattgtggaactggaaaagcaactcatgcagaggaacaaggagctggatgtcgttcgggaaatctacaaagatgcaaatactcaagttcacacattaagaaaaatggtcaaagaaaaagaagaagcaattcaaagacagtctaccctggaaaaaaagattcatgagctagagaaacaagggaccattaaaattcagaagaaaggggatggggatatcgccatactgccagttgtggcttctggcacattgtccatggggtcagaagtggtagcaggtaactctgtgggacccacaatgggggccgcttcctcaggacccttgccccctcctccaccaccactgcctccctcatcagacacacctgaaacagtgcaaaatggtccagtaacaccacctatgccaccgccgccgccgccccctcctccacctcctcctcccccaccgccccctccncctcctcctctcccaggccctgcagctgagactgtaccagctcctcccttagcacctccccttccctctgcacctccgctgcctggaacatcttcacccacagtggttttcaactcaggattagcagatgggccaatcaagcttttctctgtgaaaattaagaagccaatcaagacgaagttcagaatgccagtgtttaactgggttgctctgaagcccaatcagatcaatggcacagtcttcaatgaaattgatgatgagcgaattctggaggatttaaatgtggatgaatttgaggaaatattcaagacaaaagcccaaggacctgccattgatctttcttcaagcaaacagaagataccacagaagggatcaaacaaagtgacattactagaagcaaacagggccaaaaatcttgccataactttaaggaaagctggaaagactgctgatgaaatatgtaaagctattcatgtatttgacttgaagacactgcctgtggactttgtggaatgcttgatgcggttcctaccaactgagaatgaagtgaaagtgcttcggctctacgagcgggaaaggaagcctctggaaaacttgtcagatgaagatcggttcatgatgcagtttagtaaaatcgagaggctcatgcagaagatgaccatcatggccttcattgggaactttgctgaaagcattcagatgctgactcctcaactacatgcgattatagcagcatctgtctctataaagtcgtcccaaaaactcaagaaaattctggagatcatcttagcccttggaaactacatgaatagcagtaaaagaggagcagtttatggatttaaacttcagagtttagatctgctcttagatacaaagtcaacagacagaaagcaaacactgttgcactatatatccaatgtggtgaaagaaaaatatcaccaagtgtccctgttttataatgagcttcattatgtggaaaaagctgctgcagtctcccttgagaatgttttgctggatgtcaaggagctccagaggggaatggacttgaccaagagagagtacaccatgcatgaccataacacgctgctgaaggagttcatcctcaacaatgaggggaagctgaagaagctgcaggatgatgccaagatcgcacaggatgcctttgatgatgttgtgaagtattttggagaaaaccccaagacaacaccaccctctgtcttctttcctgtctttgtccggtttgtgaaagcatataagcaagcagaagaggaaaatgagctgaggaaaaagcaggaacaagctctcatggaaaaactcctagagcaagaagctctgatggagcagcaggatccaaagtctccttctcataaatcaaagaggcagcagcaagagttaattgcagaattaagaagacgacaagttaaagataacagacatgtatatgagggaaaagatggtgccattgaagatattatcacagccttaaagaagaataatatcactaaatttccaaatgttcactcgaggatcttagaaaccaaccatacagacgagccgatgcggtgaggagaagcgtcaggcggcgctttgatgatcagaacttgcgttctgttaatggtgccgaaataacaatgtgaacctgagactggcctgcatgaatacagggtgtgcgtgaatgaaactgcccacatgaactttatgtgctacgatttaactgcagccttgaacacacacaaaaatattcttaagggctcagatttagcaaacacggaagaattttaaaatgagctctcctttcaacccttgttaacaagtgcctaaaaatggaagtacctgttcagattaatcaaagcaataggatttgatttgattaggtatctttttacaccagtatgttatttttaaccaaaatgtaaagttcttattaaactcattacctgccattgtgattgtcccatcatggcccacctggtttcctgatgttgtaaataacatcaatgcatctgctgtgggtcctttgctgagatgtcttcgaaggaattttgttttagccatatccatcaactttgtattttacttgcaatttggaagaaggaaagtcacatgatgaaactccttttgtctataaccaggccctggcaaagtgcaaacaggatgcaactgcagtggcacaaaggtcactcaatcctttgtttccagtttcacattctactacttctgtgctagagaacgatgctctgtgagaggcattcactagtatgaatgtggggatatagtgtataagacttatttgcagtactgtgttcttcagctagaggcagctttttaaataatgcaagtgtatttattagcattaaaattaacatctcagtaatcagcattagcatttctgaggaccattattaattctgagaacagaaattggtgccttgcaaggaagtttactagctctatcaacaagcattcaaggttacatctgctagcagagtagtgttaggaacctggccttactctcctctgacaatcgcaattttttcttattttttataaattcaagaagatacacttggcatcgtgtatcgaggctaagtttttcatgcatttcccagactacttatggagaattgcagtttaagttgctgaaaagtattaacatggtattaagcttaaataatacgtaatgggactagatggcccactaagccactgttattttccttcctctctggcagggcacttgatccattccaaagtcaaaaactggactgaagctaaatttgtacttttcataatatacattctgcttctggcttatcttcttggtacatcaatatattaattgtaaagtttattgtatagtatttaaccgctgaagttcctattttatgttgtgcttatgtgaaccccttggtgaaggtcccttttccttggatgtgtagttatatgatctttttaaatgtacagatattttgctataaaatcggtgcagttttttatggtttttacacttctctttaattcccacctaagcctctgggtaatattgtaaatattttttttttaatatatatatttaactataaggacagtttagggaacaagttacctaccacatttcactttagtgtacctatttacagaaagattaaactgccacctgcgggcacattcccataaatgtgtactttactttaaaaagaacatgccacgattttgtctttctgtggactcaacattcacttcgattaaaaatagcaatttgaccaagttggacttccactacaaagcagctgttttccaaagttcaatgctgacatatatgtatattaaaataattgcctatttattaatctacaaatagacaacgttggcatgttcttttctgtttgtctattaatgggcctgcttcttagcaatattagaatgttttataaaagcaattcatgttacttttctggtcttttcatggcatatgagcaaataataaactatttacactactaaaaaaaaaaaaaaactcgagttttttttttttttttttgtagaaaattcctttattatagtgcaaattactttcagcagtgacataatgtaacaacacatttagcaacattttacaccacacagtaaataagaaagtgtttctttgaaaatatgtcatcataggaacattatttctacattaatgccagaaaatgccaaggccgtttatctcaaggcaaacagggctccctccttccttttgggtattttctttttaacacaaatgaaatgacttgccattttaacaaatcctcaattctaaaagtgatctctcagggggctttgaactaaggtcggcaagatttgaaatggggcttcaaaattttaaataataattttaaaatacttctggaatagcccaaaaagtagaagtcacttctattaagttttaagtagatatacacactcactccaattttactgtagaaatggacagattgtctaaagcctgctttctattcccccagagcctgattgttatttatactccttggttttggttattgcagaactagggctctggtcagaaataacaccttacatacccgaatactttcctgtggaagctttacattgcattttccatcctgaaattctcaccttagaccttacaggcccaggagagggtgtgaatattgttttcagtttacagctaaagccccttactaatttgggctatacctgaatcaaatcatcacatcatttagattaatcccaataggcttatccaagaggttcccactaacctcacagagaaacaaacagttaacattgtattttcacactaagctgcctaagggcttggctgctaatgagttagctgataggtagacagaataagcgtgtcaattccaatcagtacacgccctgctcctctagtttctgctgaattatgcagtgggtgggaatggttggccactcaaaacagtcttcctatggggctcttccaccataagttggatcaaaactccacaaatgtatttcaaggtgccctttaagtctctcaaatttagggacttttaagtgacaagccatgagaagttaatcacaggcttgaaaatacctggaaccacagaacagcccccacggaacaggctgaatatggttaaataagttggctggtacataaagcttttcaatgtacagccagtcttgttggatacagtgtcttcttatataatacaatggaactgtgctaaacagtttcaaagttgagaagaatccaaatgtatcacctataaaaaattcataattttagtttattttagactttggtactgaaacactgtctacattcttgacacttgaaaatgacatggtcacttcagtgcctctgcatgttgtgtaaaaaaaaaaaaaaaactcaaaaaaggaaagcaggacaaggatgtgtcattacaagacacagtatgctgtacaaacaaaacctaaattatatataaatacacccccaccccagaaccctgtcttccctcactacctgatcaaagcaatgccaagggtccctccctccagggccaatgtagcttttaaagtccagaacccaggactttaagcatcccttgccttgcggtgacgtttacagtactgcaacctcctgttggagtcacctgtttgatcagttccgtaagtgcagggtaacacctacagcttaattggaagcattcactctactggctggattcaaagacctggagtcctgggagttaacctttcagataaactaactggatcatttcctaatctggatcctatctaatcctactatctcctcagagccaacacagtaggaagcatcttctactctgaagcttccaaaggcattacttagggatattggtgagggtcacataagaaaagttatacaatgagctaacagcttaagttgatataaattacttccaagtaagttattcagggccgtttgcttctgctttacactgcattccacagtcattttcatattattcttttaaaagtttatactatagtcactttaaaaattgtctaagcaatcacctctttgtgtttttgattaataacaacttaatgagctattatataaatcaagagagaaataattagtcttaaggaagccaataatgtgctaattcccagtaaggagaaaaagcaatgtaaatagaattttacataaccaacaataacttggaaagcagttttatcaaaatggttttgcaaaggtttcccaaaagcacttacagcagtttatatcaagagatcctaagtttaggggtatggagaatctcaattctttaaagcagaaattcacctgtttcataattgtaatatgtaattttctccccttggacctaagatatttatacattcaaaagtttacaacttg

SEQ ID NO: 423176 - DNA, 4887 bp, Homo sapiens
  misc_feature (2077)..(2077): n is a, c, g, or t
  misc_feature (4861)..(4861): n is a, c, g, or t
  misc_feature (4887)..(4887): n is a, c, g, or t
gcggccgcgggcccggcagaaggccgagtaggagggaccacgcgccgggggccgcgatctctggcagggggcggtgtgccagcggagcaccatgcacataggcgcccagcgccccgactacccctcccgaggaaaagaggccggggccgcgctggggcggcggagagcatgagggaggccggggggcggctcggcttggagcgctgctagggagcggtgcgcgccgcacacccgcctgggcgcggcggagggcggggagccgggcaggtcgcgcctgcgggcggcagccgaccgccgggagctgttctgatttccgacgcgcacgctaggggcccggagcagcccccggccccggcgcgccgccgacatgggcaacgcagggagcatggattcgcagcagaccgatttcagggcgcacaacgtgcctttgaagctgccgatgccagagccaggtgaactggaggagcgatttgccatcgtgctgaacgctatgaacctacctcctgacaaagccaggttactgcggcagtatgataatgagaaaaaatgggaactgatttgtgatcaggaacgattccaggtgaagaatcctccccatacatacattcaaaagctcaaaggctatctggatccagctgtaaccaggaagaaattcagacggcgtgttcaagaatctacacaagtgctaagagaactggaaatttctttgagaactaaccacattggatgggtcagagaatttctgaatgaagaaaacaaaggtcttgatgttctagtggaatatctctcatttgcacagtacgcggtaacttttgactttgaaagtgtggagagtactgtggagagctcggtggacaaatcaaagccctggagtaggtccatcgaggacctgcacagagggagcaacctgccctcacctgtgggcaacagtgtctcccgctctggaagacattctgcactgcgatataatacattgccaagcagaagaactctgaaaaattcaagattagtgagtaagaaagatgatgtgcatgtctgtatcatgtgtttacgtgccatcatgaattatcagtatggtttcaacatggtcatgtctcatccacacgctgtcaatgagattgcactaagcctgaacaacaagaatcccagaacaaaagcccttgtcttagaactgttggcagccgtttgtcttgtcagaggcgggcatgaaatcattttatcagcatttgataactttaaagaggtttgtggagaaaaacagcgctttgagaagttgatggaacatttcaggaatgaagacaataacatagattttatggtggcttctatgcagtttattaatattgtagtccattcagtagaagatatgaatttcagagttcacctgcagtatgaatttaccaaattaggcctggacgaatacttggacaagctgaaacacactgagagtgacaagcttcaagtccagatccaggcttacctggacaatgtttttgatgtaggagctctactggaagatgctgaaactaagaatgctgccttggagagggtggaagaactggaagaaaacatttctcatttatctgaaaaactgcaagacacagagaatgaagccatgtccaagattgtggaactggaaaagcaactcatgcagaggaacaaggagctggatgtcgttcgggaaatctacaaagatgcaaatactcaagttcacacattaagaaaaatggtcaaagaaaaagaagaagcaattcaaagacagtctaccctggaaaaaaagattcatgagctagagaaacaagggaccattaaaattcagaagaaaggggatggggatatcgccatactgccagttgtggcttctggcacattgtccatggggtcagaagtggtagcaggtaactctgtgggacccacaatgggggccgcttcctcaggacccttgccccctcctccaccaccactgcctccctcatcagacacacctgaaacagtgcaaaatggtccagtaacaccacctatgccaccgccgccgccgccccctcctccacctcctcctcccccaccgccccctccncctcctcctctcccaggccctgcagctgagactgtaccagctcctcccttagcacctccccttccctctgcacctccgctgcctggaacatcttcacccacagtggttttcaactcaggattagcagatgggccaatcaagcttttctctgtgaaaattaagaagccaatcaagacgaagttcagaatgccagtgtttaactgggttgctctgaagcccaatcagatcaatggcacagtcttcaatgaaattgatgatgagcgaattctggaggatttaaatgtggatgaatttgaggaaatattcaagacaaaagcccaaggacctgccattgatctttcttcaagcaaacagaagataccacagaagggatcaaacaaagtgacattactagaagcaaacagggccaaaaatcttgccataactttaaggaaagctggaaagactgctgatgaaatatgtaaagctattcatgtatttgacttgaagacactgcctgtggactttgtggaatgcttgatgcggttcctaccaactgagaatgaagtgaaagtgcttcggctctacgagcgggaaaggaagcctctggaaaacttgtcagatgaagatcggttcatgatgcagtttagtaaaatcgagaggctcatgcagaagatgaccatcatggccttcattgggaactttgctgaaagcattcagatgctgactcctcaactacatgcgattatagcagcatctgtctctataaagtcgtcccaaaaactcaagaaaattctggagatcatcttagcccttggaaactacatgaatagcagtaaaagaggagcagtttatggatttaaacttcagagtttagatctgctcttagatacaaagtcaacagacagaaagcaaacactgttgcactatatatccaatgtggtgaaagaaaaatatcaccaagtgtccctgttttataatgagcttcattatgtggaaaaagctgctgcagtctcccttgagaatgttttgctggatgtcaaggagctccagaggggaatggacttgaccaagagagagtacaccatgcatgaccataacacgctgctgaaggagttcatcctcaacaatgaggggaagctgaagaagctgcaggatgatgccaagatcgcacaggatgcctttgatgatgttgtgaagtattttggagaaaaccccaagacaacaccaccctctgtcttctttcctgtctttgtccggtttgtgaaagcatataagcaagcagaagaggaaaatgagctgaggaaaaagcaggaacaagctctcatggaaaaactcctagagcaagaagctctgatggagcagcaggatccaaagtctccttctcataaatcaaagaggcagcagcaagagttaattgcagaattaagaagacgacaagttaaagataacagacatgtatatgagggaaaagatggtgccattgaagatattatcacagccttaaagaagaataatatcactaaatttccaaatgttcactcgaggatcttagaaaccaaccatacagacgagccgatgcggtgaggagaagcgtcaggcggcgctttgatgatcagaacttgcgttctgttaatggtgccgaaataacaatgtgaacctgagactggcctgcatgaatacagggtgtgcgtgaatgaaactgcccacatgaactttatgtgctacgatttaactgcagccttgaacacacacaaaaatattcttaagggctcagatttagcaaacacggaagaattttaaaatgagctctcctttcaacccttgttaacaagtgcctaaaaatggaagtacctgttcagattaatcaaagcaataggatttgatttgattaggtatctttttacaccagtatgttatttttaaccaaaatgtaaagttcttattaaactcattacctgccattgtgattgtcccatcatggcccacctggtttcctgatgttgtaaataacatcaatgcatctgctgtgggtcctttgctgagatgtcttcgaaggaattttgttttagccatatccatcaactttgtattttacttgcaatttggaagaaggaaagtcacatgatgaaactccttttgtctataaccaggccctggcaaagtgcaaacaggatgcaactgcagtggcacaaaggtcactcaatcctttgtttccagtttcacattctactacttctgtgctagagaacgatgctctgtgagaggcattcactagtatgaatgtggggatatagtgtataagacttatttgcagtactgtgttcttcagctagaggcagctttttaaataatgcaagtgtatttattagcattaaaattaacatctcagtaatcagcattagcatttctgaggaccattattaattctgagaacagaaattggtgccttgcaaggaagtttactagctctatcaacaagcattcaaggttacatctgctagcagagtagtgttaggaacctggccttactctcctctgacaatcgcaattttttcttattttttataaattcaagaagatacacttggcatcgtgtatcgaggctaagtttttcatgcatttcccagactacttatggagaattgcagtttaagttgctgaaaagtattaacatggtattaagcttaaataatacgtaatgggactagatggcccactaagccactgttattttccttcctctctggcagggcacttgatccattccaaagtcattatctttcttgtacatcattatataantgtaaagctcattgatagcatttacn

SEQ ID NO: 423177 - DNA, 3876 bp, Homo sapiens
  misc_feature (2077)..(2077): n is a, c, g, or t
gcggccgcgggcccggcagaaggccgagtaggagggaccacgcgccgggggccgcgatctctggcagggggcggtgtgccagcggagcaccatgcacataggcgcccagcgccccgactacccctcccgaggaaaagaggccggggccgcgctggggcggcggagagcatgagggaggccggggggcggctcggcttggagcgctgctagggagcggtgcgcgccgcacacccgcctgggcgcggcggagggcggggagccgggcaggtcgcgcctgcgggcggcagccgaccgccgggagctgttctgatttccgacgcgcacgctaggggcccggagcagcccccggccccggcgcgccgccgacatgggcaacgcagggagcatggattcgcagcagaccgatttcagggcgcacaacgtgcctttgaagctgccgatgccagagccaggtgaactggaggagcgatttgccatcgtgctgaacgctatgaacctacctcctgacaaagccaggttactgcggcagtatgataatgagaaaaaatgggaactgatttgtgatcaggaacgattccaggtgaagaatcctccccatacatacattcaaaagctcaaaggctatctggatccagctgtaaccaggaagaaattcagacggcgtgttcaagaatctacacaagtgctaagagaactggaaatttctttgagaactaaccacattggatgggtcagagaatttctgaatgaagaaaacaaaggtcttgatgttctagtggaatatctctcatttgcacagtacgcggtaacttttgactttgaaagtgtggagagtactgtggagagctcggtggacaaatcaaagccctggagtaggtccatcgaggacctgcacagagggagcaacctgccctcacctgtgggcaacagtgtctcccgctctggaagacattctgcactgcgatataatacattgccaagcagaagaactctgaaaaattcaagattagtgagtaagaaagatgatgtgcatgtctgtatcatgtgtttacgtgccatcatgaattatcagtatggtttcaacatggtcatgtctcatccacacgctgtcaatgagattgcactaagcctgaacaacaagaatcccagaacaaaagcccttgtcttagaactgttggcagccgtttgtcttgtcagaggcgggcatgaaatcattttatcagcatttgataactttaaagaggtttgtggagaaaaacagcgctttgagaagttgatggaacatttcaggaatgaagacaataacatagattttatggtggcttctatgcagtttattaatattgtagtccattcagtagaagatatgaatttcagagttcacctgcagtatgaatttaccaaattaggcctggacgaatacttggacaagctgaaacacactgagagtgacaagcttcaagtccagatccaggcttacctggacaatgtttttgatgtaggagctctactggaagatgctgaaactaagaatgctgccttggagagggtggaagaactggaagaaaacatttctcatttatctgaaaaactgcaagacacagagaatgaagccatgtccaagattgtggaactggaaaagcaactcatgcagaggaacaaggagctggatgtcgttcgggaaatctacaaagatgcaaatactcaagttcacacattaagaaaaatggtcaaagaaaaagaagaagcaattcaaagacagtctaccctggaaaaaaagattcatgagctagagaaacaagggaccattaaaattcagaagaaaggggatggggatatcgccatactgccagttgtggcttctggcacattgtccatggggtcagaagtggtagcaggtaactctgtgggacccacaatgggggccgcttcctcaggacccttgccccctcctccaccaccactgcctccctcatcagacacacctgaaacagtgcaaaatggtccagtaacaccacctatgccaccgccgccgccgccccctcctccacctcctcctcccccaccgccccctccncctcctcctctcccaggccctgcagctgagactgtaccagctcctcccttagcacctccccttccctctgcacctccgctgcctggaacatcttcacccacagtggttttcaactcaggattagcagatgggccaatcaagcttttctctgtgaaaattaagaagccaatcaagacgaagttcagaatgccagtgtttaactgggttgctctgaagcccaatcagatcaatggcacagtcttcaatgaaattgatgatgagcgaattctggaggatttaaatgtggatgaatttgaggaaatattcaagacaaaagcccaaggacctgccattgatctttcttcaagcaaacagaagataccacagaagggatcaaacaaagtgacattactagaagcaaacagggccaaaaatcttgccataactttaaggaaagctggaaagactgctgatgaaatatgtaaagctattcatgtatttgacttgaagacactgcctgtggactttgtggaatgcttgatgcggttcctaccaactgagaatgaagtgaaagtgcttcggctctacgagcgggaaaggaagcctctggaaaacttgtcagatgaagatcggttcatgatgcagtttagtaaaatcgagaggctcatgcagaagatgaccatcatggccttcattgggaactttgctgaaagcattcagatgctgactcctcaactacatgcgattatagcagcatctgtctctataaagtcgtcccaaaaactcaagaaaattctggagatcatcttagcccttggaaactacatgaatagcagtaaaagaggagcagtttatggatttaaacttcagagtttagatctgctcttagatacaaagtcaacagacagaaagcaaacactgttgcactatatatccaatgtggtgaaagaaaaatatcaccaagtgtccctgttttataatgagcttcattatgtggaaaaagctgctgcagtctcccttgagaatgttttgctggatgtcaaggagctccagaggggaatggacttgaccaagagagagtacaccatgcatgaccataacacgctgctgaaggagttcatcctcaacaatgaggggaagctgaagaagctgcaggatgatgccaagatcgcacaggatgcctttgatgatgttgtgaagtattttggagaaaaccccaagacaacaccaccctctgtcttctttcctgtctttgtccggtttgtgaaagcatataagcaagcagaagaggaaaatgagctgaggaaaaagcaggaacaagctctcatggaaaaactcctagagcaagaagctctgatggagcagcaggatccaaagtctccttctcataaatcaaagaggcagcagcaagagttaattgcagaattaagaagacgacaagttaaagataacagacatgtatatgagggaaaagatggtgccattgaagatattatcacaggtaaaagatatttcttcactgtggcccatggagatcccactggcctcacctagactgggatgcatgcagattttgcagcttcttttgtccagggttgtcaagttcattagttgactttattcacacccagagtgatgcagagaggctttgaagtccatttacagcagcatgtatactgccccaatactctgcattgggaaccctgttaagttttcagcagagctcctttcattttaaagggatttccattgtttatttgatatgtcatcatgctccattttttttttcctcgtggccacacctagccacctgcctgatt

SEQ ID NO: 423178 - DNA, 2267 bp, Homo sapiens
gcggccgcgggcccggcagaaggccgagtaggagggaccacgcgccgggggccgcgatctctggcagggggcggtgtgccagcggagcaccatgcacataggcgcccagcgccccgactacccctcccgaggaaaagaggccggggccgcgctggggcggcggagagcatgagggaggccggggggcggctcggcttggagcgctgctagggagcggtgcgcgccgcacacccgcctgggcgcggcggagggcggggagccgggcaggtcgcgcctgcgggcggcagccgaccgccgggagctgttctgatttccgacgcgcacgctaggggcccggagcagcccccggccccggcgcgccgccgacatgggcaacgcagggagcatggattcgcagcagaccgatttcagggcgcacaacgtgcctttgaagctgccgatgccagagccaggtgaactggaggagcgatttgccatcgtgctgaacgctatgaacctacctcctgacaaagccaggttactgcggcagtatgataatgagaaaaaatgggaactgatttgtgatcaggaacgattccaggtgaagaatcctccccatacatacattcaaaagctcaaaggctatctggatccagctgtaaccaggaagaaattcagacggcgtgttcaagaatctacacaagtgctaagagaactggaaatttctttgagaactaaccacattggatgggtcagagaatttctgaatgaagaaaacaaaggtcttgatgttctagtggaatatctctcatttgcacagtacgcggtaacttttgactttgaaagtgtggagagtactgtggagagctcggtggacaaatcaaagccctggagtaggtccatcgaggacctgcacagagggagcaacctgccctcacctgtgggcaacagtgtctcccgctctggaagacattctgcactgcgatataatacattgccaagcagaagaactctgaaaaattcaagattagtgagtaagaaagatgatgtgcatgtctgtatcatgtgtttacgtgccatcatgaattatcagtatggtttcaacatggtcatgtctcatccacacgctgtcaatgagattgcactaagcctgaacaacaagaatcccagaacaaaagcccttgtcttagaactgttggcagccgtttgtcttgtcagaggcgggcatgaaatcattttatcagcatttgataactttaaagaggtttgtggagaaaaacagcgctttgagaagttgatggaacatttcaggaatgaagacaataacatagattttatggtgagttatttcagtattcaataaagcaaactcagtttcaatactttttttctaaatacacacacacacacacacacacacacacacacacacatatttatattacaaaggacagggaattgcaattaatatgctatagatccaatctagaatgtccctcttaatctgtatttctctttgatttccattttattccttacatacacggtatagtaaagacaaaagtactaatcatagcaaataaaggggaagccgtgcagttggaaacagccatgcctggtgcaaatgctgccattgtttaattgttgatgatgctgcataagaatccttaaggtagaagcaatcttgaccttttttatttttgcaggcccctgccagtgcccttctccagactatattcttaaaaattaaagtgctttggtttgtagagttgactgtatgtatctccaaaatgaatatgcagcagtgattttttttttcctccctgatctctttccctgctttggtaattctgtgagggtgtaatcatattggggctgtccttggcaggttaggtgacatacaagaacatgcggttccacagcagtcctgtcattctcgggtaagaacatcaaagtgagttgcagcacttctgcattcatacacgtaaatcttaatctggaaggaagatagaatctaccatagtgaatttctccagaagttttacgcttgagtgcacccagatctgtaggcgttgacccaatccagttgccctagggaaattctagacccaggagatcctaaccgggctgtaatttcccagatcacttctaacctgaagcagacgtaccaatgactccttaccttgcagagcctatgcttaggatgccaagtgaatttttcatttgaattgcttcagtgattataaaacatgaaacatagctttgcagatttctaaccctttttgtga

SEQ ID NO: 423179 - DNA, 4780 bp, Homo sapiens
  misc_feature (3888)..(3888): n is a, c, g, or t
ggcgggtgcctggagcacggcgctggggccgcccgcagcgctcactcgctcgcactcagtcgcgggaggcttccccgcgccggccgcgtcccgcccgctccccggcaccagaagttcctctgcgcgtccgacggcgacatgggcgtccccacggccctggaggccggcagctggcgctggggatccctgctcttcgctctcttcctggctgcgtccctaggtccggtggcagccttcaaggtcgccacgccgtattccctgtatgtctgtcccgaggggcagaacgtcaccctcacctgcaggctcttgggccctgtggacaaagggcacgatgtgaccttctacaagacgtggtaccgcagctcgaggggcgaggtgcagacctgctcagagcgccggcccatccgcaacctcacgttccaggaccttcacctgcaccatggaggccaccaggctgccaacaccagccacgacctggctcagcgccacgggctggagtcggcctccgaccaccatggcaacttctccatcaccatgcgcaacctgaccctgctggatagcggcctctactgctgcctggtggtggagatcaggcaccaccactcggagcacagggtccatggtgccatggagctgcaggtgcagacaggcaaagatgcaccatccaactgtgtggtgtacccatcctcctcccaggagagtgaaaacatcacggctgcagccctggctacgggtgcctgcatcgtaggaatcctctgcctccccctcatcctgctcctggtctacaagcaaaggcaggcagcctccaaccgccgtgcccaggagctggtgcggatggacagcaacattcaagggattgaaaaccccggctttgaagcctcaccacctgcccaggggatacccgaggccaaagtcaggcaccccctgtcctatgtggcccagcggcagccttctgagtctgggcggcatctgctttcggagcccagcacccccctgtctcctccaggccccggagacgtcttcttcccatccctggaccctgtccctgactctccaaactttgaggtcatctagcccagctgggggacagtgggctgttgtggctgggtctggggcaggtgcatttgagccagggctggctctgtgagtggcctccttggcctcggccctggttccctccctcctgctctgggctcagatactgtgacatcccagaagcccagcccctcaacccctctggatgctacatggggatgctggacggctcagcccctgttccaaggattttggggtgctgagattctcccctagagacctgaaattcaccagctacagatgccaaatgacttacatcttaagaagtctcagaacgtccagcccttcagcagctctcgttctgagacatgagccttgggatgtggcagcatcagtgggacaagatggacactgggccaccctcccaggcaccagacacagggcacggtggagagacttctcccccgtggccgccttggctcccccgttttgcccgaggctgctcttctgtcagacttcctctttgtaccacagtggctctggggccaggcctgcctgcccactggccatcgccaccttccccagctgcctcctaccagcagtttctctgaagatctgtcaacaggttaagtcaatctggggcttccactgcctgcattccagtccccagagcttggtggtcccgaaacgggaagtacatattggggcatggtggcctccgtgagcaaatggtgtcttgggcaatctgaggccaggacagatgttgccccacccactggagatggtgctgagggaggtgggtggggccttctgggaaggtgagtggagaggggcacctgccccccgccctccccatcccctactcccactgctcagcgcgggccattgcaagggtgccacacaatgtcttgtccaccctgggacacttctgagtatgaagcgggatgctattaaaaactacatggggaaacaggtgcaaaccctggagatggattgtaagagccagtttaaatctgcactctgctgctcctcccccacccccaccttccactccatacaatctgggcctggtggagtcttcgcttcagagccattcggccaggtgcgggtgatgttcccatctcctgcttgtgggcatgccctggctttgtttttatacacataggcaaggtgagtcctctgtggaattgtgattgaaggattttaaagcaggggaggagagtagggggcatctctgtacactctgggggtaaaacagggaaggcagtgcctgagcatggggacaggtgaggtggggctgggcagaccccctgtagcgtttagcaggatgggggccccaggtactgtggagagcatagtccagcctgggcatttgtctcctagcagcctacactggctctgctgagctgggcctgggtgctgaaagccaggatttggggctaggcgggaagatgttcgcccaattgcttggggggttggggggatggaaaaggggagcacctctaggctgcctggcagcagtgagccctgggcctgtggctacagccagggaaccccacctggacacatggccctgcttctaagccccccagttaggcccaaaggaatggtccactgagggcctcctgctctgcctgggctgggccaggggctttgaggagagggtaaacataggcccggagatggggctgacacctcgagtggccagaatatgcccaaaccccggcttctcccttgtccctaggcagaggggggtcccttcttttgttccctctggtcaccacaatgcttgatgccagctgccataggaagagggtgctggctggccatggtggcacacacctgtcctcccagcactttgcagggctgaggtggaaggaccgcttaagcccaggtgttcaaggctgctgtgagctgtgttcgagccactacactccagcctggggacggagcaaaactttgcctcaaaacaaattttaaaaagaaagaaagaaggaaagagggtatgtttttcacaattcatgggggcctgcatggcaggagtggggacaggacacctgctgttcctggagtcgaaggacaagcccacagcccagattccggttctcccaactcaggaagagcatgccctgccctctggggaggctggcctggccccagccctcagctgctgaccttgaggcagagacaacttctaagaatttggctgccagaccccaggcctggctgctgctgtgtggagagggaggcggcccgcagcagaacagccaccgcacttcctcctcagcttcctctggtgcggccctgccctctcttctctggacccttttacaactgaacgcatctgggcttcgtggtttcctgttttcagcgaaatttactctgagctcccagttccatcttcatccatggccacaggccctgcctacaacgcactagggacgtccctccctgctgctgctggggaggggcaggctgctggagccgccctctgagttgcccgggatggtagtgcctctgatgccagccctggtggctgtgggctggggtgcatgggagagctgggtgcgagaacatggcgcctccagggggcgggaggagcactaggggctggggcaggaggctcctggagcgctggattcgtggcacagtctgaggccctgagagggaaatccatgcttttaagaactaattcattgttaggagatcaatcaggaattaggggccatcttacctatctcctgacattcacagtttaatagagacttcctgcctttattccctcccagggagaggctgaaggaatggaattgaaagcaccatttggagggttttgctgacacagcggggacngctcagcactccctaaaaacacaccatggaggccactggtgactgctggtgggcaggctggccctgcctgggggagtccgtggcgatgggcgctggggtggaggtgcaggagccccaggacctgctcaaaagacttctgcctgaccagagctcccactacatgcagtggcccagggcagaggggctgatacatggccttcagggggtgctcctcgcggggtggacttgggagtgtgcagtgggacagggggctgcaggggtcctgccaccaccgagcaccaacttggcccctggggtcctgcctcatgaatgaggccttccccagggctggcctgactgtgctgggggctgggttaacgttttctcagggaaccacaatgcacgaaagaggaactggggttgctaaccaggatgctgggaacaaaggcctcttgaagcccagccacagcccagctgagcatgaggcccagcccatagacggcacaggccacctggcccattccctgggcattccctgctttgcattgctgcttctcttcaccccgtggaggctatgtcaccctaactatcctggaatgtgttgagagggattctgaatgatcaatatagcttggtgagacagtgccgagatagatagccatgtctgccttgggcacgggagagggaagtggcagcatgcatgctgtttcttggccttttctgttagaatacttggtgctttccaacacactttcacatgtgttgtaacttgtttgatccacccccttccctgaaaatcctgggaggttttattgctgccatttaacacagagggcaatagaggttctgaaaggtctgtgtcagtgccaaacaactgatcgctgccctccgttacctcaagaacagcaaccct

SEQ ID NO: 423180 - DNA, 2020 bp, Homo sapiens
ggcgggtgcctggagcacggcgctggggccgcccgcagcgctcactcgctcgcactcagtcgcgggaggcttccccgcgccggccgcgtcccgcccgctccccggcaccagaagttcctctgcgcgtccgacggcgacatgggcgtccccacggccctggaggccggcagctggcgctggggatccctgctcttcgctctcttcctggctgcgtccctaggtccggtggcagccttcaaggtcgccacgccgtattccctgtatgtctgtcccgaggggcagaacgtcaccctcacctgcaggctcttgggccctgtggacaaagggcacgatgtgaccttctacaagacgtggtaccgcagctcgaggggcgaggtgcagacctgctcagagcgccggcccatccgcaacctcacgttccaggaccttcacctgcaccatggaggccaccaggctgccaacaccagccacgacctggctcagcgccacgggctggagtcggcctccgaccaccatggcaacttctccatcaccatgcgcaacctgaccctgctggatagcggcctctactgctgcctggtggtggagatcaggcaccaccactcggagcacagggtccatggtgccatggagctgcaggtgcagacaggcaaagatgcaccatccaactgtgtggtgtacccatcctcctcccaggagagtgaaaacatcacggctgcagccctggctacgggtgcctgcatcgtaggaatcctctgcctccccctcatcctgctcctggtctacaagcaaaggcaggcagcctccaaccgccgtgcccaggagctggtgcggatggacagcaacattcaagggattgaaaaccccggctttgaagcctcaccacctgcccaggggatacccgaggccaaagtcaggcaccccctgtcctatgtggcccagcggcagccttctgagtctgggcggcatctgctttcggagcccagcacccccctgtctcctccaggccccggagacgtcttcttcccatccctggaccctgtccctgactctccaaactttgaggtcatctagcccagctgggggacagtgggctgttgtggctgggtctggggcaggtgcatttgagccagggctggctctgtgagtggcctccttggcctcggccctggttccctccctcctgctctgggctcagatactgtgacatcccagaagcccagcccctcaacccctctggatgctacatggggatgctggacggctcagcccctgttccaaggattttggggtgctgagattctcccctagagacctgaaattcaccagctacagatgccaaatgacttacatcttaagaagtctcagaacgtccagcccttcagcagctctcgttctgagacatgagccttgggatgtggcagcatcagtgggacaagatggacactgggccaccctcccaggcaccagacacagggcacggtggagagacttctcccccgtggccgccttggctcccccgttttgcccgaggctgctcttctgtcagacttcctctttgtaccacagtggctctggggccaggcctgcctgcccactggccatcgccaccttccccagctgcctcctaccagcagtttctctgaagatctgtcaacaggttaagtcaatctggggcttccactgcctgcattccagtccccagagcttggtggtcccgaaacgggaagtacatattggggcatggtggcctccgtgagcaaatggtgtcttgggcaatctgaggccaggacagatgttgccccacccactggagatggtgctgagggaggtgggtggggccttctgggaaggtgagtggagaggggcacctgccccccgccctccccatcccctactcccactgctcagcgcgggccattgcaagggtgccacacaatgtcttgtccaccctgggacacttctgagtatgaagcgggatgctattaaaaactacatggggaaacaggtgcaaaccctg

SEQ ID NO: 423181 - DNA, 4118 bp, Homo sapiens
  misc_feature (3235)..(3235): n is a, c, g, or t
gctacctctgccagcgcctgatcaccttcccaggataagcctggctctggatgacatcacggctgcagccctggctacgggtgcctgcatcgtaggaatcctctgcctccccctcatcctgctcctggtctacaagcaaaggcaggcagcctccaaccgccgtgcccaggagctggtgcggatggacagcaacattcaagggattgaaaaccccggctttgaagcctcaccacctgcccaggggatacccgaggccaaagtcaggcaccccctgtcctatgtggcccagcggcagccttctgagtctgggcggcatctgctttcggagcccagcacccccctgtctcctccaggccccggagacgtcttcttcccatccctggaccctgtccctgactctccaaactttgaggtcatctagcccagctgggggacagtgggctgttgtggctgggtctggggcaggtgcatttgagccagggctggctctgtgagtggcctccttggcctcggccctggttccctccctcctgctctgggctcagatactgtgacatcccagaagcccagcccctcaacccctctggatgctacatggggatgctggacggctcagcccctgttccaaggattttggggtgctgagattctcccctagagacctgaaattcaccagctacagatgccaaatgacttacatcttaagaagtctcagaacgtccagcccttcagcagctctcgttctgagacatgagccttgggatgtggcagcatcagtgggacaagatggacactgggccaccctcccaggcaccagacacagggcacggtggagagacttctcccccgtggccgccttggctcccccgttttgcccgaggctgctcttctgtcagacttcctctttgtaccacagtggctctggggccaggcctgcctgcccactggccatcgccaccttccccagctgcctcctaccagcagtttctctgaagatctgtcaacaggttaagtcaatctggggcttccactgcctgcattccagtccccagagcttggtggtcccgaaacgggaagtacatattggggcatggtggcctccgtgagcaaatggtgtcttgggcaatctgaggccaggacagatgttgccccacccactggagatggtgctgagggaggtgggtggggccttctgggaaggtgagtggagaggggcacctgccccccgccctccccatcccctactcccactgctcagcgcgggccattgcaagggtgccacacaatgtcttgtccaccctgggacacttctgagtatgaagcgggatgctattaaaaactacatggggaaacaggtgcaaaccctggagatggattgtaagagccagtttaaatctgcactctgctgctcctcccccacccccaccttccactccatacaatctgggcctggtggagtcttcgcttcagagccattcggccaggtgcgggtgatgttcccatctcctgcttgtgggcatgccctggctttgtttttatacacataggcaaggtgagtcctctgtggaattgtgattgaaggattttaaagcaggggaggagagtagggggcatctctgtacactctgggggtaaaacagggaaggcagtgcctgagcatggggacaggtgaggtggggctgggcagaccccctgtagcgtttagcaggatgggggccccaggtactgtggagagcatagtccagcctgggcatttgtctcctagcagcctacactggctctgctgagctgggcctgggtgctgaaagccaggatttggggctaggcgggaagatgttcgcccaattgcttggggggttggggggatggaaaaggggagcacctctaggctgcctggcagcagtgagccctgggcctgtggctacagccagggaaccccacctggacacatggccctgcttctaagccccccagttaggcccaaaggaatggtccactgagggcctcctgctctgcctgggctgggccaggggctttgaggagagggtaaacataggcccggagatggggctgacacctcgagtggccagaatatgcccaaaccccggcttctcccttgtccctaggcagaggggggtcccttcttttgttccctctggtcaccacaatgcttgatgccagctgccataggaagagggtgctggctggccatggtggcacacacctgtcctcccagcactttgcagggctgaggtggaaggaccgcttaagcccaggtgttcaaggctgctgtgagctgtgttcgagccactacactccagcctggggacggagcaaaactttgcctcaaaacaaattttaaaaagaaagaaagaaggaaagagggtatgtttttcacaattcatgggggcctgcatggcaggagtggggacaggacacctgctgttcctggagtcgaaggacaagcccacagcccagattccggttctcccaactcaggaagagcatgccctgccctctggggaggctggcctggccccagccctcagctgctgaccttgaggcagagacaacttctaagaatttggctgccagaccccaggcctggctgctgctgtgtggagagggaggcggcccgcagcagaacagccaccgcacttcctcctcagcttcctctggtgcggccctgccctctcttctctggacccttttacaactgaacgcatctgggcttcgtggtttcctgttttcagcgaaatttactctgagctcccagttccatcttcatccatggccacaggccctgcctacaacgcactagggacgtccctccctgctgctgctggggaggggcaggctgctggagccgccctctgagttgcccgggatggtagtgcctctgatgccagccctggtggctgtgggctggggtgcatgggagagctgggtgcgagaacatggcgcctccagggggcgggaggagcactaggggctggggcaggaggctcctggagcgctggattcgtggcacagtctgaggccctgagagggaaatccatgcttttaagaactaattcattgttaggagatcaatcaggaattaggggccatcttacctatctcctgacattcacagtttaatagagacttcctgcctttattccctcccagggagaggctgaaggaatggaattgaaagcaccatttggagggttttgctgacacagcggggacngctcagcactccctaaaaacacaccatggaggccactggtgactgctggtgggcaggctggccctgcctgggggagtccgtggcgatgggcgctggggtggaggtgcaggagccccaggacctgctcaaaagacttctgcctgaccagagctcccactacatgcagtggcccagggcagaggggctgatacatggccttcagggggtgctcctcgcggggtggacttgggagtgtgcagtgggacagggggctgcaggggtcctgccaccaccgagcaccaacttggcccctggggtcctgcctcatgaatgaggccttccccagggctggcctgactgtgctgggggctgggttaacgttttctcagggaaccacaatgcacgaaagaggaactggggttgctaaccaggatgctgggaacaaaggcctcttgaagcccagccacagcccagctgagcatgaggcccagcccatagacggcacaggccacctggcccattccctgggcattccctgctttgcattgctgcttctcttcaccccgtggaggctatgtcaccctaactatcctggaatgtgttgagagggattctgaatgatcaatatagcttggtgagacagtgccgagatagatagccatgtctgccttgggcacgggagagggaagtggcagcatgcatgctgtttcttggccttttctgttagaatacttggtgctttccaacacactttcacatgtgttgtaacttgtttgatccacccccttccctgaaaatcctgggaggttttattgctgccatttaacacagagggcaatagaggttctgaaaggtctgtgtcttgtcaaaacaagtaaacggtggaactacgactaaaaactgg

SEQ ID NO: 423182 - DNA, 881 bp, Homo sapiens
ggcgggtgcctggagcacggcgctggggccgcccgcagcgctcactcgctcgcactcagtcgcgggaggcttccccgcgccggccgcgtcccgcccgctccccggcaccagaagttcctctgcgcgtccgacggcgacatgggcgtccccacggccctggaggccggcagctggcgctggggatccctgctcttcgctctcttcctggctgcgtccctaggtccggtggcagccttcaaggtcgccacgccgtattccctgtatgtctgtcccgaggggcagaacgtcaccctcacctgcaggctcttgggccctgtggacaaagggcacgatgtgaccttctacaagacgtggtaccgcagctcgaggggcgaggtgcagacctgctcagagcgccggcccatccgcaacctcacgttccaggaccttcacctgcaccatggaggccaccaggctgccaacaccagccacgacctggctcagcgccacgggctggagtcggcctccgaccaccatggcaacttctccatcaccatgcgcaacctgaccctgctggatagcggcctctactgctgcctggtggtggagatcaggcaccaccactcggagcacagggtccatggtgccatggagctgcaggtgcagacaggcaaagatgcaccatccaactgtgtggtgtacccatcctcctcccaggagagtgaaagtaagggaccaacctcttgccccttttgggttctctgttttcttctgtcctcatcctgcacccagaccctgtttggaactctggcctcatcaccccaagccctcagaaccccccggtcctcctccttttctgctgctgcacatcccttctgcttcctccttggtgcaatccccag

SEQ ID NO: 423183 - DNA, 496 bp, Homo sapiens
taacctgaggtaggggaatgagactagagaagttggtgcccaaggagctcctgcattgctgaggggctgtggtttctcagtgagctcagagaaggggtctaggcagctcatctccctttgaacttcttcccaccccccagcgcagcagaatgtgctgtctgctttcacccagcttcctccctgggaaaccaggcagcccaaccctcagcagccgaactccctcctccatatatccccgtgggctaccaggcaggccctggacaaaggccgcctgagcaggccaggcccctcccatcccaccctgctgtgtcagggcctggcacactccttagtgcggtgtcggcagctacctctgccagcgcctgatcaccttcccaggataagcctggctctggatggtgagtgagtatgcctgccttcccctgtgagtgccagcccaggcactggccacgcttgggggaaggggtggggaactgtggcgaggctgagctctgca

SEQ ID NO: 423184 - DNA, 4771 bp, Homo sapiens
  misc_feature (3888)..(3888): n is a, c, g, or t
ggcgggtgcctggagcacggcgctggggccgcccgcagcgctcactcgctcgcactcagtcgcgggaggcttccccgcgccggccgcgtcccgcccgctccccggcaccagaagttcctctgcgcgtccgacggcgacatgggcgtccccacggccctggaggccggcagctggcgctggggatccctgctcttcgctctcttcctggctgcgtccctaggtccggtggcagccttcaaggtcgccacgccgtattccctgtatgtctgtcccgaggggcagaacgtcaccctcacctgcaggctcttgggccctgtggacaaagggcacgatgtgaccttctacaagacgtggtaccgcagctcgaggggcgaggtgcagacctgctcagagcgccggcccatccgcaacctcacgttccaggaccttcacctgcaccatggaggccaccaggctgccaacaccagccacgacctggctcagcgccacgggctggagtcggcctccgaccaccatggcaacttctccatcaccatgcgcaacctgaccctgctggatagcggcctctactgctgcctggtggtggagatcaggcaccaccactcggagcacagggtccatggtgccatggagctgcaggtgcagacaggcaaagatgcaccatccaactgtgtggtgtacccatcctcctcccaggagagtgaaaacatcacggctgcagccctggctacgggtgcctgcatcgtaggaatcctctgcctccccctcatcctgctcctggtctacaagcaaaggcaggcagcctccaaccgccgtgcccaggagctggtgcggatggacagcaacattcaagggattgaaaaccccggctttgaagcctcaccacctgcccaggggatacccgaggccaaagtcaggcaccccctgtcctatgtggcccagcggcagccttctgagtctgggcggcatctgctttcggagcccagcacccccctgtctcctccaggccccggagacgtcttcttcccatccctggaccctgtccctgactctccaaactttgaggtcatctagcccagctgggggacagtgggctgttgtggctgggtctggggcaggtgcatttgagccagggctggctctgtgagtggcctccttggcctcggccctggttccctccctcctgctctgggctcagatactgtgacatcccagaagcccagcccctcaacccctctggatgctacatggggatgctggacggctcagcccctgttccaaggattttggggtgctgagattctcccctagagacctgaaattcaccagctacagatgccaaatgacttacatcttaagaagtctcagaacgtccagcccttcagcagctctcgttctgagacatgagccttgggatgtggcagcatcagtgggacaagatggacactgggccaccctcccaggcaccagacacagggcacggtggagagacttctcccccgtggccgccttggctcccccgttttgcccgaggctgctcttctgtcagacttcctctttgtaccacagtggctctggggccaggcctgcctgcccactggccatcgccaccttccccagctgcctcctaccagcagtttctctgaagatctgtcaacaggttaagtcaatctggggcttccactgcctgcattccagtccccagagcttggtggtcccgaaacgggaagtacatattggggcatggtggcctccgtgagcaaatggtgtcttgggcaatctgaggccaggacagatgttgccccacccactggagatggtgctgagggaggtgggtggggccttctgggaaggtgagtggagaggggcacctgccccccgccctccccatcccctactcccactgctcagcgcgggccattgcaagggtgccacacaatgtcttgtccaccctgggacacttctgagtatgaagcgggatgctattaaaaactacatggggaaacaggtgcaaaccctggagatggattgtaagagccagtttaaatctgcactctgctgctcctcccccacccccaccttccactccatacaatctgggcctggtggagtcttcgcttcagagccattcggccaggtgcgggtgatgttcccatctcctgcttgtgggcatgccctggctttgtttttatacacataggcaaggtgagtcctctgtggaattgtgattgaaggattttaaagcaggggaggagagtagggggcatctctgtacactctgggggtaaaacagggaaggcagtgcctgagcatggggacaggtgaggtggggctgggcagaccccctgtagcgtttagcaggatgggggccccaggtactgtggagagcatagtccagcctgggcatttgtctcctagcagcctacactggctctgctgagctgggcctgggtgctgaaagccaggatttggggctaggcgggaagatgttcgcccaattgcttggggggttggggggatggaaaaggggagcacctctaggctgcctggcagcagtgagccctgggcctgtggctacagccagggaaccccacctggacacatggccctgcttctaagccccccagttaggcccaaaggaatggtccactgagggcctcctgctctgcctgggctgggccaggggctttgaggagagggtaaacataggcccggagatggggctgacacctcgagtggccagaatatgcccaaaccccggcttctcccttgtccctaggcagaggggggtcccttcttttgttccctctggtcaccacaatgcttgatgccagctgccataggaagagggtgctggctggccatggtggcacacacctgtcctcccagcactttgcagggctgaggtggaaggaccgcttaagcccaggtgttcaaggctgctgtgagctgtgttcgagccactacactccagcctggggacggagcaaaactttgcctcaaaacaaattttaaaaagaaagaaagaaggaaagagggtatgtttttcacaattcatgggggcctgcatggcaggagtggggacaggacacctgctgttcctggagtcgaaggacaagcccacagcccagattccggttctcccaactcaggaagagcatgccctgccctctggggaggctggcctggccccagccctcagctgctgaccttgaggcagagacaacttctaagaatttggctgccagaccccaggcctggctgctgctgtgtggagagggaggcggcccgcagcagaacagccaccgcacttcctcctcagcttcctctggtgcggccctgccctctcttctctggacccttttacaactgaacgcatctgggcttcgtggtttcctgttttcagcgaaatttactctgagctcccagttccatcttcatccatggccacaggccctgcctacaacgcactagggacgtccctccctgctgctgctggggaggggcaggctgctggagccgccctctgagttgcccgggatggtagtgcctctgatgccagccctggtggctgtgggctggggtgcatgggagagctgggtgcgagaacatggcgcctccagggggcgggaggagcactaggggctggggcaggaggctcctggagcgctggattcgtggcacagtctgaggccctgagagggaaatccatgcttttaagaactaattcattgttaggagatcaatcaggaattaggggccatcttacctatctcctgacattcacagtttaatagagacttcctgcctttattccctcccagggagaggctgaaggaatggaattgaaagcaccatttggagggttttgctgacacagcggggacngctcagcactccctaaaaacacaccatggaggccactggtgactgctggtgggcaggctggccctgcctgggggagtccgtggcgatgggcgctggggtggaggtgcaggagccccaggacctgctcaaaagacttctgcctgaccagagctcccactacatgcagtggcccagggcagaggggctgatacatggccttcagggggtgctcctcgcggggtggacttgggagtgtgcagtgggacagggggctgcaggggtcctgccaccaccgagcaccaacttggcccctggggtcctgcctcatgaatgaggccttccccagggctggcctgactgtgctgggggctgggttaacgttttctcagggaaccacaatgcacgaaagaggaactggggttgctaaccaggatgctgggaacaaaggcctcttgaagcccagccacagcccagctgagcatgaggcccagcccatagacggcacaggccacctggcccattccctgggcattccctgctttgcattgctgcttctcttcaccccgtggaggctatgtcaccctaactatcctggaatgtgttgagagggattctgaatgatcaatatagcttggtgagacagtgccgagatagatagccatgtctgccttgggcacgggagagggaagtggcagcatgcatgctgtttcttggccttttctgttagaatacttggtgctttccaacacactttcacatgtgttgtaacttgtttgatccacccccttccctgaaaatcctgggaggttttattgctgccatttaacacagagggcaatagaggttctgaaaggtctgtgtcttgtcaaaacaagtaaacggtggaactacgactaaaaactgg

SEQ ID NO: 423185 - DNA, 4884 bp, Homo sapiens
  misc_feature (4001)..(4001): n is a, c, g, or t
ctttagctgggaggtgtgtggcctgaaggagttagtaaataaggtggccattagtgataggggttcctttggcagtaaggagtcctctcttttgccagatagcagcgtgggaacgaggaatgtgataggcatatttggagtctgtataaatgttgactcgtttgcctttggaaagatttagggacctggtgagagctatgagttctgctttttgggaggaggatcctggcttcaattacttggtcaagggaaacaactgcatatccagcaatctggggggtagctggcgctggggatccctgctcttcgctctcttcctggctgcgtccctaggtccggtggcagccttcaaggtcgccacgccgtattccctgtatgtctgtcccgaggggcagaacgtcaccctcacctgcaggctcttgggccctgtggacaaagggcacgatgtgaccttctacaagacgtggtaccgcagctcgaggggcgaggtgcagacctgctcagagcgccggcccatccgcaacctcacgttccaggaccttcacctgcaccatggaggccaccaggctgccaacaccagccacgacctggctcagcgccacgggctggagtcggcctccgaccaccatggcaacttctccatcaccatgcgcaacctgaccctgctggatagcggcctctactgctgcctggtggtggagatcaggcaccaccactcggagcacagggtccatggtgccatggagctgcaggtgcagacaggcaaagatgcaccatccaactgtgtggtgtacccatcctcctcccaggagagtgaaaacatcacggctgcagccctggctacgggtgcctgcatcgtaggaatcctctgcctccccctcatcctgctcctggtctacaagcaaaggcaggcagcctccaaccgccgtgcccaggagctggtgcggatggacagcaacattcaagggattgaaaaccccggctttgaagcctcaccacctgcccaggggatacccgaggccaaagtcaggcaccccctgtcctatgtggcccagcggcagccttctgagtctgggcggcatctgctttcggagcccagcacccccctgtctcctccaggccccggagacgtcttcttcccatccctggaccctgtccctgactctccaaactttgaggtcatctagcccagctgggggacagtgggctgttgtggctgggtctggggcaggtgcatttgagccagggctggctctgtgagtggcctccttggcctcggccctggttccctccctcctgctctgggctcagatactgtgacatcccagaagcccagcccctcaacccctctggatgctacatggggatgctggacggctcagcccctgttccaaggattttggggtgctgagattctcccctagagacctgaaattcaccagctacagatgccaaatgacttacatcttaagaagtctcagaacgtccagcccttcagcagctctcgttctgagacatgagccttgggatgtggcagcatcagtgggacaagatggacactgggccaccctcccaggcaccagacacagggcacggtggagagacttctcccccgtggccgccttggctcccccgttttgcccgaggctgctcttctgtcagacttcctctttgtaccacagtggctctggggccaggcctgcctgcccactggccatcgccaccttccccagctgcctcctaccagcagtttctctgaagatctgtcaacaggttaagtcaatctggggcttccactgcctgcattccagtccccagagcttggtggtcccgaaacgggaagtacatattggggcatggtggcctccgtgagcaaatggtgtcttgggcaatctgaggccaggacagatgttgccccacccactggagatggtgctgagggaggtgggtggggccttctgggaaggtgagtggagaggggcacctgccccccgccctccccatcccctactcccactgctcagcgcgggccattgcaagggtgccacacaatgtcttgtccaccctgggacacttctgagtatgaagcgggatgctattaaaaactacatggggaaacaggtgcaaaccctggagatggattgtaagagccagtttaaatctgcactctgctgctcctcccccacccccaccttccactccatacaatctgggcctggtggagtcttcgcttcagagccattcggccaggtgcgggtgatgttcccatctcctgcttgtgggcatgccctggctttgtttttatacacataggcaaggtgagtcctctgtggaattgtgattgaaggattttaaagcaggggaggagagtagggggcatctctgtacactctgggggtaaaacagggaaggcagtgcctgagcatggggacaggtgaggtggggctgggcagaccccctgtagcgtttagcaggatgggggccccaggtactgtggagagcatagtccagcctgggcatttgtctcctagcagcctacactggctctgctgagctgggcctgggtgctgaaagccaggatttggggctaggcgggaagatgttcgcccaattgcttggggggttggggggatggaaaaggggagcacctctaggctgcctggcagcagtgagccctgggcctgtggctacagccagggaaccccacctggacacatggccctgcttctaagccccccagttaggcccaaaggaatggtccactgagggcctcctgctctgcctgggctgggccaggggctttgaggagagggtaaacataggcccggagatggggctgacacctcgagtggccagaatatgcccaaaccccggcttctcccttgtccctaggcagaggggggtcccttcttttgttccctctggtcaccacaatgcttgatgccagctgccataggaagagggtgctggctggccatggtggcacacacctgtcctcccagcactttgcagggctgaggtggaaggaccgcttaagcccaggtgttcaaggctgctgtgagctgtgttcgagccactacactccagcctggggacggagcaaaactttgcctcaaaacaaattttaaaaagaaagaaagaaggaaagagggtatgtttttcacaattcatgggggcctgcatggcaggagtggggacaggacacctgctgttcctggagtcgaaggacaagcccacagcccagattccggttctcccaactcaggaagagcatgccctgccctctggggaggctggcctggccccagccctcagctgctgaccttgaggcagagacaacttctaagaatttggctgccagaccccaggcctggctgctgctgtgtggagagggaggcggcccgcagcagaacagccaccgcacttcctcctcagcttcctctggtgcggccctgccctctcttctctggacccttttacaactgaacgcatctgggcttcgtggtttcctgttttcagcgaaatttactctgagctcccagttccatcttcatccatggccacaggccctgcctacaacgcactagggacgtccctccctgctgctgctggggaggggcaggctgctggagccgccctctgagttgcccgggatggtagtgcctctgatgccagccctggtggctgtgggctggggtgcatgggagagctgggtgcgagaacatggcgcctccagggggcgggaggagcactaggggctggggcaggaggctcctggagcgctggattcgtggcacagtctgaggccctgagagggaaatccatgcttttaagaactaattcattgttaggagatcaatcaggaattaggggccatcttacctatctcctgacattcacagtttaatagagacttcctgcctttattccctcccagggagaggctgaaggaatggaattgaaagcaccatttggagggttttgctgacacagcggggacngctcagcactccctaaaaacacaccatggaggccactggtgactgctggtgggcaggctggccctgcctgggggagtccgtggcgatgggcgctggggtggaggtgcaggagccccaggacctgctcaaaagacttctgcctgaccagagctcccactacatgcagtggcccagggcagaggggctgatacatggccttcagggggtgctcctcgcggggtggacttgggagtgtgcagtgggacagggggctgcaggggtcctgccaccaccgagcaccaacttggcccctggggtcctgcctcatgaatgaggccttccccagggctggcctgactgtgctgggggctgggttaacgttttctcagggaaccacaatgcacgaaagaggaactggggttgctaaccaggatgctgggaacaaaggcctcttgaagcccagccacagcccagctgagcatgaggcccagcccatagacggcacaggccacctggcccattccctgggcattccctgctttgcattgctgcttctcttcaccccgtggaggctatgtcaccctaactatcctggaatgtgttgagagggattctgaatgatcaatatagcttggtgagacagtgccgagatagatagccatgtctgccttgggcacgggagagggaagtggcagcatgcatgctgtttcttggccttttctgttagaatacttggtgctttccaacacactttcacatgtgttgtaacttgtttgatccacccccttccctgaaaatcctgggaggttttattgctgccatttaacacagagggcaatagaggttctgaaaggtctgtgtcttgtcaaaacaagtaaacggtggaactacgactaaaaactgg

SEQ ID NO: 423186 - DNA, 1188 bp, Homo sapiens
ggcgggtgcctggagcacggcgctggggccgcccgcagcgctcactcgctcgcactcagtcgcgggaggcttccccgcgccggccgcgtcccgcccgctccccggcaccagaagttcctctgcgcgtccgacggcgacatgggcgtccccacggccctggaggccggcagctggcgctggggatccctgctcttcgctctcttcctggctgcgtccctaggtccggtggcagccttcaaggtcgccacgccgtattccctgtatgtctgtcccgaggggcagaacgtcaccctcacctgcaggctcttgggccctgtggacaaagggcacgatgtgaccttctacaagacgtggtaccgcagctcgaggggcgaggtgcagacctgctcagagcgccggcccatccgcaacctcacgttccaggaccttcacctgcaccatggaggccaccaggctgccaacaccagccacgacctggctcagcgccacgggctggagtcggcctccgaccaccatggcaacttctccatcaccatgcgcaacctgaccctgctggatagcggcctctactgctgcctggtggtggagatcaggcaccaccactcggagcacagggtccatggtgccatggagctgcaggtgcagacaggcaaagatgcaccatccaactgtgtggtgtacccatcctcctcccaggagagtgaaaacatcacggctgcagccctggctacgggtgcctgcatcgtaggaatcctctgcctccccctcatcctgctcctggtctacaagcaaaggcaggcagcctccaaccgcccttccattctggttctgtggcagcaacattcaagggattgaaaaccccggctttgaagcctcaccacctgcccaggggatacccgaggccaaagtcaggcaccccctgtcctatgtggcccagcggcagccttctgagtgccaggacagatgttgccccacccactggagatggtgctgagggaggtgggtggggccttctgggaaggtgagtggagaggggcacctgccccccgccctccccatcccctactcccactgctcagcgcgggccattgcaagggtgccacacaatgtcttgtccaccctgggacacttctgagtatgaagcgggatgctattaaaaactacatggggaaacaggtgcaaaccctg

SEQ ID NO: 423187 - DNA, 621 bp, Homo sapiens
ggcgggtgcctggagcacggcgctggggccgcccgcagcgctcactcgctcgcactcagtcgcgggaggcttccccgcgccggccgcgtcccgcccgctccccggcaccagaagttcctctgcgcgtccgacggcgacatgggcgtccccacggccctggaggccggcagctggcgctggggatccctgctcttcgctctcttcctggctgcgtccctaggtccggtggcagccttcaaggtcgccacgccgtattccctgtatgtctgtcccgaggggcagaacgtcaccctcacctgcaggctcttgggccctgtggacaaagggcacgatgtgaccttctacaagacgtggtaccgcagctcgaggggcgaggtgcagacctgctcagagcgccggcccatccgcaacctcacgttccaggaccttcacctgcaccatggaggccaccaggctgccaacaccagccacgacctggctcagcgccacgggctggagtcggcctccgaccaccatggcaacttctccatcaccatgcgcaacctgaccctgctggatagcggccgaaggaatcccggcggccgaaggaatcccggcggccgaaggaatcccggcggccga

SEQ ID NO: 423188 - DNA, 892 bp, Homo sapiens
gagacggagtctcgctgtgtctcccaggctggagtgcagtggcagagtgagactcctcaaaaaaaaaaaaaaagttcttgaataaagaaggattattcttccaagaatccaacgtagctgagtaccttgtaacaagtgcagtccacttactgttatactcaaagacaagtttgtatattgattggttctttcaaattcttcacctcagtttcttcttgagtacttgtagaaagaatgatgatactgatggctattttgatttcttttttacgttcttttctcgtttcatttctggaaatatttagtaattaaatgtattatatgttaaagtctgttaacttatactgagctatgttaagaaattatttccaatgtgtttgtaccaacaggttggcgatagtattgttcacaaagccagagagaccttggaacgagctattaaactggtgaatgataccaagaaatggggggctagggttgtatatggcgatactgacaggtaatgggtttttggttttgtagttgtcttttgcatctctctagatcttcatttcagtgtttaaaatggcttaagggaatcttttctaaaaacagagttctgtctgagtcctttccagtccttacgatctcatgatcagagttaacacagatcctgatttaccagataggatcgtaagagacagtttgtgtcctgagccacaaactgaagatacctatggcttccctccaggtagctctaagccaagtagatagtgatctgtaaactaactgtgtacacaggagtctagtttatttaaagaaactacttttaatgtgaataattcctctaatatagctgtaactctctgaatttaagtgtatatcttaaaataaactgtttttgaaggacaat

SEQ ID NO: 423189 - DNA, 620 bp, Homo sapiens
actatcattttatcgtatatcgaaatgtgggagaggtaaggggctactacgtttacccaccatccctaccactgggattggaccccaacttgtctcctgcccaagtggctccccctgtattatgggggggactttgaccaaactctacccaccttggaacgagctattaaactggtgaatgataccaagaaatggggggctagggttgtatatggcgatactgacaggtaatgggtttttggttttgtagttgtcttttgcatctctctagatcttcatttcagtgtttaaaatggcttaagggaatcttttctaaaaacagagttctgtctgagtcctttccagtccttacgatctcatgatcagagttaacacagatcctgatttaccagataggatcgtaagagacagtttgtgtcctgagccacaaactgaagatacctatggcttccctccaggtagctctaagccaagtagatagtgatctgtaaactaactgtgtacacaggagtctagtttatttaaagaaactacttttaatgtgaataattcctctaatatagctgtaactctctgaatttaagtgtatatcttaaaataaactgtttttgaaggacaat

SEQ ID NO: 423190 - DNA, 609 bp, Homo sapiens
gggatgacacaaagaataatttagcttgaggctgggcgccatggctcacacctgtaatcccagcactttgggaggccaaggcaggcagatcacttgagctcaggagttcgagaccagcctgggcaatatagtgaaaccctgtctccaaaaaaatatgaaaaatagctgggtgtagaggtgcacgcctgtagtcccagctactcaggaggctgaggtgggaggattgcttgagcctgggaagtcaagactgcagtgagttgagattgggtcactgcaccccagcctgggtgacagagtctcactctgtctcaaaaagaataatttcgcagggcatggtggctcatacctgttatctcagcactttgggaggctgaggcaggaagatcgcttgagcccaggagttcgagaccagcttgggcaatatagtgagacctcatctctattaaaataatttcttgtgaaaaaccgtctcagcggctgcccccgcctcctctgctggatgtgaaatggcggtcggcgaggcaagtgtgagcatcgcagctcctgccaatcctgcatagccgccaaaacggccccgaacactggcgcccccctcccgcaagcccctcg

SEQ ID NO: 423191 - DNA, 424 bp, Homo sapiens
tggttctcccagcatggtgtttgaactctgagaacggacaggctgcctcctcaagtgggtccctgacccccatgtagcctaactgggagacatctgcagtaggggccaacagacacctcatacaggtgggtgcccctctgggatgaagcttccagaagaaggatcaggcagcaatatttgctgttctgcaggctccgctggtgatacccaggcaaacagggtctggagtggacctccagcaaactccaacagtcctgcagctgacggaccttgtgaaaaaccgtctcagcggctgcccccgcctcctctgctggatgtgaaatggcggtcggcgaggcaagtgtgagcatcgcagctcctgccaatcctgcatagccgccaaaacggccccgaacactggcgcccccctcccgcaagcccctcg

SEQ ID NO: 423192 - DNA, 10965 bp, Homo sapiens
  misc_feature (317)..(317): n is a, c, g, or t
gcacgagactgcgctcgcctccctcctcacgcgggcgggattttcttgccttgtgaaaaaccgtctcagcggctgcccccgcctcctctgctggatgtgaaatggcggtcggcgagtggtttgcgtccgtgacatcatcatcatggcaacaagagctgcagcctgggaccgaggagcccgtgtgattcccggcggtggcggcagtggcggcagcaccagcaccgacgaaagcttcgagggcttctctccttgcggccccttgccgggtgctcctgaggaggcggcggcagcagcgcctacaccgccccgcccgccgntcctcgaggtgcctctgtgtgaggggagggggccgtgccgagaaggggagggggcgccgccgccgctgcggagggagccgccgccgctgctgctgccgctgccgggtcgccagtgaagggaggcagtggcggcggcggcgaacatgttttcagtaaggatagtgactgcagactactacatggccagcccgctgcaggggctggatacctgccaatcccccctcacccaggcccctgtcaagaaggtgccggtggtgcgagtcttcggagcgaccccggcagaataaaacccaagacaagccacataaaagcaacctaaaaattaaactgtcatcatattatttgttttaaaactatggaataatatatctgaggaagatttctctcaaaattgtttttctcaatttcaagtcagaagacatgtcttcatctacatggcatctttccttacctctatgtgccatacgatggttatggacagcagccagaaagctatctttctcagatggcattcagtatcgacagagcacttaatgtggctttaggcaatccatcttccactgctcagcatgtgttcaaagtgtcattagtatcaggaatgcctttttatggttatcatgagaaggaaagacactttatgaagatctatctttacaatcctacaatggtgaaaaggatatgtgaacttttgcaaagcggagccataatgaataaattttaccagcctcatgaagcgcatattccctacctcctacagctcttcattgactacaatctttatggcatgaatttaataaatctggctgctgtcaagttccgaaaagcaagaaggaaaagtaatacattgcatgcaactggatcctgcaagaatcatttatcaggaaattctcttgctgatactttatttcggtgggaacaagatgaaataccaagctctttaatattggaaggtgttgaaccacagagtacatgtgaattagaagtggatgctgtagctgctgatatcttaaatcgtctggacattgaagctcaaattggtggaaaccctggtctacaggccatatgggaagatgaaaagcaacggcgaagaaacagaaatgaaacttctcaaatgagccaacctgagtcacaagatcacaggtttgtgccagcaacagaaagtgaaaaaaaatttcagaagagacttcaggaaattctcaaacagaatgatttctctgtaacattatcaggatctgtggactacagcgatggatcccaggagttctctgctgagttaacattgcactctgaggttctgtctcctgaaatgcttcagtgtacaccagccaatatggtagaagttcacaaagacaaagagtcaagcaaaggtcacactagacacaaagtggaagaagctcttattaatgaagaagcaattttgaaccttatggaaaatagtcagacttttcagcctttgacccaaagactgagtgagtcacctgttttcatggacagtagtcctgatgaggctctggtacatcttcttgctggtttggaaagtgatggatatcggggggaaagaaataggatgccatcaccatgtcgctcctttggaaataataaatatccacaaaatagtgatgatgaagaaaatgaaccacagattgaaaaagaggaaatggagcttagtttggtgatgtcccagagatgggacagcaatattgaagaacattgtgccaaaaagagatcactgtgcagaaatacccacagaagttcaactgaagatgatgactcatcttcaggagaagaaatggaatggagtgataacagtttgcttctagccagtctttctatacctcagttagatggaactgcagatgaaaatagtgacaatccattgaacaatgaaaattctagaacccactcttctgtaattgcaacaagcaagctttcagttaaaccctccatctttcacaaagatgctgctacattagaaccctcatcttctgctaagattacctttcagtgtaaacacacaagtgccctttcttcccatgttttgaacaaggaagatttaattgaagacctttcacagacaaacaaaaatacagaaaaaggtctagataactcagtcacttcttttacaaacgaaagcacttattctatgaaataccctggatctttaagcagtactgttcattcagaaaattctcataaagagaatagtaagaaagagatcctcccagtatcttcctgtgaaagtagtatttttgattatgaagaagatattccatctgttacaagacaagtaccaagtagaaaatatacaaacattagaaaaatcgaaaaggattccccttttatacatatgcaccgtcaccctaacgagaatacattgggcaaaaattctttcaacttttctgacttaaatcattcaaaaaataaagtatcctctgaaggaaatgaaaaaggaaacagcacagctctgagtagtttattcccttcatcatttactgaaaattgtgaattactgtcatgctcaggggagaatagaactatggtgcattctcttaatagcactgctgatgaaagtggactaaataaacttaaaattaggtatgaagaatttcaagaacataaaacagaaaagccaagcctcagccagcaagcagcacactatatgttttttcccagtgttgttctttctaactgtcttactagaccacagaaactatctcctgtcacatataaattacaacctggcaataaaccatcccggttaaaattgaataaaaggaaacttgcaggtcatcaggagacttctaccaaaagtagtgagactggatccacaaaagataattttatacaaaataatccttgtaatagtaatcctgagaaggataatgcattggctagtgatttaactaaaaccactcgtggagcttttgaaaataaaacacccacagatggttttatagactgtcactttggagatggaacgttagaaactgagcagtcctttggactatatggaaataaatacacacttagagccaaacgcaaggtaaattatgagactgaagacagtgagtcaagttttgtaactcacaactcaaaaattagtctacctcatcccatggaaattggtgaaagtttagatggaactctcaaatcccgaaaacgaagaaaaatgtctaaaaagctgccccctgtcatcataaagtatattattattaatagatttagagggagaaaaaatatgcttgtgaagctaggaaaaatagactctaaagaaaaacaagtaatattaacagaagaaaaaatggaactatataaaaagcttgcacctttgaaggacttttggccaaaagttcccgactcccctgcaaccaaatatcccatttatccactaacaccaaagaaaagtcacagaagaaagtcaaaacataaatctgctaagaaaaaaactggtaaacaacaaaggacaaataatgaaaatattaaaagaactttgtctttcaggaaaaaacggtcacatgctattctttctcctccctcaccatcttacaatgctgaaaccgaagattgtgacttgaattatagtgatgttatgtctaaactaggttttctttctgagagaagcacaagtcccataaattcttctccacctcgctgctggtctcccacagatccaagagctgaagaaatcatggctgctgcagaaaaagaggcaatgctttttaagggtcctaatgtatataagaagactgttaattctcgtataggaaaaactagtcgcgcaagagcacagattaagaaatcaaaagcaaagcttgctaatccctctatagttactaagaaaaggaacaaacgaaatcagacaaataaactagtagatgatggaaaaaagaaaccaagagcaaaacaaaaaacaaatgagaaaggtacatcgagaaagcatataacacttaaggatgaaaaaataaaatctcagtctggtgctgaggttaagtttgtactgaaacaccagaatgtgtctgaatttgcaagtagttctggaggctctcaactactttttaaacagaaagatatgccactaatgggctctgctgtagatcatcccctttctgcttccctacccactggaattaatgcacaacagaagttatctggctgcttttcttctttcttagaaagcaagaagtctgtagatttgcagacattccccagttcacgagatgatttgcatccatcagttgtttgtaattctataggacctggagtctcaaaaattaatgttcaaaggcctcataatcaaagtgctatgtttactctaaaggaatcaacgttaattcaaaaaaatatatttgacctttccaatcatttatctcaggtagcacagaatacacagatatcttctggtatgtcctcaaagatagaagataatgcaaataatatacaaagaaactatttgtcatcaatcggaaagttaagtgaatatcgcaattccctagaatcaaagctggaccaagcatatacccctaattttttgcattgcaaagacagtcagcagcagattgtgtgcatagcggaacagtcaaagcacagtgaaacttgttctccgggaaatacagcttcagaggaaagccaaatgcctaataattgctttgtaacttccttgagaagtccaatcaaacaaatagcatgggagcaaaagcaaaggggctttattttagatatgtcaaattttaaacctgaaagagtaaaaccgaggtcattatcagaagcaatttcacaaaccaaagcactttctcagtgtaaaaatcgaaatgtgtcaacaccttcagcatttggtgaaggacagtctggactggcagttctaaaagaattgttacaaaaaagacagcagaaagcacaaaatgcaaatactacacaagacccattatccaataaacatcaaccaaataaaaatatttctggttcccttgagcataacaaagcaaataaacggacacgatcggtaacgtccccaagaaaacctcgaactcccagaagtacaaaacaaaaagaaaaaatccccaaacttctcaaagtagactctttaaatttacaaaactctagccagttggataactctgtatcagatgatagtcccatctttttttcagatccaggctttgaaagttgttactcacttgaagatagtttatctcctgaacataattataattttgatattaacacaataggtcagactggattttgtagcttttattctggaagtcagtttgtcccagctgatcagaatttgcctcagaagttcctaagtgatgctgttcaggatctttttccaggacaagctatagaaaaaaatgagtttttaagtcatgacaaccagaaatgtgatgaagacaagcatcataccacagactcagcctcatggattagatctggtactttaagtcctgaaatttttgagaagtcaaccatagatagcaatgagaatcgtcgccacaaccagtggaaaaatagctttcatcctctaacaactcggtctaactcaataatggattctttctgtgttcagcaggcagaagactgtctaagtgaaaaatctagattgaataggagttcagtaagcaaagaagtgtttcttagcctcccacagccaaacaattcagactggattcaaggtcacaccagaaaagaaatgggacagtctcttgactcagccaatacctcttttactgcaatactctcctcccctgatggtgaacttgtagacgtggcctgtgaagatttagaactgtatgtttcaagaaacaatgatatgttgacaccaactcctgatagttcaccaagatctactagctctccttcacaatctaaaaatggcagcttcacccctcgaactgctaacattctgaaaccacttatgtcccccccaagtagggaagaaattatggcaactttgttggatcatgacctgtctgagactatttaccaggaaccattttgcagtaatccttctgatgtaccagaaaagcccagggagattggtggacggctcctcatggtagaaactcgacttgcaaatgatctggctgagtttgagggagacttttccttggaaggacttcgtctttggaaaacagcattctcagcaatgactcagaatccaaggccagggtcaccccttcgcagtggccaaggagttgtcaataaagggtcaagtaatagccctaagatggttgaagataaaaaaattgtgattatgccttgcaaatgtgccccaagtcgacaactggttcaagtgtggcttcaagccaaagaagaatacgaacgttccaagaaactgcctaaaaccaagccaactggagttgtaaaatctgctgagaactttagctcttcagttaacccagatgacaaacctgtagtgcctccaaaaatggatgtaagtccatgtatactccccactacagcacataccaaggaggatgttgataattctcagattgctttacaagcaccaaccacgggatgtagtcaaactgcaagtgaaagtcagatgctgccaccagttgcctctgcaagtgatcccgaaaaagatgaagatgatgatgataactattacattagttatagctcccctgattctccagtaattcccccttggcaacaaccaatatccccagattccaaagcattaaatggagatgatagaccctcatcaccagtagaggagctgccttcattggcttttgagaacttcttaaagccaataaaagatggtatacaaaaaagcccctgcagtgagcctcaagagcctctagtgatatctccaattaatactagggcaagaactgggaaatgtgaatcactttgctttcatagtacaccaatcatacagagaaaacttctggaaaggcttcctgaagcacctggccttagcccattatcaacagaaccaaaaacacagaagttgagtaataagaaaggaagtaatactgacactcttagaagagtactgttaacacaagcaaagaatcaatttgcagcagtaaataccccacagaaagaaacttctcagattgatggaccatctttaaacaatacttacggtttcaaagtcagcatacaaaacttacaggaggcaaaagctttacatgagatacaaaatcttaccctaatcagtgtggagttgcatgctcgaactagacgagacttagaaccggatcctgaatttgacccaatctgtgctctgttctactgcatctcatctgacactccactgccagatacagaaaaaacagaactcacaggtgtaatagtgattgataaagacaagacagttttcagtcaagatatcagatatcagactccattacttattagatctggaattacaggactcgaagtcacctatgctgctgatgagaaggcactttttcatgaaattgcaaatataataaagaggtatgatcctgatattctgctaggatatgagattcagatgcattcctggggttacctcttacaaagggctgccgctttaagtattgacttatgtcggatgatctctcgggtgccagatgacaaaattgagaacagatttgcagctgaaagagatgagtatggatcatatacaatgagtgagataaatattgttggccgaattacactaaatctttggagaatcatgagaaatgaggtggctctaactaactacacctttgaaaatgtgagctttcatgttcttcatcagcgttttcccctctttacctttcgagtcttgtcagactggtttgataacaagacagatctatacagatggaaaatggttgatcattatgttagccgtgtccgtggaaatctccaaatgttagaacagctggacctgattgggaaaaccagtgagatggctagactttttggcattcagtttttacatgtactgacaaggggttcacagtaccgtgtggaatcaatgatgttgcgtattgctaaaccaatgaactatattcctgtgacacctagtgttcagcaaagatcccagatgagagccccacagtgtgttcctctaattatggagcctgaatcccgcttctatagcaactctgttctcgttttggatttccaatcactttatccttctattgtgattgcatataactactgcttttccacctgccttggccatgtggagaacttgggaaagtatgatgagttcaaatttggctgtacctctctgagagtacctccagatttactttaccaagttaggcatgatatcacagtgtcccccaatggagtagcttttgtcaagccttcagtaagaaaaggtgtactaccaagaatgcttgaagaaattttgaagactagatttatggtgaagcagtcaatgaaggcttacaagcaagacagagccctgtcacgaatgcttgatgcgcgtcagttgggacttaagctgatagcaaatgtcacatttggctatacatctgctaatttttctgggagaatgccatgcattgaggttggcgatagtattgttcacaaagccagagagaccttggaacgagctattaaactggtgaatgataccaagaaatggggggctagggttgtatatggcgatactgacagtatgtttgtgctactgaaaggagccactaaggagcagtcttttaagattggtcaggaaattgccgaagctgtaactgctaccaatcctaaaccagtgaaattgaagtttgaaaaggtatatttgccctgtgttttacaaacaaaaaagaggtatgtgggttacatgtatgaaacactggatcagaaggacccagtatttgatgcaaaaggaatagaaacagtcagaagagattcctgccctgctgtttctaagatacttgagcgttctctaaagctgctatttgaaacgagagatataagtctaattaaacagtatgttcagcgacaatgtatgaagcttctggaaggaaaggccagcatacaagactttatctttgccaaggaatacagaggaagtttttcttataaaccaggagcttgtgtgccagcccttgaacttacaaggaaaatgctgacttatgaccggcgctctgagcctcaggttggggagcgagtgccatacgtcatcatttatgggacccccggagtaccacttatccagcttgtaaggcgcccagtggaagtcctgcaggacccaactctgagactgaatgctacttactatattaccaagcaaatccttccacccttggcaagaatcttctcacttattggtattgatgtcttcagctggtatcatgaattaccaaggatccataaagctaccagctcctcgcgaagtgaacctgaagggcggaaaggcactatttcacaatattttactaccttacactgtcctgtgtgtgatgacctaactcagcatggcatctgtagtaaatgtcggagccaacctcagcatgttgcagtcatcctcaaccaagaaatccgggagttggaacgtcaacaggagcaacttgtaaagatatgcaagaactgtacaggttgctttgatcgacacatcccatgtgtttctctgaactgcccagtacttttcaaactctcccgagtaaatagagaattgtccaaggcaccatatctccggcagttattagaccagttttaaattgtcaatatcacagtattacaggtgctatttttttcagtgcttaccactaaactgttgtgcatggtgctttttaactttcatcgagtcaaggatgttcactgtctgttatctgaagactatgaagacttctatgctaaccgaattaaaatgtacttgttgatctctgaatagctcacttcttacaatgtacaaattcctcattctgtcaccttttaaacattgttttataatgcaggtgttggatttgctccagtatgtgtaccatcttgtaaattcatttgagtagatcatgtttacttcccagtggaaggagcactgaaaacctcttaaagaaaaagcatttgtgtgttttccttgaactgtctgtatcaagacgtgttacttcgagatatccattcactttataattttgactgcaaaatattttgtaaatacacttttttacttttcaaacgagtaaaataatgtgcaatgatttttatacaaatgattttcaagttgtttggtatatttcctctaggttttgcttgactcaaagtagatcgttattttgatcaaactgtgcaaacagtagtaccacgtgtagcattttgaaacattattttttaaaaaatgctgtcttgctttagctattaatggggcattgtgaggaactgtgcaaagacatttttgttacaaacctgtgggcctgttgcaatactttaaaaataaaaaattttattccatttgcttgttttgtatagacatttctattgcttctaaatatacttaaaatattttctttccttatgtactgtacagttaatcttatttgccatcatcttgaacacaaaatgtgtatttagaatatttgtataactgtgtaaaataaaaaaggaattatgtggtcagtgcattgttttttaaactggaaatcattttgttttaaaagttaataatggaaaccatattaaaattgaataaaatataaaataatataac

SEQ ID NO: 423193 - DNA, 11057 bp, Homo sapiens
  misc_feature (537)..(537): n is a, c, g, or t
tggttctcccagcatggtgtttgaactctgagaacggacaggctgcctcctcaagtgggtccctgacccccatgtagcctaactgggagacatctgcagtaggggccaacagacacctcatacaggtgggtgcccctctgggatgaagcttccagaagaaggatcaggcagcaatatttgctgttctgcaggctccgctggtgatacccaggcaaacagggtctggagtggacctccagcaaactccaacagtcctgcagctgacggaccttgtgaaaaaccgtctcagcggctgcccccgcctcctctgctggatgtgaaatggcggtcggcgagtggtttgcgtccgtgacatcatcatcatggcaacaagagctgcagcctgggaccgaggagcccgtgtgattcccggcggtggcggcagtggcggcagcaccagcaccgacgaaagcttcgagggcttctctccttgcggccccttgccgggtgctcctgaggaggcggcggcagcagcgcctacaccgccccgcccgccgntcctcgaggtgcctctgtgtgaggggagggggccgtgccgagaaggggagggggcgccgccgccgctgcggagggagccgccgccgctgctgctgccgctgccgggtcgccagtgaagggaggcagtggcggcggcggcgaacatgttttcagtaaggatagtgactgcagactactacatggccagcccgctgcaggggctggatacctgccaatcccccctcacccaggcccctgtcaagaaggtgccggtggtgcgagtcttcggagcgaccccggcaggtcagaagacatgtcttcatctacatggcatctttccttacctctatgtgccatacgatggttatggacagcagccagaaagctatctttctcagatggcattcagtatcgacagagcacttaatgtggctttaggcaatccatcttccactgctcagcatgtgttcaaagtgtcattagtatcaggaatgcctttttatggttatcatgagaaggaaagacactttatgaagatctatctttacaatcctacaatggtgaaaaggatatgtgaacttttgcaaagcggagccataatgaataaattttaccagcctcatgaagcgcatattccctacctcctacagctcttcattgactacaatctttatggcatgaatttaataaatctggctgctgtcaagttccgaaaagcaagaaggaaaagtaatacattgcatgcaactggatcctgcaagaatcatttatcaggaaattctcttgctgatactttatttcggtgggaacaagatgaaataccaagctctttaatattggaaggtgttgaaccacagagtacatgtgaattagaagtggatgctgtagctgctgatatcttaaatcgtctggacattgaagctcaaattggtggaaaccctggtctacaggccatatgggaagatgaaaagcaacggcgaagaaacagaaatgaaacttctcaaatgagccaacctgagtcacaagatcacaggtttgtgccagcaacagaaagtgaaaaaaaatttcagaagagacttcaggaaattctcaaacagaatgatttctctgtaacattatcaggatctgtggactacagcgatggatcccaggagttctctgctgagttaacattgcactctgaggttctgtctcctgaaatgcttcagtgtacaccagccaatatggtagaagttcacaaagacaaagagtcaagcaaaggtcacactagacacaaagtggaagaagctcttattaatgaagaagcaattttgaaccttatggaaaatagtcagacttttcagcctttgacccaaagactgagtgagtcacctgttttcatggacagtagtcctgatgaggctctggtacatcttcttgctggtttggaaagtgatggatatcggggggaaagaaataggatgccatcaccatgtcgctcctttggaaataataaatatccacaaaatagtgatgatgaagaaaatgaaccacagattgaaaaagaggaaatggagcttagtttggtgatgtcccagagatgggacagcaatattgaagaacattgtgccaaaaagagatcactgtgcagaaatacccacagaagttcaactgaagatgatgactcatcttcaggagaagaaatggaatggagtgataacagtttgcttctagccagtctttctatacctcagttagatggaactgcagatgaaaatagtgacaatccattgaacaatgaaaattctagaacccactcttctgtaattgcaacaagcaagctttcagttaaaccctccatctttcacaaagatgctgctacattagaaccctcatcttctgctaagattacctttcagtgtaaacacacaagtgccctttcttcccatgttttgaacaaggaagatttaattgaagacctttcacagacaaacaaaaatacagaaaaaggtctagataactcagtcacttcttttacaaacgaaagcacttattctatgaaataccctggatctttaagcagtactgttcattcagaaaattctcataaagagaatagtaagaaagagatcctcccagtatcttcctgtgaaagtagtatttttgattatgaagaagatattccatctgttacaagacaagtaccaagtagaaaatatacaaacattagaaaaatcgaaaaggattccccttttatacatatgcaccgtcaccctaacgagaatacattgggcaaaaattctttcaacttttctgacttaaatcattcaaaaaataaagtatcctctgaaggaaatgaaaaaggaaacagcacagctctgagtagtttattcccttcatcatttactgaaaattgtgaattactgtcatgctcaggggagaatagaactatggtgcattctcttaatagcactgctgatgaaagtggactaaataaacttaaaattaggtatgaagaatttcaagaacataaaacagaaaagccaagcctcagccagcaagcagcacactatatgttttttcccagtgttgttctttctaactgtcttactagaccacagaaactatctcctgtcacatataaattacaacctggcaataaaccatcccggttaaaattgaataaaaggaaacttgcaggtcatcaggagacttctaccaaaagtagtgagactggatccacaaaagataattttatacaaaataatccttgtaatagtaatcctgagaaggataatgcattggctagtgatttaactaaaaccactcgtggagcttttgaaaataaaacacccacagatggttttatagactgtcactttggagatggaacgttagaaactgagcagtcctttggactatatggaaataaatacacacttagagccaaacgcaaggtaaattatgagactgaagacagtgagtcaagttttgtaactcacaactcaaaaattagtctacctcatcccatggaaattggtgaaagtttagatggaactctcaaatcccgaaaacgaagaaaaatgtctaaaaagctgccccctgtcatcataaagtatattattattaatagatttagagggagaaaaaatatgcttgtgaagctaggaaaaatagactctaaagaaaaacaagtaatattaacagaagaaaaaatggaactatataaaaagcttgcacctttgaaggacttttggccaaaagttcccgactcccctgcaaccaaatatcccatttatccactaacaccaaagaaaagtcacagaagaaagtcaaaacataaatctgctaagaaaaaaactggtaaacaacaaaggacaaataatgaaaatattaaaagaactttgtctttcaggaaaaaacggtcacatgctattctttctcctccctcaccatcttacaatgctgaaaccgaagattgtgacttgaattatagtgatgttatgtctaaactaggttttctttctgagagaagcacaagtcccataaattcttctccacctcgctgctggtctcccacagatccaagagctgaagaaatcatggctgctgcagaaaaagaggcaatgctttttaagggtcctaatgtatataagaagactgttaattctcgtataggaaaaactagtcgcgcaagagcacagattaagaaatcaaaagcaaagcttgctaatccctctatagttactaagaaaaggaacaaacgaaatcagacaaataaactagtagatgatggaaaaaagaaaccaagagcaaaacaaaaaacaaatgagaaaggtacatcgagaaagcatataacacttaaggatgaaaaaataaaatctcagtctggtgctgaggttaagtttgtactgaaacaccagaatgtgtctgaatttgcaagtagttctggaggctctcaactactttttaaacagaaagatatgccactaatgggctctgctgtagatcatcccctttctgcttccctacccactggaattaatgcacaacagaagttatctggctgcttttcttctttcttagaaagcaagaagtctgtagatttgcagacattccccagttcacgagatgatttgcatccatcagttgtttgtaattctataggacctggagtctcaaaaattaatgttcaaaggcctcataatcaaagtgctatgtttactctaaaggaatcaacgttaattcaaaaaaatatatttgacctttccaatcatttatctcaggtagcacagaatacacagatatcttctggtatgtcctcaaagatagaagataatgcaaataatatacaaagaaactatttgtcatcaatcggaaagttaagtgaatatcgcaattccctagaatcaaagctggaccaagcatatacccctaattttttgcattgcaaagacagtcagcagcagattgtgtgcatagcggaacagtcaaagcacagtgaaacttgttctccgggaaatacagcttcagaggaaagccaaatgcctaataattgctttgtaacttccttgagaagtccaatcaaacaaatagcatgggagcaaaagcaaaggggctttattttagatatgtcaaattttaaacctgaaagagtaaaaccgaggtcattatcagaagcaatttcacaaaccaaagcactttctcagtgtaaaaatcgaaatgtgtcaacaccttcagcatttggtgaaggacagtctggactggcagttctaaaagaattgttacaaaaaagacagcagaaagcacaaaatgcaaatactacacaagacccattatccaataaacatcaaccaaataaaaatatttctggttcccttgagcataacaaagcaaataaacggacacgatcggtaacgtccccaagaaaacctcgaactcccagaagtacaaaacaaaaagaaaaaatccccaaacttctcaaagtagactctttaaatttacaaaactctagccagttggataactctgtatcagatgatagtcccatctttttttcagatccaggctttgaaagttgttactcacttgaagatagtttatctcctgaacataattataattttgatattaacacaataggtcagactggattttgtagcttttattctggaagtcagtttgtcccagctgatcagaatttgcctcagaagttcctaagtgatgctgttcaggatctttttccaggacaagctatagaaaaaaatgagtttttaagtcatgacaaccagaaatgtgatgaagacaagcatcataccacagactcagcctcatggattagatctggtactttaagtcctgaaatttttgagaagtcaaccatagatagcaatgagaatcgtcgccacaaccagtggaaaaatagctttcatcctctaacaactcggtctaactcaataatggattctttctgtgttcagcaggcagaagactgtctaagtgaaaaatctagattgaataggagttcagtaagcaaagaagtgtttcttagcctcccacagccaaacaattcagactggattcaaggtcacaccagaaaagaaatgggacagtctcttgactcagccaatacctcttttactgcaatactctcctcccctgatggtgaacttgtagacgtggcctgtgaagatttagaactgtatgtttcaagaaacaatgatatgttgacaccaactcctgatagttcaccaagatctactagctctccttcacaatctaaaaatggcagcttcacccctcgaactgctaacattctgaaaccacttatgtcccccccaagtagggaagaaattatggcaactttgttggatcatgacctgtctgagactatttaccaggaaccattttgcagtaatccttctgatgtaccagaaaagcccagggagattggtggacggctcctcatggtagaaactcgacttgcaaatgatctggctgagtttgagggagacttttccttggaaggacttcgtctttggaaaacagcattctcagcaatgactcagaatccaaggccagggtcaccccttcgcagtggccaaggagttgtcaataaagggtcaagtaatagccctaagatggttgaagataaaaaaattgtgattatgccttgcaaatgtgccccaagtcgacaactggttcaagtgtggcttcaagccaaagaagaatacgaacgttccaagaaactgcctaaaaccaagccaactggagttgtaaaatctgctgagaactttagctcttcagttaacccagatgacaaacctgtagtgcctccaaaaatggatgtaagtccatgtatactccccactacagcacataccaaggaggatgttgataattctcagattgctttacaagcaccaaccacgggatgtagtcaaactgcaagtgaaagtcagatgctgccaccagttgcctctgcaagtgatcccgaaaaagatgaagatgatgatgataactattacattagttatagctcccctgattctccagtaattcccccttggcaacaaccaatatccccagattccaaagcattaaatggagatgatagaccctcatcaccagtagaggagctgccttcattggcttttgagaacttcttaaagccaataaaagatggtatacaaaaaagcccctgcagtgagcctcaagagcctctagtgatatctccaattaatactagggcaagaactgggaaatgtgaatcactttgctttcatagtacaccaatcatacagagaaaacttctggaaaggcttcctgaagcacctggccttagcccattatcaacagaaccaaaaacacagaagttgagtaataagaaaggaagtaatactgacactcttagaagagtactgttaacacaagcaaagaatcaatttgcagcagtaaataccccacagaaagaaacttctcagattgatggaccatctttaaacaatacttacggtttcaaagtcagcatacaaaacttacaggaggcaaaagctttacatgagatacaaaatcttaccctaatcagtgtggagttgcatgctcgaactagacgagacttagaaccggatcctgaatttgacccaatctgtgctctgttctactgcatctcatctgacactccactgccagatacagaaaaaacagaactcacaggtgtaatagtgattgataaagacaagacagttttcagtcaagatatcagatatcagactccattacttattagatctggaattacaggactcgaagtcacctatgctgctgatgagaaggcactttttcatgaaattgcaaatataataaagaggtatgatcctgatattctgctaggatatgagattcagatgcattcctggggttacctcttacaaagggctgccgctttaagtattgacttatgtcggatgatctctcgggtgccagatgacaaaattgagaacagatttgcagctgaaagagatgagtatggatcatatacaatgagtgagataaatattgttggccgaattacactaaatctttggagaatcatgagaaatgaggtggctctaactaactacacctttgaaaatgtgagctttcatgttcttcatcagcgttttcccctctttacctttcgagtcttgtcagactggtttgataacaagacagatctatacagatggaaaatggttgatcattatgttagccgtgtccgtggaaatctccaaatgttagaacagctggacctgattgggaaaaccagtgagatggctagactttttggcattcagtttttacatgtactgacaaggggttcacagtaccgtgtggaatcaatgatgttgcgtattgctaaaccaatgaactatattcctgtgacacctagtgttcagcaaagatcccagatgagagccccacagtgtgttcctctaattatggagcctgaatcccgcttctatagcaactctgttctcgttttggatttccaatcactttatccttctattgtgattgcatataactactgcttttccacctgccttggccatgtggagaacttgggaaagtatgatgagttcaaatttggctgtacctctctgagagtacctccagatttactttaccaagttaggcatgatatcacagtgtcccccaatggagtagcttttgtcaagccttcagtaagaaaaggtgtactaccaagaatgcttgaagaaattttgaagactagatttatggtgaagcagtcaatgaaggcttacaagcaagacagagccctgtcacgaatgcttgatgcgcgtcagttgggacttaagctgatagcaaatgtcacatttggctatacatctgctaatttttctgggagaatgccatgcattgaggttggcgatagtattgttcacaaagccagagagaccttggaacgagctattaaactggtgaatgataccaagaaatggggggctagggttgtatatggcgatactgacagtatgtttgtgctactgaaaggagccactaaggagcagtcttttaagattggtcaggaaattgccgaagctgtaactgctaccaatcctaaaccagtgaaattgaagtttgaaaaggtatatttgccctgtgttttacaaacaaaaaagaggtatgtgggttacatgtatgaaacactggatcagaaggacccagtatttgatgcaaaaggaatagaaacagtcagaagagattcctgccctgctgtttctaagatacttgagcgttctctaaagctgctatttgaaacgagagatataagtctaattaaacagtatgttcagcgacaatgtatgaagcttctggaaggaaaggccagcatacaagactttatctttgccaaggaatacagaggaagtttttcttataaaccaggagcttgtgtgccagcccttgaacttacaaggaaaatgctgacttatgaccggcgctctgagcctcaggttggggagcgagtgccatacgtcatcatttatgggacccccggagtaccacttatccagcttgtaaggcgcccagtggaagtcctgcaggacccaactctgagactgaatgctacttactatattaccaagcaaatccttccacccttggcaagaatcttctcacttattggtattgatgtcttcagctggtatcatgaattaccaaggatccataaagctaccagctcctcgcgaagtgaacctgaagggcggaaaggcactatttcacaatattttactaccttacactgtcctgtgtgtgatgacctaactcagcatggcatctgtagtaaatgtcggagccaacctcagcatgttgcagtcatcctcaaccaagaaatccgggagttggaacgtcaacaggagcaacttgtaaagatatgcaagaactgtacaggttgctttgatcgacacatcccatgtgtttctctgaactgcccagtacttttcaaactctcccgagtaaatagagaattgtccaaggcaccatatctccggcagttattagaccagttttaaattgtcaatatcacagtattacaggtgctatttttttcagtgcttaccactaaactgttgtgcatggtgctttttaactttcatcgagtcaaggatgttcactgtctgttatctgaagactatgaagacttctatgctaaccgaattaaaatgtacttgttgatctctgaatagctcacttcttacaatgtacaaattcctcattctgtcaccttttaaacattgttttataatgcaggtgttggatttgctccagtatgtgtaccatcttgtaaattcatttgagtagatcatgtttacttcccagtggaaggagcactgaaaacctcttaaagaaaaagcatttgtgtgttttccttgaactgtctgtatcaagacgtgttacttcgagatatccattcactttataattttgactgcaaaatattttgtaaatacacttttttacttttcaaacgagtaaaataatgtgcaatgatttttatacaaatgattttcaagttgtttggtatatttcctctaggttttgcttgactcaaagtagatcgttattttgatcaaactgtgcaaacagtagtaccacgtgtagcattttgaaacattattttttaaaaaatgctgtcttgctttagctattaatggggcattgtgaggaactgtgcaaagacatttttgttacaaacctgtgggcctgttgcaatactttaaaaataaaaaattttattccatttgcttgttttgtatagacatttctattgcttctaaatatacttaaaatattttctttccttatgtactgtacagttaatcttatttgccatcatcttgaacacaaaatgtgtatttagaatatttgtataactgtgtaaaataaaaaaggaattatgtggtcagtgcattgttttttaaactggaaatcattttgttttaaaagttaataatggaaaccatattaaaattgaataaaatataaaataatataac

SEQ ID NO: 423194 - DNA, 10796 bp, Homo sapiens
tggttctcccagcatggtgtttgaactctgagaacggacaggctgcctcctcaagtgggtccctgacccccatgtagcctaactgggagacatctgcagtaggggccaacagacacctcatacaggtgggtgcccctctgggatgaagcttccagaagaaggatcaggcagcaatatttgctgttctgcaggctccgctggtgatacccaggcaaacagggtctggagtggacctccagcaaactccaacagtcctgcagctgacggaccttgtgaaaaaccgtctcagcggctgcccccgcctcctctgctggatgtgaaatggcggtcggcgagtggtttgcgtccgtgacatcatcatcatggcaacaagagtgccgggtcgccagtgaagggaggcagtggcggcggcggcgaacatgttttcagtaaggatagtgactgcagactactacatggccagcccgctgcaggggctggatacctgccaatcccccctcacccaggcccctgtcaagaaggtgccggtggtgcgagtcttcggagcgaccccggcaggtcagaagacatgtcttcatctacatggcatctttccttacctctatgtgccatacgatggttatggacagcagccagaaagctatctttctcagatggcattcagtatcgacagagcacttaatgtggctttaggcaatccatcttccactgctcagcatgtgttcaaagtgtcattagtatcaggaatgcctttttatggttatcatgagaaggaaagacactttatgaagatctatctttacaatcctacaatggtgaaaaggatatgtgaacttttgcaaagcggagccataatgaataaattttaccagcctcatgaagcgcatattccctacctcctacagctcttcattgactacaatctttatggcatgaatttaataaatctggctgctgtcaagttccgaaaagcaagaaggaaaagtaatacattgcatgcaactggatcctgcaagaatcatttatcaggaaattctcttgctgatactttatttcggtgggaacaagatgaaataccaagctctttaatattggaaggtgttgaaccacagagtacatgtgaattagaagtggatgctgtagctgctgatatcttaaatcgtctggacattgaagctcaaattggtggaaaccctggtctacaggccatatgggaagatgaaaagcaacggcgaagaaacagaaatgaaacttctcaaatgagccaacctgagtcacaagatcacaggtttgtgccagcaacagaaagtgaaaaaaaatttcagaagagacttcaggaaattctcaaacagaatgatttctctgtaacattatcaggatctgtggactacagcgatggatcccaggagttctctgctgagttaacattgcactctgaggttctgtctcctgaaatgcttcagtgtacaccagccaatatggtagaagttcacaaagacaaagagtcaagcaaaggtcacactagacacaaagtggaagaagctcttattaatgaagaagcaattttgaaccttatggaaaatagtcagacttttcagcctttgacccaaagactgagtgagtcacctgttttcatggacagtagtcctgatgaggctctggtacatcttcttgctggtttggaaagtgatggatatcggggggaaagaaataggatgccatcaccatgtcgctcctttggaaataataaatatccacaaaatagtgatgatgaagaaaatgaaccacagattgaaaaagaggaaatggagcttagtttggtgatgtcccagagatgggacagcaatattgaagaacattgtgccaaaaagagatcactgtgcagaaatacccacagaagttcaactgaagatgatgactcatcttcaggagaagaaatggaatggagtgataacagtttgcttctagccagtctttctatacctcagttagatggaactgcagatgaaaatagtgacaatccattgaacaatgaaaattctagaacccactcttctgtaattgcaacaagcaagctttcagttaaaccctccatctttcacaaagatgctgctacattagaaccctcatcttctgctaagattacctttcagtgtaaacacacaagtgccctttcttcccatgttttgaacaaggaagatttaattgaagacctttcacagacaaacaaaaatacagaaaaaggtctagataactcagtcacttcttttacaaacgaaagcacttattctatgaaataccctggatctttaagcagtactgttcattcagaaaattctcataaagagaatagtaagaaagagatcctcccagtatcttcctgtgaaagtagtatttttgattatgaagaagatattccatctgttacaagacaagtaccaagtagaaaatatacaaacattagaaaaatcgaaaaggattccccttttatacatatgcaccgtcaccctaacgagaatacattgggcaaaaattctttcaacttttctgacttaaatcattcaaaaaataaagtatcctctgaaggaaatgaaaaaggaaacagcacagctctgagtagtttattcccttcatcatttactgaaaattgtgaattactgtcatgctcaggggagaatagaactatggtgcattctcttaatagcactgctgatgaaagtggactaaataaacttaaaattaggtatgaagaatttcaagaacataaaacagaaaagccaagcctcagccagcaagcagcacactatatgttttttcccagtgttgttctttctaactgtcttactagaccacagaaactatctcctgtcacatataaattacaacctggcaataaaccatcccggttaaaattgaataaaaggaaacttgcaggtcatcaggagacttctaccaaaagtagtgagactggatccacaaaagataattttatacaaaataatccttgtaatagtaatcctgagaaggataatgcattggctagtgatttaactaaaaccactcgtggagcttttgaaaataaaacacccacagatggttttatagactgtcactttggagatggaacgttagaaactgagcagtcctttggactatatggaaataaatacacacttagagccaaacgcaaggtaaattatgagactgaagacagtgagtcaagttttgtaactcacaactcaaaaattagtctacctcatcccatggaaattggtgaaagtttagatggaactctcaaatcccgaaaacgaagaaaaatgtctaaaaagctgccccctgtcatcataaagtatattattattaatagatttagagggagaaaaaatatgcttgtgaagctaggaaaaatagactctaaagaaaaacaagtaatattaacagaagaaaaaatggaactatataaaaagcttgcacctttgaaggacttttggccaaaagttcccgactcccctgcaaccaaatatcccatttatccactaacaccaaagaaaagtcacagaagaaagtcaaaacataaatctgctaagaaaaaaactggtaaacaacaaaggacaaataatgaaaatattaaaagaactttgtctttcaggaaaaaacggtcacatgctattctttctcctccctcaccatcttacaatgctgaaaccgaagattgtgacttgaattatagtgatgttatgtctaaactaggttttctttctgagagaagcacaagtcccataaattcttctccacctcgctgctggtctcccacagatccaagagctgaagaaatcatggctgctgcagaaaaagaggcaatgctttttaagggtcctaatgtatataagaagactgttaattctcgtataggaaaaactagtcgcgcaagagcacagattaagaaatcaaaagcaaagcttgctaatccctctatagttactaagaaaaggaacaaacgaaatcagacaaataaactagtagatgatggaaaaaagaaaccaagagcaaaacaaaaaacaaatgagaaaggtacatcgagaaagcatataacacttaaggatgaaaaaataaaatctcagtctggtgctgaggttaagtttgtactgaaacaccagaatgtgtctgaatttgcaagtagttctggaggctctcaactactttttaaacagaaagatatgccactaatgggctctgctgtagatcatcccctttctgcttccctacccactggaattaatgcacaacagaagttatctggctgcttttcttctttcttagaaagcaagaagtctgtagatttgcagacattccccagttcacgagatgatttgcatccatcagttgtttgtaattctataggacctggagtctcaaaaattaatgttcaaaggcctcataatcaaagtgctatgtttactctaaaggaatcaacgttaattcaaaaaaatatatttgacctttccaatcatttatctcaggtagcacagaatacacagatatcttctggtatgtcctcaaagatagaagataatgcaaataatatacaaagaaactatttgtcatcaatcggaaagttaagtgaatatcgcaattccctagaatcaaagctggaccaagcatatacccctaattttttgcattgcaaagacagtcagcagcagattgtgtgcatagcggaacagtcaaagcacagtgaaacttgttctccgggaaatacagcttcagaggaaagccaaatgcctaataattgctttgtaacttccttgagaagtccaatcaaacaaatagcatgggagcaaaagcaaaggggctttattttagatatgtcaaattttaaacctgaaagagtaaaaccgaggtcattatcagaagcaatttcacaaaccaaagcactttctcagtgtaaaaatcgaaatgtgtcaacaccttcagcatttggtgaaggacagtctggactggcagttctaaaagaattgttacaaaaaagacagcagaaagcacaaaatgcaaatactacacaagacccattatccaataaacatcaaccaaataaaaatatttctggttcccttgagcataacaaagcaaataaacggacacgatcggtaacgtccccaagaaaacctcgaactcccagaagtacaaaacaaaaagaaaaaatccccaaacttctcaaagtagactctttaaatttacaaaactctagccagttggataactctgtatcagatgatagtcccatctttttttcagatccaggctttgaaagttgttactcacttgaagatagtttatctcctgaacataattataattttgatattaacacaataggtcagactggattttgtagcttttattctggaagtcagtttgtcccagctgatcagaatttgcctcagaagttcctaagtgatgctgttcaggatctttttccaggacaagctatagaaaaaaatgagtttttaagtcatgacaaccagaaatgtgatgaagacaagcatcataccacagactcagcctcatggattagatctggtactttaagtcctgaaatttttgagaagtcaaccatagatagcaatgagaatcgtcgccacaaccagtggaaaaatagctttcatcctctaacaactcggtctaactcaataatggattctttctgtgttcagcaggcagaagactgtctaagtgaaaaatctagattgaataggagttcagtaagcaaagaagtgtttcttagcctcccacagccaaacaattcagactggattcaaggtcacaccagaaaagaaatgggacagtctcttgactcagccaatacctcttttactgcaatactctcctcccctgatggtgaacttgtagacgtggcctgtgaagatttagaactgtatgtttcaagaaacaatgatatgttgacaccaactcctgatagttcaccaagatctactagctctccttcacaatctaaaaatggcagcttcacccctcgaactgctaacattctgaaaccacttatgtcccccccaagtagggaagaaattatggcaactttgttggatcatgacctgtctgagactatttaccaggaaccattttgcagtaatccttctgatgtaccagaaaagcccagggagattggtggacggctcctcatggtagaaactcgacttgcaaatgatctggctgagtttgagggagacttttccttggaaggacttcgtctttggaaaacagcattctcagcaatgactcagaatccaaggccagggtcaccccttcgcagtggccaaggagttgtcaataaagggtcaagtaatagccctaagatggttgaagataaaaaaattgtgattatgccttgcaaatgtgccccaagtcgacaactggttcaagtgtggcttcaagccaaagaagaatacgaacgttccaagaaactgcctaaaaccaagccaactggagttgtaaaatctgctgagaactttagctcttcagttaacccagatgacaaacctgtagtgcctccaaaaatggatgtaagtccatgtatactccccactacagcacataccaaggaggatgttgataattctcagattgctttacaagcaccaaccacgggatgtagtcaaactgcaagtgaaagtcagatgctgccaccagttgcctctgcaagtgatcccgaaaaagatgaagatgatgatgataactattacattagttatagctcccctgattctccagtaattcccccttggcaacaaccaatatccccagattccaaagcattaaatggagatgatagaccctcatcaccagtagaggagctgccttcattggcttttgagaacttcttaaagccaataaaagatggtatacaaaaaagcccctgcagtgagcctcaagagcctctagtgatatctccaattaatactagggcaagaactgggaaatgtgaatcactttgctttcatagtacaccaatcatacagagaaaacttctggaaaggcttcctgaagcacctggccttagcccattatcaacagaaccaaaaacacagaagttgagtaataagaaaggaagtaatactgacactcttagaagagtactgttaacacaagcaaagaatcaatttgcagcagtaaataccccacagaaagaaacttctcagattgatggaccatctttaaacaatacttacggtttcaaagtcagcatacaaaacttacaggaggcaaaagctttacatgagatacaaaatcttaccctaatcagtgtggagttgcatgctcgaactagacgagacttagaaccggatcctgaatttgacccaatctgtgctctgttctactgcatctcatctgacactccactgccagatacagaaaaaacagaactcacaggtgtaatagtgattgataaagacaagacagttttcagtcaagatatcagatatcagactccattacttattagatctggaattacaggactcgaagtcacctatgctgctgatgagaaggcactttttcatgaaattgcaaatataataaagaggtatgatcctgatattctgctaggatatgagattcagatgcattcctggggttacctcttacaaagggctgccgctttaagtattgacttatgtcggatgatctctcgggtgccagatgacaaaattgagaacagatttgcagctgaaagagatgagtatggatcatatacaatgagtgagataaatattgttggccgaattacactaaatctttggagaatcatgagaaatgaggtggctctaactaactacacctttgaaaatgtgagctttcatgttcttcatcagcgttttcccctctttacctttcgagtcttgtcagactggtttgataacaagacagatctatacagatggaaaatggttgatcattatgttagccgtgtccgtggaaatctccaaatgttagaacagctggacctgattgggaaaaccagtgagatggctagactttttggcattcagtttttacatgtactgacaaggggttcacagtaccgtgtggaatcaatgatgttgcgtattgctaaaccaatgaactatattcctgtgacacctagtgttcagcaaagatcccagatgagagccccacagtgtgttcctctaattatggagcctgaatcccgcttctatagcaactctgttctcgttttggatttccaatcactttatccttctattgtgattgcatataactactgcttttccacctgccttggccatgtggagaacttgggaaagtatgatgagttcaaatttggctgtacctctctgagagtacctccagatttactttaccaagttaggcatgatatcacagtgtcccccaatggagtagcttttgtcaagccttcagtaagaaaaggtgtactaccaagaatgcttgaagaaattttgaagactagatttatggtgaagcagtcaatgaaggcttacaagcaagacagagccctgtcacgaatgcttgatgcgcgtcagttgggacttaagctgatagcaaatgtcacatttggctatacatctgctaatttttctgggagaatgccatgcattgaggttggcgatagtattgttcacaaagccagagagaccttggaacgagctattaaactggtgaatgataccaagaaatggggggctagggttgtatatggcgatactgacagtatgtttgtgctactgaaaggagccactaaggagcagtcttttaagattggtcaggaaattgccgaagctgtaactgctaccaatcctaaaccagtgaaattgaagtttgaaaaggtatatttgccctgtgttttacaaacaaaaaagaggtatgtgggttacatgtatgaaacactggatcagaaggacccagtatttgatgcaaaaggaatagaaacagtcagaagagattcctgccctgctgtttctaagatacttgagcgttctctaaagctgctatttgaaacgagagatataagtctaattaaacagtatgttcagcgacaatgtatgaagcttctggaaggaaaggccagcatacaagactttatctttgccaaggaatacagaggaagtttttcttataaaccaggagcttgtgtgccagcccttgaacttacaaggaaaatgctgacttatgaccggcgctctgagcctcaggttggggagcgagtgccatacgtcatcatttatgggacccccggagtaccacttatccagcttgtaaggcgcccagtggaagtcctgcaggacccaactctgagactgaatgctacttactatattaccaagcaaatccttccacccttggcaagaatcttctcacttattggtattgatgtcttcagctggtatcatgaattaccaaggatccataaagctaccagctcctcgcgaagtgaacctgaagggcggaaaggcactatttcacaatattttactaccttacactgtcctgtgtgtgatgacctaactcagcatggcatctgtagtaaatgtcggagccaacctcagcatgttgcagtcatcctcaaccaagaaatccgggagttggaacgtcaacaggagcaacttgtaaagatatgcaagaactgtacaggttgctttgatcgacacatcccatgtgtttctctgaactgcccagtacttttcaaactctcccgagtaaatagagaattgtccaaggcaccatatctccggcagttattagaccagttttaaattgtcaatatcacagtattacaggtgctatttttttcagtgcttaccactaaactgttgtgcatggtgctttttaactttcatcgagtcaaggatgttcactgtctgttatctgaagactatgaagacttctatgctaaccgaattaaaatgtacttgttgatctctgaatagctcacttcttacaatgtacaaattcctcattctgtcaccttttaaacattgttttataatgcaggtgttggatttgctccagtatgtgtaccatcttgtaaattcatttgagtagatcatgtttacttcccagtggaaggagcactgaaaacctcttaaagaaaaagcatttgtgtgttttccttgaactgtctgtatcaagacgtgttacttcgagatatccattcactttataattttgactgcaaaatattttgtaaatacacttttttacttttcaaacgagtaaaataatgtgcaatgatttttatacaaatgattttcaagttgtttggtatatttcctctaggttttgcttgactcaaagtagatcgttattttgatcaaactgtgcaaacagtagtaccacgtgtagcattttgaaacattattttttaaaaaatgctgtcttgctttagctattaatggggcattgtgaggaactgtgcaaagacatttttgttacaaacctgtgggcctgttgcaatactttaaaaataaaaaattttattccatttgcttgttttgtatagacatttctattgcttctaaatatacttaaaatattttctttccttatgtactgtacagttaatcttatttgccatcatcttgaacacaaaatgtgtatttagaatatttgtataactgtgtaaaataaaaaaggaattatgtggtcagtgcattgttttttaaactggaaatcattttgttttaaaagttaataatggaaaccatattaaaattgaataaaatataaaataatataac

SEQ ID NO: 423195 - DNA, 2525 bp, Homo sapiens
gagacggagtctcgctgtgtctcccaggctggagtgcagtggcagagtgagactcctcaaaaaaaaaaaaaaagttcttgaataaagaaggattattcttccaagaatccaacgtagctgagtaccttgtaacaagtgcagtccacttactgttatactcaaagacaagtttgtatattgattggttctttcaaattcttcacctcagtttcttcttgagtacttgtagaaagaatgatgatactgatggctattttgatttcttttttacgttcttttctcgtttcatttctggaaatatttagtaattaaatgtattatatgttaaagtctgttaacttatactgagctatgttaagaaattatttccaatgtgtttgtaccaacaggttggcgatagtattgttcacaaagccagagagaccttggaacgagctattaaactggtgaatgataccaagaaatggggggctagggttgtatatggcgatactgacagtatgtttgtgctactgaaaggagccactaaggagcagtcttttaagattggtcaggaaattgccgaagctgtaactgctaccaatcctaaaccagtgaaattgaagtttgaaaaggtatatttgccctgtgttttacaaacaaaaaagaggtatgtgggttacatgtatgaaacactggatcagaaggacccagtatttgatgcaaaaggaatagaaacagtcagaagagattcctgccctgctgtttctaagatacttgagcgttctctaaagctgctatttgaaacgagagatataagtctaattaaacagtatgttcagcgacaatgtatgaagcttctggaaggaaaggccagcatacaagactttatctttgccaaggaatacagaggaagtttttcttataaaccaggagcttgtgtgccagcccttgaacttacaaggaaaatgctgacttatgaccggcgctctgagcctcaggttggggagcgagtgccatacgtcatcatttatgggacccccggagtaccacttatccagcttgtaaggcgcccagtggaagtcctgcaggacccaactctgagactgaatgctacttactatattaccaagcaaatccttccacccttggcaagaatcttctcacttattggtattgatgtcttcagctggtatcatgaattaccaaggatccataaagctaccagctcctcgcgaagtgaacctgaagggcggaaaggcactatttcacaatattttactaccttacactgtcctgtgtgtgatgacctaactcagcatggcatctgtagtaaatgtcggagccaacctcagcatgttgcagtcatcctcaaccaagaaatccgggagttggaacgtcaacaggagcaacttgtaaagatatgcaagaactgtacaggttgctttgatcgacacatcccatgtgtttctctgaactgcccagtacttttcaaactctcccgagtaaatagagaattgtccaaggcaccatatctccggcagttattagaccagttttaaattgtcaatatcacagtattacaggtgctatttttttcagtgcttaccactaaactgttgtgcatggtgctttttaactttcatcgagtcaaggatgttcactgtctgttatctgaagactatgaagacttctatgctaaccgaattaaaatgtacttgttgatctctgaatagctcacttcttacaatgtacaaattcctcattctgtcaccttttaaacattgttttataatgcaggtgttggatttgctccagtatgtgtaccatcttgtaaattcatttgagtagatcatgtttacttcccagtggaaggagcactgaaaacctcttaaagaaaaagcatttgtgtgttttccttgaactgtctgtatcaagacgtgttacttcgagatatccattcactttataattttgactgcaaaatattttgtaaatacacttttttacttttcaaacgagtaaaataatgtgcaatgatttttatacaaatgattttcaagttgtttggtatatttcctctaggttttgcttgactcaaagtagatcgttattttgatcaaactgtgcaaacagtagtaccacgtgtagcattttgaaacattattttttaaaaaatgctgtcttgctttagctattaatggggcattgtgaggaactgtgcaaagacatttttgttacaaacctgtgggcctgttgcaatactttaaaaataaaaaattttattccatttgcttgttttgtatagacatttctattgcttctaaatatacttaaaatattttctttccttatgtactgtacagttaatcttatttgccatcatcttgaacacaaaatgtgtatttagaatatttgtataactgtgtaaaataaaaaaggaattatgtggtcagtgcattgttttttaaactggaaatcattttgttttaaaagttaataatggaaaccatattaaaattgaataaaatataaaataatataac

SEQ ID NO: 423196 - DNA, 1928 bp, Homo sapiens
gccctgcaggcagtcagattttatggttatctcccttattccctgcaaatcgctgttatcctgttcttttcaaggtgctcagatttcatattgttcaaacacacatgctttacaaacaatttgtgcagataacgcaatcaccacagggtcctgaggcgatatacatcctcagcttacggagatgacggaattaaaagattaaagacaggcataggaaattataagagtattgattggggaagtgataaatgttcatgaaatcttcacaattcatgttcagagattgcagtaaagacaggcataagaaattatgaaagtattaatttggggaactaacaaatgtccatgaaatcttcacaatttatgtttttctgctgtggcttcagcaggttgcttttctcttctggaatacgaaaaagagtaacttttttatgattggcatatgagaatatagtctaagtactttgaaaacgtgtttatagttcatgtaagagacattctttggtaattgggtagcttatgtagattttaataggattccattgtaaatgaaagttaatcttaggaattaaatgaatccttagggaaatttgtactctatctttacaaaataatatcctttagaaatgtctcaacatagggtagtctaggcttccaagagattaaaattaatgaaagtttctgtaatgtatgtctgccagtaatctgtggtagtctagaaagtagggattataaaaatttgttgtttgcatacacgcataaaaactttcctattattttttgtatttctcttatgctttcagatatgcaagaactgtacaggttgctttgatcgacacatcccatgtgtttctctgaactgcccagtacttttcaaactctcccgagtaaatagagaattgtccaaggcaccatatctccggcagttattagaccagttttaaattgtcaatatcacagtattacaggtgctatttttttcagtgcttaccactaaactgttgtgcatggtgctttttaactttcatcgagtcaaggatgttcactgtctgttatctgaagactatgaagacttctatgctaaccgaattaaaatgtacttgttgatctctgaatagctcacttcttacaatgtacaaattcctcattctgtcaccttttaaacattgttttataatgcaggtgttggatttgctccagtatgtgtaccatcttgtaaattcatttgagtagatcatgtttacttcccagtggaaggagcactgaaaacctcttaaagaaaaagcatttgtgtgttttccttgaactgtctgtatcaagacgtgttacttcgagatatccattcactttataattttgactgcaaaatattttgtaaatacacttttttacttttcaaacgagtaaaataatgtgcaatgatttttatacaaatgattttcaagttgtttggtatatttcctctaggttttgcttgactcaaagtagatcgttattttgatcaaactgtgcaaacagtagtaccacgtgtagcattttgaaacattattttttaaaaaatgctgtcttgctttagctattaatggggcattgtgaggaactgtgcaaagacatttttgttacaaacctgtgggcctgttgcaatactttaaaaataaaaaattttattccatttgcttgttttgtatagacatttctattgcttctaaatatacttaaaatattttctttccttatgtactgtacagttaatcttatttgccatcatcttgaacacaaaatgtgtatttagaatatttgtataactgtgtaaaataaaaaaggaattatgtggtcagtgcattgttttttaaactggaaatcattttgttttaaaagttaataatggaaaccatattaaaattgaataaaatataaaataatataac

SEQ ID NO: 423197 - DNA, 8523 bp, Homo sapiens
  misc_feature (537)..(537): n is a, c, g, or t
tggttctcccagcatggtgtttgaactctgagaacggacaggctgcctcctcaagtgggtccctgacccccatgtagcctaactgggagacatctgcagtaggggccaacagacacctcatacaggtgggtgcccctctgggatgaagcttccagaagaaggatcaggcagcaatatttgctgttctgcaggctccgctggtgatacccaggcaaacagggtctggagtggacctccagcaaactccaacagtcctgcagctgacggaccttgtgaaaaaccgtctcagcggctgcccccgcctcctctgctggatgtgaaatggcggtcggcgagtggtttgcgtccgtgacatcatcatcatggcaacaagagctgcagcctgggaccgaggagcccgtgtgattcccggcggtggcggcagtggcggcagcaccagcaccgacgaaagcttcgagggcttctctccttgcggccccttgccgggtgctcctgaggaggcggcggcagcagcgcctacaccgccccgcccgccgntcctcgaggtgcctctgtgtgaggggagggggccgtgccgagaaggggagggggcgccgccgccgctgcggagggagccgccgccgctgctgctgccgctgccgggtcgccagtgaagggaggcagtggcggcggcggcgaacatgttttcagtaaggatagtgactgcagactactacatggccagcccgctgcaggggctggatacctgccaatcccccctcacccaggcccctgtcaagaaggtgccggtggtgcgagtcttcggagcgaccccggcagaataaaacccaagacaagccacataaaagcaacctaaaaattaaactgtcatcatattatttgttttaaaactatggaataatatatctgaggaagatttctctcaaaattgtttttctcaatttcaaattccgggtgtacctgtgcaggtttattacaaaggtatattgcataatgctgaggtttgaagtacgactgaacccgtcacctaggaagtgagcatagtactcaataggtcagaagacatgtcttcatctacatggcatctttccttacctctatgtgccatacgatggttatggacagcagccagaaagctatctttctcagatggcattcagtatcgacagagcacttaatgtggctttaggcaatccatcttccactgctcagcatgtgttcaaagtgtcattagtatcaggaatgcctttttatggttatcatgagaaggaaagacactttatgaagatctatctttacaatcctacaatggtgaaaaggatatgtgaacttttgcaaagcggagccataatgaataaattttaccagcctcatgaagcgcatattccctacctcctacagctcttcattgactacaatctttatggcatgaatttaataaatctggctgctgtcaagttccgaaaagcaagaaggaaaagtaatacattgcatgcaactggatcctgcaagaatcatttatcaggaaattctcttgctgatactttatttcggtgggaacaagatgaaataccaagctctttaatattggaaggtgttgaaccacagagtacatgtgaattagaagtggatgctgtagctgctgatatcttaaatcgtctggacattgaagctcaaattggtggaaaccctggtctacaggccatatgggaagatgaaaagcaacggcgaagaaacagaaatgaaacttctcaaatgagccaacctgagtcacaagatcacaggtttgtgccagcaacagaaagtgaaaaaaaatttcagaagagacttcaggaaattctcaaacagaatgatttctctgtaacattatcaggatctgtggactacagcgatggatcccaggagttctctgctgagttaacattgcactctgaggttctgtctcctgaaatgcttcagtgtacaccagccaatatggtagaagttcacaaagacaaagagtcaagcaaaggtcacactagacacaaagtggaagaagctcttattaatgaagaagcaattttgaaccttatggaaaatagtcagacttttcagcctttgacccaaagactgagtgagtcacctgttttcatggacagtagtcctgatgaggctctggtacatcttcttgctggtttggaaagtgatggatatcggggggaaagaaataggatgccatcaccatgtcgctcctttggaaataataaatatccacaaaatagtgatgatgaagaaaatgaaccacagattgaaaaagaggaaatggagcttagtttggtgatgtcccagagatgggacagcaatattgaagaacattgtgccaaaaagagatcactgtgcagaaatacccacagaagttcaactgaagatgatgactcatcttcaggagaagaaatggaatggagtgataacagtttgcttctagccagtctttctatacctcagttagatggaactgcagatgaaaatagtgacaatccattgaacaatgaaaattctagaacccactcttctgtaattgcaacaagcaagctttcagttaaaccctccatctttcacaaagatgctgctacattagaaccctcatcttctgctaagattacctttcagtgtaaacacacaagtgccctttcttcccatgttttgaacaaggaagatttaattgaagacctttcacagacaaacaaaaatacagaaaaaggtctagataactcagtcacttcttttacaaacgaaagcacttattctatgaaataccctggatctttaagcagtactgttcattcagaaaattctcataaagagaatagtaagaaagagatcctcccagtatcttcctgtgaaagtagtatttttgattatgaagaagatattccatctgttacaagacaagtaccaagtagaaaatatacaaacattagaaaaatcgaaaaggattccccttttatacatatgcaccgtcaccctaacgagaatacattgggcaaaaattctttcaacttttctgacttaaatcattcaaaaaataaagtatcctctgaaggaaatgaaaaaggaaacagcacagctctgagtagtttattcccttcatcatttactgaaaattgtgaattactgtcatgctcaggggagaatagaactatggtgcattctcttaatagcactgctgatgaaagtggactaaataaacttaaaattaggtatgaagaatttcaagaacataaaacagaaaagccaagcctcagccagcaagcagcacactatatgttttttcccagtgttgttctttctaactgtcttactagaccacagaaactatctcctgtcacatataaattacaacctggcaataaaccatcccggttaaaattgaataaaaggaaacttgcaggtcatcaggagacttctaccaaaagtagtgagactggatccacaaaagataattttatacaaaataatccttgtaatagtaatcctgagaaggataatgcattggctagtgatttaactaaaaccactcgtggagcttttgaaaataaaacacccacagatggttttatagactgtcactttggagatggaacgttagaaactgagcagtcctttggactatatggaaataaatacacacttagagccaaacgcaaggtaaattatgagactgaagacagtgagtcaagttttgtaactcacaactcaaaaattagtctacctcatcccatggaaattggtgaaagtttagatggaactctcaaatcccgaaaacgaagaaaaatgtctaaaaagctgccccctgtcatcataaagtatattattattaatagatttagagggagaaaaaatatgcttgtgaagctaggaaaaatagactctaaagaaaaacaagtaatattaacagaagaaaaaatggaactatataaaaagcttgcacctttgaaggacttttggccaaaagttcccgactcccctgcaaccaaatatcccatttatccactaacaccaaagaaaagtcacagaagaaagtcaaaacataaatctgctaagaaaaaaactggtaaacaacaaaggacaaataatgaaaatattaaaagaactttgtctttcaggaaaaaacggtcacatgctattctttctcctccctcaccatcttacaatgctgaaaccgaagattgtgacttgaattatagtgatgttatgtctaaactaggttttctttctgagagaagcacaagtcccataaattcttctccacctcgctgctggtctcccacagatccaagagctgaagaaatcatggctgctgcagaaaaagaggcaatgctttttaagggtcctaatgtatataagaagactgttaattctcgtataggaaaaactagtcgcgcaagagcacagattaagaaatcaaaagcaaagcttgctaatccctctatagttactaagaaaaggaacaaacgaaatcagacaaataaactagtagatgatggaaaaaagaaaccaagagcaaaacaaaaaacaaatgagaaaggtacatcgagaaagcatataacacttaaggatgaaaaaataaaatctcagtctggtgctgaggttaagtttgtactgaaacaccagaatgtgtctgaatttgcaagtagttctggaggctctcaactactttttaaacagaaagatatgccactaatgggctctgctgtagatcatcccctttctgcttccctacccactggaattaatgcacaacagaagttatctggctgcttttcttctttcttagaaagcaagaagtctgtagatttgcagacattccccagttcacgagatgatttgcatccatcagttgtttgtaattctataggacctggagtctcaaaaattaatgttcaaaggcctcataatcaaagtgctatgtttactctaaaggaatcaacgttaattcaaaaaaatatatttgacctttccaatcatttatctcaggtagcacagaatacacagatatcttctggtatgtcctcaaagatagaagataatgcaaataatatacaaagaaactatttgtcatcaatcggaaagttaagtgaatatcgcaattccctagaatcaaagctggaccaagcatatacccctaattttttgcattgcaaagacagtcagcagcagattgtgtgcatagcggaacagtcaaagcacagtgaaacttgttctccgggaaatacagcttcagaggaaagccaaatgcctaataattgctttgtaacttccttgagaagtccaatcaaacaaatagcatgggagcaaaagcaaaggggctttattttagatatgtcaaattttaaacctgaaagagtaaaaccgaggtcattatcagaagcaatttcacaaaccaaagcactttctcagtgtaaaaatcgaaatgtgtcaacaccttcagcatttggtgaaggacagtctggactggcagttctaaaagaattgttacaaaaaagacagcagaaagcacaaaatgcaaatactacacaagacccattatccaataaacatcaaccaaataaaaatatttctggttcccttgagcataacaaagcaaataaacggacacgatcggtaacgtccccaagaaaacctcgaactcccagaagtacaaaacaaaaagaaaaaatccccaaacttctcaaagtagactctttaaatttacaaaactctagccagttggataactctgtatcagatgatagtcccatctttttttcagatccaggctttgaaagttgttactcacttgaagatagtttatctcctgaacataattataattttgatattaacacaataggtcagactggattttgtagcttttattctggaagtcagtttgtcccagctgatcagaatttgcctcagaagttcctaagtgatgctgttcaggatctttttccaggacaagctatagaaaaaaatgagtttttaagtcatgacaaccagaaatgtgatgaagacaagcatcataccacagactcagcctcatggattagatctggtactttaagtcctgaaatttttgagaagtcaaccatagatagcaatgagaatcgtcgccacaaccagtggaaaaatagctttcatcctctaacaactcggtctaactcaataatggattctttctgtgttcagcaggcagaagactgtctaagtgaaaaatctagattgaataggagttcagtaagcaaagaagtgtttcttagcctcccacagccaaacaattcagactggattcaaggtcacaccagaaaagaaatgggacagtctcttgactcagccaatacctcttttactgcaatactctcctcccctgatggtgaacttgtagacgtggcctgtgaagatttagaactgtatgtttcaagaaacaatgatatgttgacaccaactcctgatagttcaccaagatctactagctctccttcacaatctaaaaatggcagcttcacccctcgaactgctaacattctgaaaccacttatgtcccccccaagtagggaagaaattatggcaactttgttggatcatgacctgtctgagactatttaccaggaaccattttgcagtaatccttctgatgtaccagaaaagcccagggagattggtggacggctcctcatggtagaaactcgacttgcaaatgatctggctgagtttgagggagacttttccttggaaggacttcgtctttggaaaacagcattctcagcaatgactcagaatccaaggccagggtcaccccttcgcagtggccaaggagttgtcaataaagggtcaagtaatagccctaagatggttgaagataaaaaaattgtgattatgccttgcaaatgtgccccaagtcgacaactggttcaagtgtggcttcaagccaaagaagaatacgaacgttccaagaaactgcctaaaaccaagccaactggagttgtaaaatctgctgagaactttagctcttcagttaacccagatgacaaacctgtagtgcctccaaaaatggatgtaagtccatgtatactccccactacagcacataccaaggaggatgttgataattctcagattgctttacaagcaccaaccacgggatgtagtcaaactgcaagtgaaagtcagatgctgccaccagttgcctctgcaagtgatcccgaaaaagatgaagatgatgatgataactattacattagttatagctcccctgattctccagtaattcccccttggcaacaaccaatatccccagattccaaagcattaaatggagatgatagaccctcatcaccagtagaggagctgccttcattggcttttgagaacttcttaaagccaataaaagatggtatacaaaaaagcccctgcagtgagcctcaagagcctctagtgatatctccaattaatactagggcaagaactgggaaatgtgaatcactttgctttcatagtacaccaatcatacagagaaaacttctggaaaggcttcctgaagcacctggccttagcccattatcaacagaaccaaaaacacagaagttgagtaataagaaaggaagtaatactgacactcttagaagagtactgttaacacaagcaaagaatcaatttgcagcagtaaataccccacagaaagaaacttctcagattgatggaccatctttaaacaatacttacggtttcaaagtcagcatacaaaacttacaggaggcaaaagctttacatgagatacaaaatcttaccctaatcagtgtggagttgcatgctcgaactagacgagacttagaaccggatcctgaatttgacccaatctgtgctctgttctactgcatctcatctgacactccactgccagatacagaaaaaacagaactcacaggtgtaatagtgattgataaagacaagacagttttcagtcaagatatcagatatcagactccattacttattagatctggaattacaggactcgaagtcacctatgctgctgatgagaaggcactttttcatgaaattgcaaatataataaagaggtattgttttgtatatctgatttttccagttttattcagagagtcgtttcatgctattgcagataatagtgaagataaaagtaaaggtaggaagaaagcgaatcccttcctatgacccttgaaagcagagttactcttgggaagattttatactcacttcccaccaccatcactattttcatcagacaagggataggaaaagcagtgttctgttctcaagattgaggggccagtgaaagacaaatatttgtttagcctctaactaacttcccagttgtacttgaggttggtttttctgtggtgctgaaataatggagaactgtataaagttccattgtattattcattaactaggtttctaccttgggagccagccaccatttcagtacctttttttggtttgttttttcttttttaaagtttt

SEQ ID NO: 423198 - DNA, 9659 bp, Homo sapiens
  misc_feature (537)..(537): n is a, c, g, or t
tggttctcccagcatggtgtttgaactctgagaacggacaggctgcctcctcaagtgggtccctgacccccatgtagcctaactgggagacatctgcagtaggggccaacagacacctcatacaggtgggtgcccctctgggatgaagcttccagaagaaggatcaggcagcaatatttgctgttctgcaggctccgctggtgatacccaggcaaacagggtctggagtggacctccagcaaactccaacagtcctgcagctgacggaccttgtgaaaaaccgtctcagcggctgcccccgcctcctctgctggatgtgaaatggcggtcggcgagtggtttgcgtccgtgacatcatcatcatggcaacaagagctgcagcctgggaccgaggagcccgtgtgattcccggcggtggcggcagtggcggcagcaccagcaccgacgaaagcttcgagggcttctctccttgcggccccttgccgggtgctcctgaggaggcggcggcagcagcgcctacaccgccccgcccgccgntcctcgaggtgcctctgtgtgaggggagggggccgtgccgagaaggggagggggcgccgccgccgctgcggagggagccgccgccgctgctgctgccgctgccgggtcgccagtgaagggaggcagtggcggcggcggcgaacatgttttcagtaaggatagtgactgcagactactacatggccagcccgctgcaggggctggatacctgccaatcccccctcacccaggcccctgtcaagaaggtgccggtggtgcgagtcttcggagcgaccccggcagaataaaacccaagacaagccacataaaagcaacctaaaaattaaactgtcatcatattatttgttttaaaactatggaataatatatctgaggaagatttctctcaaaattgtttttctcaatttcaaattccgggtgtacctgtgcaggtttattacaaaggtatattgcataatgctgaggtttgaagtacgactgaacccgtcacctaggaagtgagcatagtactcaataggtcagaagacatgtcttcatctacatggcatctttccttacctctatgtgccatacgatggttatggacagcagccagaaagctatctttctcagatggcattcagtatcgacagagcacttaatgtggctttaggcaatccatcttccactgctcagcatgtgttcaaagtgtcattagtatcaggaatgcctttttatggttatcatgagaaggaaagacactttatgaagatctatctttacaatcctacaatggtgaaaaggatatgtgaacttttgcaaagcggagccataatgaataaattttaccagcctcatgaagcgcatattccctacctcctacagctcttcattgactacaatctttatggcatgaatttaataaatctggctgctgtcaagttccgaaaagcaagaaggaaaagtaatacattgcatgcaactggatcctgcaagaatcatttatcaggaaattctcttgctgatactttatttcggtgggaacaagatgaaataccaagctctttaatattggaaggtgttgaaccacagagtacatgtgaattagaagtggatgctgtagctgctgatatcttaaatcgtctggacattgaagctcaaattggtggaaaccctggtctacaggccatatgggaagatgaaaagcaacggcgaagaaacagaaatgaaacttctcaaatgagccaacctgagtcacaagatcacaggtttgtgccagcaacagaaagtgaaaaaaaatttcagaagagacttcaggaaattctcaaacagaatgatttctctgtaacattatcaggatctgtggactacagcgatggatcccaggagttctctgctgagttaacattgcactctgaggttctgtctcctgaaatgcttcagtgtacaccagccaatatggtagaagttcacaaagacaaagagtcaagcaaaggtcacactagacacaaagtggaagaagctcttattaatgaagaagcaattttgaaccttatggaaaatagtcagacttttcagcctttgacccaaagactgagtgagtcacctgttttcatggacagtagtcctgatgaggctctggtacatcttcttgctggtttggaaagtgatggatatcggggggaaagaaataggatgccatcaccatgtcgctcctttggaaataataaatatccacaaaatagtgatgatgaagaaaatgaaccacagattgaaaaagaggaaatggagcttagtttggtgatgtcccagagatgggacagcaatattgaagaacattgtgccaaaaagagatcactgtgcagaaatacccacagaagttcaactgaagatgatgactcatcttcaggagaagaaatggaatggagtgataacagtttgcttctagccagtctttctatacctcagttagatggaactgcagatgaaaatagtgacaatccattgaacaatgaaaattctagaacccactcttctgtaattgcaacaagcaagctttcagttaaaccctccatctttcacaaagatgctgctacattagaaccctcatcttctgctaagattacctttcagtgtaaacacacaagtgccctttcttcccatgttttgaacaaggaagatttaattgaagacctttcacagacaaacaaaaatacagaaaaaggtctagataactcagtcacttcttttacaaacgaaagcacttattctatgaaataccctggatctttaagcagtactgttcattcagaaaattctcataaagagaatagtaagaaagagatcctcccagtatcttcctgtgaaagtagtatttttgattatgaagaagatattccatctgttacaagacaagtaccaagtagaaaatatacaaacattagaaaaatcgaaaaggattccccttttatacatatgcaccgtcaccctaacgagaatacattgggcaaaaattctttcaacttttctgacttaaatcattcaaaaaataaagtatcctctgaaggaaatgaaaaaggaaacagcacagctctgagtagtttattcccttcatcatttactgaaaattgtgaattactgtcatgctcaggggagaatagaactatggtgcattctcttaatagcactgctgatgaaagtggactaaataaacttaaaattaggtatgaagaatttcaagaacataaaacagaaaagccaagcctcagccagcaagcagcacactatatgttttttcccagtgttgttctttctaactgtcttactagaccacagaaactatctcctgtcacatataaattacaacctggcaataaaccatcccggttaaaattgaataaaaggaaacttgcaggtcatcaggagacttctaccaaaagtagtgagactggatccacaaaagataattttatacaaaataatccttgtaatagtaatcctgagaaggataatgcattggctagtgatttaactaaaaccactcgtggagcttttgaaaataaaacacccacagatggttttatagactgtcactttggagatggaacgttagaaactgagcagtcctttggactatatggaaataaatacacacttagagccaaacgcaaggtaaattatgagactgaagacagtgagtcaagttttgtaactcacaactcaaaaattagtctacctcatcccatggaaattggtgaaagtttagatggaactctcaaatcccgaaaacgaagaaaaatgtctaaaaagctgccccctgtcatcataaagtatattattattaatagatttagagggagaaaaaatatgcttgtgaagctaggaaaaatagactctaaagaaaaacaagtaatattaacagaagaaaaaatggaactatataaaaagcttgcacctttgaaggacttttggccaaaagttcccgactcccctgcaaccaaatatcccatttatccactaacaccaaagaaaagtcacagaagaaagtcaaaacataaatctgctaagaaaaaaactggtaaacaacaaaggacaaataatgaaaatattaaaagaactttgtctttcaggaaaaaacggtcacatgctattctttctcctccctcaccatcttacaatgctgaaaccgaagattgtgacttgaattatagtgatgttatgtctaaactaggttttctttctgagagaagcacaagtcccataaattcttctccacctcgctgctggtctcccacagatccaagagctgaagaaatcatggctgctgcagaaaaagaggcaatgctttttaagggtcctaatgtatataagaagactgttaattctcgtataggaaaaactagtcgcgcaagagcacagattaagaaatcaaaagcaaagcttgctaatccctctatagttactaagaaaaggaacaaacgaaatcagacaaataaactagtagatgatggaaaaaagaaaccaagagcaaaacaaaaaacaaatgagaaaggtacatcgagaaagcatataacacttaaggatgaaaaaataaaatctcagtctggtgctgaggttaagtttgtactgaaacaccagaatgtgtctgaatttgcaagtagttctggaggctctcaactactttttaaacagaaagatatgccactaatgggctctgctgtagatcatcccctttctgcttccctacccactggaattaatgcacaacagaagttatctggctgcttttcttctttcttagaaagcaagaagtctgtagatttgcagacattccccagttcacgagatgatttgcatccatcagttgtttgtaattctataggacctggagtctcaaaaattaatgttcaaaggcctcataatcaaagtgctatgtttactctaaaggaatcaacgttaattcaaaaaaatatatttgacctttccaatcatttatctcaggtagcacagaatacacagatatcttctggtatgtcctcaaagatagaagataatgcaaataatatacaaagaaactatttgtcatcaatcggaaagttaagtgaatatcgcaattccctagaatcaaagctggaccaagcatatacccctaattttttgcattgcaaagacagtcagcagcagattgtgtgcatagcggaacagtcaaagcacagtgaaacttgttctccgggaaatacagcttcagaggaaagccaaatgcctaataattgctttgtaacttccttgagaagtccaatcaaacaaatagcatgggagcaaaagcaaaggggctttattttagatatgtcaaattttaaacctgaaagagtaaaaccgaggtcattatcagaagcaatttcacaaaccaaagcactttctcagtgtaaaaatcgaaatgtgtcaacaccttcagcatttggtgaaggacagtctggactggcagttctaaaagaattgttacaaaaaagacagcagaaagcacaaaatgcaaatactacacaagacccattatccaataaacatcaaccaaataaaaatatttctggttcccttgagcataacaaagcaaataaacggacacgatcggtaacgtccccaagaaaacctcgaactcccagaagtacaaaacaaaaagaaaaaatccccaaacttctcaaagtagactctttaaatttacaaaactctagccagttggataactctgtatcagatgatagtcccatctttttttcagatccaggctttgaaagttgttactcacttgaagatagtttatctcctgaacataattataattttgatattaacacaataggtcagactggattttgtagcttttattctggaagtcagtttgtcccagctgatcagaatttgcctcagaagttcctaagtgatgctgttcaggatctttttccaggacaagctatagaaaaaaatgagtttttaagtcatgacaaccagaaatgtgatgaagacaagcatcataccacagactcagcctcatggattagatctggtactttaagtcctgaaatttttgagaagtcaaccatagatagcaatgagaatcgtcgccacaaccagtggaaaaatagctttcatcctctaacaactcggtctaactcaataatggattctttctgtgttcagcaggcagaagactgtctaagtgaaaaatctagattgaataggagttcagtaagcaaagaagtgtttcttagcctcccacagccaaacaattcagactggattcaaggtcacaccagaaaagaaatgggacagtctcttgactcagccaatacctcttttactgcaatactctcctcccctgatggtgaacttgtagacgtggcctgtgaagatttagaactgtatgtttcaagaaacaatgatatgttgacaccaactcctgatagttcaccaagatctactagctctccttcacaatctaaaaatggcagcttcacccctcgaactgctaacattctgaaaccacttatgtcccccccaagtagggaagaaattatggcaactttgttggatcatgacctgtctgagactatttaccaggaaccattttgcagtaatccttctgatgtaccagaaaagcccagggagattggtggacggctcctcatggtagaaactcgacttgcaaatgatctggctgagtttgagggagacttttccttggaaggacttcgtctttggaaaacagcattctcagcaatgactcagaatccaaggccagggtcaccccttcgcagtggccaaggagttgtcaataaagggtcaagtaatagccctaagatggttgaagataaaaaaattgtgattatgccttgcaaatgtgccccaagtcgacaactggttcaagtgtggcttcaagccaaagaagaatacgaacgttccaagaaactgcctaaaaccaagccaactggagttgtaaaatctgctgagaactttagctcttcagttaacccagatgacaaacctgtagtgcctccaaaaatggatgtaagtccatgtatactccccactacagcacataccaaggaggatgttgataattctcagattgctttacaagcaccaaccacgggatgtagtcaaactgcaagtgaaagtcagatgctgccaccagttgcctctgcaagtgatcccgaaaaagatgaagatgatgatgataactattacattagttatagctcccctgattctccagtaattcccccttggcaacaaccaatatccccagattccaaagcattaaatggagatgatagaccctcatcaccagtagaggagctgccttcattggcttttgagaacttcttaaagccaataaaagatggtatacaaaaaagcccctgcagtgagcctcaagagcctctagtgatatctccaattaatactagggcaagaactgggaaatgtgaatcactttgctttcatagtacaccaatcatacagagaaaacttctggaaaggcttcctgaagcacctggccttagcccattatcaacagaaccaaaaacacagaagttgagtaataagaaaggaagtaatactgacactcttagaagagtactgttaacacaagcaaagaatcaatttgcagcagtaaataccccacagaaagaaacttctcagattgatggaccatctttaaacaatacttacggtttcaaagtcagcatacaaaacttacaggaggcaaaagctttacatgagatacaaaatcttaccctaatcagtgtggagttgcatgctcgaactagacgagacttagaaccggatcctgaatttgacccaatctgtgctctgttctactgcatctcatctgacactccactgccagatacagaaaaaacagaactcacaggtgtaatagtgattgataaagacaagacagttttcagtcaagatatcagatatcagactccattacttattagatctggaattacaggactcgaagtcacctatgctgctgatgagaaggcactttttcatgaaattgcaaatataataaagaggtatgatcctgatattctgctaggatatgagattcagatgcattcctggggttacctcttacaaagggctgccgctttaagtattgacttatgtcggatgatctctcgggtgccagatgacaaaattgagaacagatttgcagctgaaagagatgagtatggatcatatacaatgagtgagataaatattgttggccgaattacactaaatctttggagaatcatgagaaatgaggtggctctaactaactacacctttgaaaatgtgagctttcatgttcttcatcagcgttttcccctctttacctttcgagtcttgtcagactggtttgataacaagacagatctatacagatggaaaatggttgatcattatgttagccgtgtccgtggaaatctccaaatgttagaacagctggacctgattgggaaaaccagtgagatggctagactttttggcattcagtttttacatgtactgacaaggggttcacagtaccgtgtggaatcaatgatgttgcgtattgctaaaccaatgaactatattcctgtgacacctagtgttcagcaaagatcccagatgagagccccacagtgtgttcctctaattatggagcctgaatcccgcttctatagcaactctgttctcgttttggatttccaatcactttatccttctattgtgattgcatataactactgcttttccacctgccttggccatgtggagaacttgggaaagtatgatgagttcaaatttggctgtacctctctgagagtacctccagatttactttaccaagttaggcatgatatcacagtgtcccccaatggagtagcttttgtcaagccttcagtaagaaaaggtgtactaccaagaatgcttgaagaaattttgaagactagatttatggtgaagcagtcaatgaaggcttacaagcaagacagagccctgtcacgaatgcttgatgcgcgtcagttgggacttaagctgatagcaaatgtcacatttggctatacatctgctaatttttctgggagaatgccatgcattgaggttggcgatagtattgttcacaaagccagagagaccttggaacgagctattaaactggtgaatgataccaagaaatggggggctagggttgtatatggcgatactgacaggtaatgggtttttggttttgtagttgtcttttgcatctctctagatcttcatttcagtgtttaaaatggcttaagggaatcttttctaaaaacagagttctgtctgagtcctttccagtccttacgatctcatgatcagagttaacacagatcctgatttaccagataggatcgtaagagacagtttgtgtcctgagccacaaactgaagatacctatggcttccctccaggtagctctaagccaagtagatagtgatctgtaaactaactgtgtacacaggagtctagtttatttaaagaaactacttttaatgtgaataattcctctaatatagctgtaactctctgaatttaagtgtatatcttaaaataaactgtttttgaaggacaat

SEQ ID NO: 423199 - DNA, 5783 bp, Homo sapiens
  misc_feature (537)..(537): n is a, c, g, or t
tggttctcccagcatggtgtttgaactctgagaacggacaggctgcctcctcaagtgggtccctgacccccatgtagcctaactgggagacatctgcagtaggggccaacagacacctcatacaggtgggtgcccctctgggatgaagcttccagaagaaggatcaggcagcaatatttgctgttctgcaggctccgctggtgatacccaggcaaacagggtctggagtggacctccagcaaactccaacagtcctgcagctgacggaccttgtgaaaaaccgtctcagcggctgcccccgcctcctctgctggatgtgaaatggcggtcggcgagtggtttgcgtccgtgacatcatcatcatggcaacaagagctgcagcctgggaccgaggagcccgtgtgattcccggcggtggcggcagtggcggcagcaccagcaccgacgaaagcttcgagggcttctctccttgcggccccttgccgggtgctcctgaggaggcggcggcagcagcgcctacaccgccccgcccgccgntcctcgaggtgcctctgtgtgaggggagggggccgtgccgagaaggggagggggcgccgccgccgctgcggagggagccgccgccgctgctgctgccgctgccgggtcgccagtgaagggaggcagtggcggcggcggcgaacatgttttcagtaaggatagtgactgcagactactacatggccagcccgctgcaggggctggatacctgccaatcccccctcacccaggcccctgtcaagaaggtgccggtggtgcgagtcttcggagcgaccccggcagaataaaacccaagacaagccacataaaagcaacctaaaaattaaactgtcatcatattatttgttttaaaactatggaataatatatctgaggaagatttctctcaaaattgtttttctcaatttcaaattccgggtgtacctgtgcaggtttattacaaaggtatattgcataatgctgaggtttgaagtacgactgaacccgtcacctaggaagtgagcatagtactcaataggtcagaagacatgtcttcatctacatggcatctttccttacctctatgtgccatacgatggttatggacagcagccagaaagctatctttctcagatggcattcagtatcgacagagcacttaatgtggctttaggcaatccatcttccactgctcagcatgtgttcaaagtgtcattagtatcaggaatgcctttttatggttatcatgagaaggaaagacactttatgaagatctatctttacaatcctacaatggtgaaaaggatatgtgaacttttgcaaagcggagccataatgaataaattttaccagcctcatgaagcgcatattccctacctcctacagctcttcattgactacaatctttatggcatgaatttaataaatctggctgctgtcaagttccgaaaagcaagaaggaaaagtaatacattgcatgcaactggatcctgcaagaatcatttatcaggaaattctcttgctgatactttatttcggtgggaacaagatgaaataccaagctctttaatattggaaggtgttgaaccacagagtacatgtgaattagaagtggatgctgtagctgctgatatcttaaatcgtctggacattgaagctcaaattggtggaaaccctggtctacaggccatatgggaagatgaaaagcaacggcgaagaaacagaaatgaaacttctcaaatgagccaacctgagtcacaagatcacaggtttgtgccagcaacagaaagtgaaaaaaaatttcagaagagacttcaggaaattctcaaacagaatgatttctctgtaacattatcaggatctgtggactacagcgatggatcccaggagttctctgctgagttaacattgcactctgaggttctgtctcctgaaatgcttcagtgtacaccagccaatatggtagaagttcacaaagacaaagagtcaagcaaaggtcacactagacacaaagtggaagaagctcttattaatgaagaagcaattttgaaccttatggaaaatagtcagacttttcagcctttgacccaaagactgagtgagtcacctgttttcatggacagtagtcctgatgaggctctggtacatcttcttgctggtttggaaagtgatggatatcggggggaaagaaataggatgccatcaccatgtcgctcctttggaaataataaatatccacaaaatagtgatgatgaagaaaatgaaccacagattgaaaaagaggaaatggagcttagtttggtgatgtcccagagatgggacagcaatattgaagaacattgtgccaaaaagagatcactgtgcagaaatacccacagaagttcaactgaagatgatgactcatcttcaggagaagaaatggaatggagtgataacagtttgcttctagccagtctttctatacctcagttagatggaactgcagatgaaaatagtgacaatccattgaacaatgaaaattctagaacccactcttctgtaattgcaacaagcaagctttcagttaaaccctccatctttcacaaagatgctgctacattagaaccctcatcttctgctaagattacctttcagtgtaaacacacaagtgccctttcttcccatgttttgaacaaggaagatttaattgaagacctttcacagacaaacaaaaatacagaaaaaggtctagataactcagtcacttcttttacaaacgaaagcacttattctatgaaataccctggatctttaagcagtactgttcattcagaaaattctcataaagagaatagtaagaaagagatcctcccagtatcttcctgtgaaagtagtatttttgattatgaagaagatattccatctgttacaagacaagtaccaagtagaaaatatacaaacattagaaaaatcgaaaaggattccccttttatacatatgcaccgtcaccctaacgagaatacattgggcaaaaattctttcaacttttctgacttaaatcattcaaaaaataaagtatcctctgaaggaaatgaaaaaggaaacagcacagctctgagtagtttattcccttcatcatttactgaaaattgtgaattactgtcatgctcaggggagaatagaactatggtgcattctcttaatagcactgctgatgaaagtggactaaataaacttaaaattaggtatgaagaatttcaagaacataaaacagaaaagccaagcctcagccagcaagcagcacactatatgttttttcccagtgttgttctttctaactgtcttactagaccacagaaactatctcctgtcacatataaattacaacctggcaataaaccatcccggttaaaattgaataaaaggaaacttgcaggtcatcaggagacttctaccaaaagtagtgagactggatccacaaaagataattttatacaaaataatccttgtaatagtaatcctgagaaggataatgcattggctagtgatttaactaaaaccactcgtggagcttttgaaaataaaacacccacagatggttttatagactgtcactttggagatggaacgttagaaactgagcagtcctttggactatatggaaataaatacacacttagagccaaacgcaaggtaaattatgagactgaagacagtgagtcaagttttgtaactcacaactcaaaaattagtctacctcatcccatggaaattggtgaaagtttagatggaactctcaaatcccgaaaacgaagaaaaatgtctaaaaagctgccccctgtcatcataaagtatattattattaatagatttagagggagaaaaaatatgcttgtgaagctaggaaaaatagactctaaagaaaaacaagtaatattaacagaagaaaaaatggaactatataaaaagcttgcacctttgaaggacttttggccaaaagttcccgactcccctgcaaccaaatatcccatttatccactaacaccaaagaaaagtcacagaagaaagtcaaaacataaatctgctaagaaaaaaactggtaaacaacaaaggacaaataatgaaaatattaaaagaactttgtctttcaggaaaaaacggtcacatgctattctttctcctccctcaccatcttacaatgctgaaaccgaagattgtgacttgaattatagtgatgttatgtctaaactaggttttctttctgagagaagcacaagtcccataaattcttctccacctcgctgctggtctcccacagatccaagagctgaagaaatcatggctgctgcagaaaaagaggcaatgctttttaagggtcctaatgtatataagaagactgttaattctcgtataggaaaaactagtcgcgcaagagcacagattaagaaatcaaaagcaaagcttgctaatccctctatagttactaagaaaaggaacaaacgaaatcagacaaataaactagtagatgatggaaaaaagaaaccaagagcaaaacaaaaaacaaatgagaaaggtacatcgagaaagcatataacacttaaggatgaaaaaataaaatctcagtctggtgctgaggttaagtttgtactgaaacaccagaatgtgtctgaatttgcaagtagttctggaggctctcaactactttttaaacagaaagatatgccactaatgggctctgctgtagatcatcccctttctgcttccctacccactggaattaatgcacaacagaagttatctggctgcttttcttctttcttagaaagcaagaagtctgtagatttgcagacattccccagttcacgagatgatttgcatccatcagttgtttgtaattctataggacctggagtctcaaaaattaatgttcaaaggcctcataatcaaagtgctatgtttactctaaaggaatcaacgttaattcaaaaaaatatatttgacctttccaatcatttatctcaggtagcacagaatacacagatatcttctggtatgtcctcaaagatagaagataatgcaaataatatacaaagaaactatttgtcatcaatcggaaagttaagtgaatatcgcaattccctagaatcaaagctggaccaagcatatacccctaattttttgcattgcaaagacagtcagcagcagattgtgtgcatagcggaacagtcaaagcacagtgaaacttgttctccgggaaatacagcttcagaggaaagccaaatgcctaataattgctttgtaacttccttgagaagtccaatcaaacaaatagcatgggagcaaaagcaaaggggctttattttagatatgtcaaattttaaacctgaaagagtaaaaccgaggtcattatcagaagcaatttcacaaaccaaagcactttctcagtgtaaaaatcgaaatgtgtcaacaccttcagcatttggtgaaggacagtctggactggcagttctaaaagaattgttacaaaaaagacagcagaaagcacaaaatgcaaatactacacaagacccattatccaataaacatcaaccaaataaaaatatttctggttcccttgagcataacaaagcaaataaacggacacgatcggtaacgtccccaagaaaaccagaaatatttttagattgtgaaggagagctagtagatcttggtgaactatcaggagttggtgtcaacatatcattgtttcttgaaacatacagttctaaatcttcacaggccacgtctac

SEQ ID NO: 423200 - DNA, 1520 bp, Homo sapiens
  misc_feature (537)..(537): n is a, c, g, or t
tggttctcccagcatggtgtttgaactctgagaacggacaggctgcctcctcaagtgggtccctgacccccatgtagcctaactgggagacatctgcagtaggggccaacagacacctcatacaggtgggtgcccctctgggatgaagcttccagaagaaggatcaggcagcaatatttgctgttctgcaggctccgctggtgatacccaggcaaacagggtctggagtggacctccagcaaactccaacagtcctgcagctgacggaccttgtgaaaaaccgtctcagcggctgcccccgcctcctctgctggatgtgaaatggcggtcggcgagtggtttgcgtccgtgacatcatcatcatggcaacaagagctgcagcctgggaccgaggagcccgtgtgattcccggcggtggcggcagtggcggcagcaccagcaccgacgaaagcttcgagggcttctctccttgcggccccttgccgggtgctcctgaggaggcggcggcagcagcgcctacaccgccccgcccgccgntcctcgaggtgcctctgtgtgaggggagggggccgtgccgagaaggggagggggcgccgccgccgctgcggagggagccgccgccgctgctgctgccgctgccgggtcgccagtgaagggaggcagtggcggcggcggcgaacatgttttcagtaaggatagtgactgcagactactacatggccagcccgctgcaggggctggatacctgccaatcccccctcacccaggcccctgtcaagaaggtgccggtggtgcgagtcttcggagcgaccccggcagaataaaacccaagacaagccacataaaagcaacctaaaaattaaactgtcatcatattatttgttttaaaactatggaataatatatctgaggaagatttctctcaaaattgtttttctcaatttcaaattccgggtgtacctgtgcaggtttattacaaaggtatattgcataatgctgaggtttgaagtacgactgaacccgtcacctaggaagtgagcatagtactcaataggtcagaagacatgtcttcatctacatggcatctttccttacctctatgtgccatacgatggttatggacagcagccagaaagctatctttctcagatggcattcagtatcgacagagcacttaatgtggctttaggcaatccatcttccactgctcagcatgtgttcaaagtgtcattagtatcaggaatgcctttttatggttatcatgagaaggaaagacactttatgaagatctatctttacaatcctacaatggtgaaaaggatatgtgaacttttgcaaagcggagccataatgaataaattttaccagcctcatgaagcgcatattccctacctcctacagctcttcattgactacaatctttatggcatgaatttaataaatctggctgctgtcaagttccgaaaagcaagaaggaaaagtaaggttaattttcagtcaaattaaatttttgtcaaatt

SEQ ID NO: 423201 - DNA, 182 bp, Homo sapiens
gctatttacattttttaatgcacttttaaaattcaaagatcacaggtttgtgccagcaacagaaagtgaaaaaaaatttcagaagagacttcaggaaattctcaaacagaatgatttctctgtgtaagtggttatttattatagatctcagaactaattttattcctttgttatgtagtctg

SEQ ID NO: 423202 - DNA, 808 bp, Homo sapiens
ctggtaaataaaaaaacaatacatgaaatcgtgtctggtttcttgtacctagaggctttgactattaaaaaaaaaaaacttaacgtgttttatgttgcttatcacatgacaaatgttaatttgcatgtcattccacatggttttccttaaactacatgatattctatttttagaaatagcaagctctctaaagtctcaaataactttcaatttttaataattttattatcccatcattgtaagtaacagattatttaggtaggttagcaggttacccagtagttacataattgaaagtgtaataacaatggtgaaacatactaggagatattttatctttacttgcatatcttttttgttttaagatacttgagcgttctctaaagctgctatttgaaacgagagatataagtctaattaaacagtatgttcagcgacaatgtatgaagcttctggaaggaaaggccagcatacaagactttatctttgccaaggaatacagaggaagtttttcttataaaccaggagcttgtgtgccagcccttgaacttacaaggtaatgataccctcagtaccttgccaggatagtcctgagattctgcacaggtctagaagacccaaatgaaaagacagtccatagacacagacacaaaattgtttctttacctgcgcacatgaagcctcactgaaagttagtgaatattccctcatacttcgtaagatgtgaagaggaaatcctcttttgggctttccttcagaaacttatgcaaagaaattgtgacacagtccttgattcatttgtttttcc

SEQ ID NO: 423203 - DNA, 339 bp, Homo sapiens
gactgtcttgaatgccaagctaaagtgtttatactttattcagtaaataaacaaaactggtagcgcaagaaaaggagtgagcaagtggtaacaacttaaagacaattcattttgctcccacgtgttatatcatgaatttgttgggcccaaagtcatatatagaattttttaaataattgatacttgattaaagaaagcacaaagacataaaaataaaacattcttggtggggggaaatggtttttaagaggcattttattaattttaccacaggtatatttgccctgtgttttacaaacaaaaaagaggtatgtgggttacatgtatgaaacactggat

SEQ ID NO: 423204 - DNA, 622 bp, Homo sapiens
tgaatgataaattcattgtttttattcatatgtggtaataatggaaaatttattttaagattaggagaggaaaggaatctgaaaagtttgtgtcatctccttgaaggacagaaggcttcatggggcattaaaataaaacaaaaaataccttctctccctaagattaatggtaccttccaaaggaaattaagtagtagtcatatacctgtgaggaaaagcatattgagactaaagatagaatgtacctgcacaatatagagggggcagggaagatagacatggacatttttgagactccaaaagggactttatctaggatatggagttaaatattttggtaattgctctttgaaacaaaacagttgttctaaaatatgttattatagggagattggtggacggctcctcatggtagaaactcgacttgcaaatgatctggctgagtttgagggagacttttccttggaaggacttcgtctttggaaaacagcattctcagcaatgactcagaatccaaggccagggtcaccccttcgcagtggccaaggagttgtcaataaagggtcaagtaatagccctaagatggttgaagataaaaaaattgtgattatgccttgcaaat

SEQ ID NO: 423205 - DNA, 519 bp, Homo sapiens
ctaatactatggtcactctgttgttagcatgtttcaattcctgacagttggccattattatgttttatgcttccttcttaattatgtaaatctataatgtttgaggggttttaaacattttttttctttatgatagccttcagtaagaaaaggtgtactaccaagaatgcttgaagaaattttgaagactagatttatggtgaagcagtcaatgaaggcttacaagcaagacagagccctgtcacgaatgcttgatgcgcgtcagttgggacttaagctgatagcaaatgtcacatttggctatacatctgctaatttttctgggagaatgccatgcattgaggtaagtgatacaaatctgtagttttttcaaaagagactaaaatacagtgaggcacggtggcactcacctgtattcccagttactttggaagctaagatgtggtgcgggggtcttcagcccagagttgaatcctgcctggacaacatagtgagacctcatctcttttttaaaagaaa

SEQ ID NO: 423206 - DNA, 2514 bp, Homo sapiens
  misc_feature (253)..(253): n is a, c, g, or t
tcttgactactgggatatctgagctgatctgtgtgttagaaatattggatgtcttaaaagatttgtaacaagatataagtacataaggaaagtaataaaacaggagagcttacatagaaagcatcttaaagagtaaataggagaaagggagttttctttggcattagacaagagtcatagccaggaaagttactcttgataaaatttttgttataatgacttcctcattaccttactttatttttaatccccntagtatgtttgtgctactgaaaggagccactaaggagcagtcttttaagattggtcaggaaattgccgaagctgtaactgctaccaatcctaaaccagtgaaattgaagtttgaaaaggtatatttgccctgtgttttacaaacaaaaaagaggtatgtgggttacatgtatgaaacactggatcagaaggacccagtatttgatgcaaaaggaatagaaacagtcagaagagattcctgccctgctgtttctaagatacttgagcgttctctaaagctgctatttgaaacgagagatataagtctaattaaacagtatgttcagcgacaatgtatgaagcttctggaaggaaaggccagcatacaagactttatctttgccaaggaatacagaggaagtttttcttataaaccaggagcttgtgtgccagcccttgaacttacaaggaaaatgctgacttatgaccggcgctctgagcctcaggttggggagcgagtgccatacgtcatcatttatgggacccccggagtaccacttatccagcttgtaaggcgcccagtggaagtcctgcaggacccaactctgagactgaatgctacttactatattaccaagcaaatccttccacccttggcaagaatcttctcacttattggtattgatgtcttcagctggtatcatgaattaccaaggggatttattgcggcactattcacaatagcaaagacttggaaccaacccaaatgtccatcaatgatagactggattaagaaaatgtggcacatatacaccatggaatactatgcagccataaaaaaggatgagttcatgtcctttgcagggacatggatgaagctggaaaccatcattctcagcaaactatcacaaggacagaaaaccaaacaccgcctgttctcactcatagatccataaagctaccagctcctcgcgaagtgaacctgaagggcggaaaggcactatttcacaatattttactaccttacactgtcctgtgtgtgatgacctaactcagcatggcatctgtagtaaatgtcggagccaacctcagcatgttgcagtcatcctcaaccaagaaatccgggagttggaacgtcaacaggagcaacttgtaaagatatgcaagaactgtacaggttgctttgatcgacacatcccatgtgtttctctgaactgcccagtacttttcaaactctcccgagtaaatagagaattgtccaaggcaccatatctccggcagttattagaccagttttaaattgtcaatatcacagtattacaggtgctatttttttcagtgcttaccactaaactgttgtgcatggtgctttttaactttcatcgagtcaaggatgttcactgtctgttatctgaagactatgaagacttctatgctaaccgaattaaaatgtacttgttgatctctgaatagctcacttcttacaatgtacaaattcctcattctgtcaccttttaaacattgttttataatgcaggtgttggatttgctccagtatgtgtaccatcttgtaaattcatttgagtagatcatgtttacttcccagtggaaggagcactgaaaacctcttaaagaaaaagcatttgtgtgttttccttgaactgtctgtatcaagacgtgttacttcgagatatccattcactttataattttgactgcaaaatattttgtaaatacacttttttacttttcaaacgagtaaaataatgtgcaatgatttttatacaaatgattttcaagttgtttggtatatttcctctaggttttgcttgactcaaagtagatcgttattttgatcaaactgtgcaaacagtagtaccacgtgtagcattttgaaacattattttttaaaaaatgctgtcttgctttagctattaatggggcattgtgaggaactgtgcaaagacatttttgttacaaacctgtgggcctgttgcaatactttaaaaataaaaaattttattccatttgcttgttttgtatagacatttctattgcttctaaatatacttaaaatattttctttccttatgtactgtacagttaatcttatttgccatcatcttgaacacaaaatgtgtatttagaatatttgtataactgtgtaaaataaaaaaggaattatgtggtcagtgcattgttttttaaactggaaatcattttgttttaaaagttaataatggaaaccatattaaaattgaataaaatataaaataatataac

SEQ ID NO: 423207 - DNA, 11111 bp, Homo sapiens
  misc_feature (317)..(317): n is a, c, g, or t
gcacgagactgcgctcgcctccctcctcacgcgggcgggattttcttgccttgtgaaaaaccgtctcagcggctgcccccgcctcctctgctggatgtgaaatggcggtcggcgagtggtttgcgtccgtgacatcatcatcatggcaacaagagctgcagcctgggaccgaggagcccgtgtgattcccggcggtggcggcagtggcggcagcaccagcaccgacgaaagcttcgagggcttctctccttgcggccccttgccgggtgctcctgaggaggcggcggcagcagcgcctacaccgccccgcccgccgntcctcgaggtgcctctgtgtgaggggagggggccgtgccgagaaggggagggggcgccgccgccgctgcggagggagccgccgccgctgctgctgccgctgccgggtcgccagtgaagggaggcagtggcggcggcggcgaacatgttttcagtaaggatagtgactgcagactactacatggccagcccgctgcaggggctggatacctgccaatcccccctcacccaggcccctgtcaagaaggtgccggtggtgcgagtcttcggagcgaccccggcagaataaaacccaagacaagccacataaaagcaacctaaaaattaaactgtcatcatattatttgttttaaaactatggaataatatatctgaggaagatttctctcaaaattgtttttctcaatttcaagtcagaagacatgtcttcatctacatggcatctttccttacctctatgtgccatacgatggttatggacagcagccagaaagctatctttctcagatggcattcagtatcgacagagcacttaatgtggctttaggcaatccatcttccactgctcagcatgtgttcaaagtgtcattagtatcaggaatgcctttttatggttatcatgagaaggaaagacactttatgaagatctatctttacaatcctacaatggtgaaaaggatatgtgaacttttgcaaagcggagccataatgaataaattttaccagcctcatgaagcgcatattccctacctcctacagctcttcattgactacaatctttatggcatgaatttaataaatctggctgctgtcaagttccgaaaagcaagaaggaaaagtaatacattgcatgcaactggatcctgcaagaatcatttatcaggaaattctcttgctgatactttatttcggtgggaacaagatgaaataccaagctctttaatattggaaggtgttgaaccacagagtacatgtgaattagaagtggatgctgtagctgctgatatcttaaatcgtctggacattgaagctcaaattggtggaaaccctggtctacaggccatatgggaagatgaaaagcaacggcgaagaaacagaaatgaaacttctcaaatgagccaacctgagtcacaagatcacaggtttgtgccagcaacagaaagtgaaaaaaaatttcagaagagacttcaggaaattctcaaacagaatgatttctctgtaacattatcaggatctgtggactacagcgatggatcccaggagttctctgctgagttaacattgcactctgaggttctgtctcctgaaatgcttcagtgtacaccagccaatatggtagaagttcacaaagacaaagagtcaagcaaaggtcacactagacacaaagtggaagaagctcttattaatgaagaagcaattttgaaccttatggaaaatagtcagacttttcagcctttgacccaaagactgagtgagtcacctgttttcatggacagtagtcctgatgaggctctggtacatcttcttgctggtttggaaagtgatggatatcggggggaaagaaataggatgccatcaccatgtcgctcctttggaaataataaatatccacaaaatagtgatgatgaagaaaatgaaccacagattgaaaaagaggaaatggagcttagtttggtgatgtcccagagatgggacagcaatattgaagaacattgtgccaaaaagagatcactgtgcagaaatacccacagaagttcaactgaagatgatgactcatcttcaggagaagaaatggaatggagtgataacagtttgcttctagccagtctttctatacctcagttagatggaactgcagatgaaaatagtgacaatccattgaacaatgaaaattctagaacccactcttctgtaattgcaacaagcaagctttcagttaaaccctccatctttcacaaagatgctgctacattagaaccctcatcttctgctaagattacctttcagtgtaaacacacaagtgccctttcttcccatgttttgaacaaggaagatttaattgaagacctttcacagacaaacaaaaatacagaaaaaggtctagataactcagtcacttcttttacaaacgaaagcacttattctatgaaataccctggatctttaagcagtactgttcattcagaaaattctcataaagagaatagtaagaaagagatcctcccagtatcttcctgtgaaagtagtatttttgattatgaagaagatattccatctgttacaagacaagtaccaagtagaaaatatacaaacattagaaaaatcgaaaaggattccccttttatacatatgcaccgtcaccctaacgagaatacattgggcaaaaattctttcaacttttctgacttaaatcattcaaaaaataaagtatcctctgaaggaaatgaaaaaggaaacagcacagctctgagtagtttattcccttcatcatttactgaaaattgtgaattactgtcatgctcaggggagaatagaactatggtgcattctcttaatagcactgctgatgaaagtggactaaataaacttaaaattaggtatgaagaatttcaagaacataaaacagaaaagccaagcctcagccagcaagcagcacactatatgttttttcccagtgttgttctttctaactgtcttactagaccacagaaactatctcctgtcacatataaattacaacctggcaataaaccatcccggttaaaattgaataaaaggaaacttgcaggtcatcaggagacttctaccaaaagtagtgagactggatccacaaaagataattttatacaaaataatccttgtaatagtaatcctgagaaggataatgcattggctagtgatttaactaaaaccactcgtggagcttttgaaaataaaacacccacagatggttttatagactgtcactttggagatggaacgttagaaactgagcagtcctttggactatatggaaataaatacacacttagagccaaacgcaaggtaaattatgagactgaagacagtgagtcaagttttgtaactcacaactcaaaaattagtctacctcatcccatggaaattggtgaaagtttagatggaactctcaaatcccgaaaacgaagaaaaatgtctaaaaagctgccccctgtcatcataaagtatattattattaatagatttagagggagaaaaaatatgcttgtgaagctaggaaaaatagactctaaagaaaaacaagtaatattaacagaagaaaaaatggaactatataaaaagcttgcacctttgaaggacttttggccaaaagttcccgactcccctgcaaccaaatatcccatttatccactaacaccaaagaaaagtcacagaagaaagtcaaaacataaatctgctaagaaaaaaactggtaaacaacaaaggacaaataatgaaaatattaaaagaactttgtctttcaggaaaaaacggtcacatgctattctttctcctccctcaccatcttacaatgctgaaaccgaagattgtgacttgaattatagtgatgttatgtctaaactaggttttctttctgagagaagcacaagtcccataaattcttctccacctcgctgctggtctcccacagatccaagagctgaagaaatcatggctgctgcagaaaaagaggcaatgctttttaagggtcctaatgtatataagaagactgttaattctcgtataggaaaaactagtcgcgcaagagcacagattaagaaatcaaaagcaaagcttgctaatccctctatagttactaagaaaaggaacaaacgaaatcagacaaataaactagtagatgatggaaaaaagaaaccaagagcaaaacaaaaaacaaatgagaaaggtacatcgagaaagcatataacacttaaggatgaaaaaataaaatctcagtctggtgctgaggttaagtttgtactgaaacaccagaatgtgtctgaatttgcaagtagttctggaggctctcaactactttttaaacagaaagatatgccactaatgggctctgctgtagatcatcccctttctgcttccctacccactggaattaatgcacaacagaagttatctggctgcttttcttctttcttagaaagcaagaagtctgtagatttgcagacattccccagttcacgagatgatttgcatccatcagttgtttgtaattctataggacctggagtctcaaaaattaatgttcaaaggcctcataatcaaagtgctatgtttactctaaaggaatcaacgttaattcaaaaaaatatatttgacctttccaatcatttatctcaggtagcacagaatacacagatatcttctggtatgtcctcaaagatagaagataatgcaaataatatacaaagaaactatttgtcatcaatcggaaagttaagtgaatatcgcaattccctagaatcaaagctggaccaagcatatacccctaattttttgcattgcaaagacagtcagcagcagattgtgtgcatagcggaacagtcaaagcacagtgaaacttgttctccgggaaatacagcttcagaggaaagccaaatgcctaataattgctttgtaacttccttgagaagtccaatcaaacaaatagcatgggagcaaaagcaaaggggctttattttagatatgtcaaattttaaacctgaaagagtaaaaccgaggtcattatcagaagcaatttcacaaaccaaagcactttctcagtgtaaaaatcgaaatgtgtcaacaccttcagcatttggtgaaggacagtctggactggcagttctaaaagaattgttacaaaaaagacagcagaaagcacaaaatgcaaatactacacaagacccattatccaataaacatcaaccaaataaaaatatttctggttcccttgagcataacaaagcaaataaacggacacgatcggtaacgtccccaagaaaacctcgaactcccagaagtacaaaacaaaaagaaaaaatccccaaacttctcaaagtagactctttaaatttacaaaactctagccagttggataactctgtatcagatgatagtcccatctttttttcagatccaggctttgaaagttgttactcacttgaagatagtttatctcctgaacataattataattttgatattaacacaataggtcagactggattttgtagcttttattctggaagtcagtttgtcccagctgatcagaatttgcctcagaagttcctaagtgatgctgttcaggatctttttccaggacaagctatagaaaaaaatgagtttttaagtcatgacaaccagaaatgtgatgaagacaagcatcataccacagactcagcctcatggattagatctggtactttaagtcctgaaatttttgagaagtcaaccatagatagcaatgagaatcgtcgccacaaccagtggaaaaatagctttcatcctctaacaactcggtctaactcaataatggattctttctgtgttcagcaggcagaagactgtctaagtgaaaaatctagattgaataggagttcagtaagcaaagaagtgtttcttagcctcccacagccaaacaattcagactggattcaaggtcacaccagaaaagaaatgggacagtctcttgactcagccaatacctcttttactgcaatactctcctcccctgatggtgaacttgtagacgtggcctgtgaagatttagaactgtatgtttcaagaaacaatgatatgttgacaccaactcctgatagttcaccaagatctactagctctccttcacaatctaaaaatggcagcttcacccctcgaactgctaacattctgaaaccacttatgtcccccccaagtagggaagaaattatggcaactttgttggatcatgacctgtctgagactatttaccaggaaccattttgcagtaatccttctgatgtaccagaaaagcccagggagattggtggacggctcctcatggtagaaactcgacttgcaaatgatctggctgagtttgagggagacttttccttggaaggacttcgtctttggaaaacagcattctcagcaatgactcagaatccaaggccagggtcaccccttcgcagtggccaaggagttgtcaataaagggtcaagtaatagccctaagatggttgaagataaaaaaattgtgattatgccttgcaaatgtgccccaagtcgacaactggttcaagtgtggcttcaagccaaagaagaatacgaacgttccaagaaactgcctaaaaccaagccaactggagttgtaaaatctgctgagaactttagctcttcagttaacccagatgacaaacctgtagtgcctccaaaaatggatgtaagtccatgtatactccccactacagcacataccaaggaggatgttgataattctcagattgctttacaagcaccaaccacgggatgtagtcaaactgcaagtgaaagtcagatgctgccaccagttgcctctgcaagtgatcccgaaaaagatgaagatgatgatgataactattacattagttatagctcccctgattctccagtaattcccccttggcaacaaccaatatccccagattccaaagcattaaatggagatgatagaccctcatcaccagtagaggagctgccttcattggcttttgagaacttcttaaagccaataaaagatggtatacaaaaaagcccctgcagtgagcctcaagagcctctagtgatatctccaattaatactagggcaagaactgggaaatgtgaatcactttgctttcatagtacaccaatcatacagagaaaacttctggaaaggcttcctgaagcacctggccttagcccattatcaacagaaccaaaaacacagaagttgagtaataagaaaggaagtaatactgacactcttagaagagtactgttaacacaagcaaagaatcaatttgcagcagtaaataccccacagaaagaaacttctcagattgatggaccatctttaaacaatacttacggtttcaaagtcagcatacaaaacttacaggaggcaaaagctttacatgagatacaaaatcttaccctaatcagtgtggagttgcatgctcgaactagacgagacttagaaccggatcctgaatttgacccaatctgtgctctgttctactgcatctcatctgacactccactgccagatacagaaaaaacagaactcacaggtgtaatagtgattgataaagacaagacagttttcagtcaagatatcagatatcagactccattacttattagatctggaattacaggactcgaagtcacctatgctgctgatgagaaggcactttttcatgaaattgcaaatataataaagaggtatgatcctgatattctgctaggatatgagattcagatgcattcctggggttacctcttacaaagggctgccgctttaagtattgacttatgtcggatgatctctcgggtgccagatgacaaaattgagaacagatttgcagctgaaagagatgagtatggatcatatacaatgagtgagataaatattgttggccgaattacactaaatctttggagaatcatgagaaatgaggtggctctaactaactacacctttgaaaatgtgagctttcatgttcttcatcagcgttttcccctctttacctttcgagtcttgtcagactggtttgataacaagacagatctatacagatggaaaatggttgatcattatgttagccgtgtccgtggaaatctccaaatgttagaacagctggacctgattgggaaaaccagtgagatggctagactttttggcattcagtttttacatgtactgacaaggggttcacagtaccgtgtggaatcaatgatgttgcgtattgctaaaccaatgaactatattcctgtgacacctagtgttcagcaaagatcccagatgagagccccacagtgtgttcctctaattatggagcctgaatcccgcttctatagcaactctgttctcgttttggatttccaatcactttatccttctattgtgattgcatataactactgcttttccacctgccttggccatgtggagaacttgggaaagtatgatgagttcaaatttggctgtacctctctgagagtacctccagatttactttaccaagttaggcatgatatcacagtgtcccccaatggagtagcttttgtcaagccttcagtaagaaaaggtgtactaccaagaatgcttgaagaaattttgaagactagatttatggtgaagcagtcaatgaaggcttacaagcaagacagagccctgtcacgaatgcttgatgcgcgtcagttgggacttaagctgatagcaaatgtcacatttggctatacatctgctaatttttctgggagaatgccatgcattgaggttggcgatagtattgttcacaaagccagagagaccttggaacgagctattaaactggtgaatgataccaagaaatggggggctagggttgtatatggcgatactgacagtatgtttgtgctactgaaaggagccactaaggagcagtcttttaagattggtcaggaaattgccgaagctgtaactgctaccaatcctaaaccagtgaaattgaagtttgaaaaggtatatttgccctgtgttttacaaacaaaaaagaggtatgtgggttacatgtatgaaacactggatcagaaggacccagtatttgatgcaaaaggaatagaaacagtcagaagagattcctgccctgctgtttctaagatacttgagcgttctctaaagctgctatttgaaacgagagatataagtctaattaaacagtatgttcagcgacaatgtatgaagcttctggaaggaaaggccagcatacaagactttatctttgccaaggaatacagaggaagtttttcttataaaccaggagcttgtgtgccagcccttgaacttacaaggaaaatgctgacttatgaccggcgctctgagcctcaggttggggagcgagtgccatacgtcatcatttatgggacccccggagtaccacttatccagcttgtaaggcgcccagtggaagtcctgcaggacccaactctgagactgaatgctacttactatattaccaagcaaatccttccacccttggcaagaatcttctcacttattggtattgatgtcttcagctggtatcatgaattaccaaggatccataaagctaccagctcctcgcgaagtgaacctgaagggcggaaaggcactatttcacaatattttactaccttacactgtcctgtgtgtgatgacctaactcagcatggcatctgtagtaaatgtcggagccaacctcagcatgttgcagtcatcctcaaccaagaaatccgggagttggaacgtcaacaggagcaacttgtaaagatatgcaagaactgtacaggttgctttgatcgacacatcccatgtgtttctctgaactgcccagtacttttcaaactctcccgagtaaatagagaattgtccaaggcaccatatctccggcagttattagaccagttttaaattgtcaatatcacagtattacaggtgctatttttttcagtgcttaccactaaactgttgtgcatggtgctttttaactttcatcgagtcaaggatgttcactgtctgttatctgaagactatgaagacttctatgctaaccgaattaaaatgtacttgttgatctctgaatagctcacttcttacaatgtacaaattcctcattctgtcaccttttaaacattgttttataatgcaggtgttggatttgctccagtatgtgtaccatcttgtaaattcatttgagtagatcatgtttacttcccagtggaaggagcactgaaaacctcttaaagaaaaagcatttgtgtgttttccttgaactgtctgtatcaagacgtgttacttcgagatatccattcactttataattttgactgcaaaatattttgtaaatacacttttttacttttcaaacgagtaaaataatgtgcaatgatttttatacaaatgattttcaagttgtttggtatatttcctctaggttttgcttgactcaaagtagatcgttattttgatcaaactgtgcaaacagtagtaccacgtgtagcattttgaaacattattttttaaaaaatgctgtcttgctttagctattaatggggcattgtgaggaactgtgcaaagacatttttgttacaaacctgtgggcctgttgcaatactttaaaaataaaaaattttattccatttgcttgttttgtatagacatttctattgcttctaaatatacttaaaatattttctttccttatgtactgtacagttaatcttatttgccatcatcttgaacacaaaatgtgtatttagaatatttgtataactgtgtaaaataaaaaaggaattatgtggtcagtgcattgttttttaaactggaaatcattttgttttaaaagttaataatggaaaccatattaaaattgaataaaatataaaataatataacagtgtgacttcatcttttttataagcctgtattggttacatctttcttaccctacccttttctgagttttaatgaagtaaattatttaacatatttttatatcctgtttgatattgcaatttccttaccaaaacttcttcagggtt

SEQ ID NO: 423208 - DNA, 11292 bp, Homo sapiens
  misc_feature (537)..(537): n is a, c, g, or t
tggttctcccagcatggtgtttgaactctgagaacggacaggctgcctcctcaagtgggtccctgacccccatgtagcctaactgggagacatctgcagtaggggccaacagacacctcatacaggtgggtgcccctctgggatgaagcttccagaagaaggatcaggcagcaatatttgctgttctgcaggctccgctggtgatacccaggcaaacagggtctggagtggacctccagcaaactccaacagtcctgcagctgacggaccttgtgaaaaaccgtctcagcggctgcccccgcctcctctgctggatgtgaaatggcggtcggcgagtggtttgcgtccgtgacatcatcatcatggcaacaagagctgcagcctgggaccgaggagcccgtgtgattcccggcggtggcggcagtggcggcagcaccagcaccgacgaaagcttcgagggcttctctccttgcggccccttgccgggtgctcctgaggaggcggcggcagcagcgcctacaccgccccgcccgccgntcctcgaggtgcctctgtgtgaggggagggggccgtgccgagaaggggagggggcgccgccgccgctgcggagggagccgccgccgctgctgctgccgctgccgggtcgccagtgaagggaggcagtggcggcggcggcgaacatgttttcagtaaggatagtgactgcagactactacatggccagcccgctgcaggggctggatacctgccaatcccccctcacccaggcccctgtcaagaaggtgccggtggtgcgagtcttcggagcgaccccggcagaataaaacccaagacaagccacataaaagcaacctaaaaattaaactgtcatcatattatttgttttaaaactatggaataatatatctgaggaagatttctctcaaaattgtttttctcaatttcaaattccgggtgtacctgtgcaggtttattacaaaggtatattgcataatgctgaggtttgaagtacgactgaacccgtcacctaggaagtgagcatagtactcaataggtcagaagacatgtcttcatctacatggcatctttccttacctctatgtgccatacgatggttatggacagcagccagaaagctatctttctcagatggcattcagtatcgacagagcacttaatgtggctttaggcaatccatcttccactgctcagcatgtgttcaaagtgtcattagtatcaggaatgcctttttatggttatcatgagaaggaaagacactttatgaagatctatctttacaatcctacaatggtgaaaaggatatgtgaacttttgcaaagcggagccataatgaataaattttaccagcctcatgaagcgcatattccctacctcctacagctcttcattgactacaatctttatggcatgaatttaataaatctggctgctgtcaagttccgaaaagcaagaaggaaaagtaatacattgcatgcaactggatcctgcaagaatcatttatcaggaaattctcttgctgatactttatttcggtgggaacaagatgaaataccaagctctttaatattggaaggtgttgaaccacagagtacatgtgaattagaagtggatgctgtagctgctgatatcttaaatcgtctggacattgaagctcaaattggtggaaaccctggtctacaggccatatgggaagatgaaaagcaacggcgaagaaacagaaatgaaacttctcaaatgagccaacctgagtcacaagatcacaggtttgtgccagcaacagaaagtgaaaaaaaatttcagaagagacttcaggaaattctcaaacagaatgatttctctgtaacattatcaggatctgtggactacagcgatggatcccaggagttctctgctgagttaacattgcactctgaggttctgtctcctgaaatgcttcagtgtacaccagccaatatggtagaagttcacaaagacaaagagtcaagcaaaggtcacactagacacaaagtggaagaagctcttattaatgaagaagcaattttgaaccttatggaaaatagtcagacttttcagcctttgacccaaagactgagtgagtcacctgttttcatggacagtagtcctgatgaggctctggtacatcttcttgctggtttggaaagtgatggatatcggggggaaagaaataggatgccatcaccatgtcgctcctttggaaataataaatatccacaaaatagtgatgatgaagaaaatgaaccacagattgaaaaagaggaaatggagcttagtttggtgatgtcccagagatgggacagcaatattgaagaacattgtgccaaaaagagatcactgtgcagaaatacccacagaagttcaactgaagatgatgactcatcttcaggagaagaaatggaatggagtgataacagtttgcttctagccagtctttctatacctcagttagatggaactgcagatgaaaatagtgacaatccattgaacaatgaaaattctagaacccactcttctgtaattgcaacaagcaagctttcagttaaaccctccatctttcacaaagatgctgctacattagaaccctcatcttctgctaagattacctttcagtgtaaacacacaagtgccctttcttcccatgttttgaacaaggaagatttaattgaagacctttcacagacaaacaaaaatacagaaaaaggtctagataactcagtcacttcttttacaaacgaaagcacttattctatgaaataccctggatctttaagcagtactgttcattcagaaaattctcataaagagaatagtaagaaagagatcctcccagtatcttcctgtgaaagtagtatttttgattatgaagaagatattccatctgttacaagacaagtaccaagtagaaaatatacaaacattagaaaaatcgaaaaggattccccttttatacatatgcaccgtcaccctaacgagaatacattgggcaaaaattctttcaacttttctgacttaaatcattcaaaaaataaagtatcctctgaaggaaatgaaaaaggaaacagcacagctctgagtagtttattcccttcatcatttactgaaaattgtgaattactgtcatgctcaggggagaatagaactatggtgcattctcttaatagcactgctgatgaaagtggactaaataaacttaaaattaggtatgaagaatttcaagaacataaaacagaaaagccaagcctcagccagcaagcagcacactatatgttttttcccagtgttgttctttctaactgtcttactagaccacagaaactatctcctgtcacatataaattacaacctggcaataaaccatcccggttaaaattgaataaaaggaaacttgcaggtcatcaggagacttctaccaaaagtagtgagactggatccacaaaagataattttatacaaaataatccttgtaatagtaatcctgagaaggataatgcattggctagtgatttaactaaaaccactcgtggagcttttgaaaataaaacacccacagatggttttatagactgtcactttggagatggaacgttagaaactgagcagtcctttggactatatggaaataaatacacacttagagccaaacgcaaggtaaattatgagactgaagacagtgagtcaagttttgtaactcacaactcaaaaattagtctacctcatcccatggaaattggtgaaagtttagatggaactctcaaatcccgaaaacgaagaaaaatgtctaaaaagctgccccctgtcatcataaagtatattattattaatagatttagagggagaaaaaatatgcttgtgaagctaggaaaaatagactctaaagaaaaacaagtaatattaacagaagaaaaaatggaactatataaaaagcttgcacctttgaaggacttttggccaaaagttcccgactcccctgcaaccaaatatcccatttatccactaacaccaaagaaaagtcacagaagaaagtcaaaacataaatctgctaagaaaaaaactggtaaacaacaaaggacaaataatgaaaatattaaaagaactttgtctttcaggaaaaaacggtcacatgctattctttctcctccctcaccatcttacaatgctgaaaccgaagattgtgacttgaattatagtgatgttatgtctaaactaggttttctttctgagagaagcacaagtcccataaattcttctccacctcgctgctggtctcccacagatccaagagctgaagaaatcatggctgctgcagaaaaagaggcaatgctttttaagggtcctaatgtatataagaagactgttaattctcgtataggaaaaactagtcgcgcaagagcacagattaagaaatcaaaagcaaagcttgctaatccctctatagttactaagaaaaggaacaaacgaaatcagacaaataaactagtagatgatggaaaaaagaaaccaagagcaaaacaaaaaacaaatgagaaaggtacatcgagaaagcatataacacttaaggatgaaaaaataaaatctcagtctggtgctgaggttaagtttgtactgaaacaccagaatgtgtctgaatttgcaagtagttctggaggctctcaactactttttaaacagaaagatatgccactaatgggctctgctgtagatcatcccctttctgcttccctacccactggaattaatgcacaacagaagttatctggctgcttttcttctttcttagaaagcaagaagtctgtagatttgcagacattccccagttcacgagatgatttgcatccatcagttgtttgtaattctataggacctggagtctcaaaaattaatgttcaaaggcctcataatcaaagtgctatgtttactctaaaggaatcaacgttaattcaaaaaaatatatttgacctttccaatcatttatctcaggtagcacagaatacacagatatcttctggtatgtcctcaaagatagaagataatgcaaataatatacaaagaaactatttgtcatcaatcggaaagttaagtgaatatcgcaattccctagaatcaaagctggaccaagcatatacccctaattttttgcattgcaaagacagtcagcagcagattgtgtgcatagcggaacagtcaaagcacagtgaaacttgttctccgggaaatacagcttcagaggaaagccaaatgcctaataattgctttgtaacttccttgagaagtccaatcaaacaaatagcatgggagcaaaagcaaaggggctttattttagatatgtcaaattttaaacctgaaagagtaaaaccgaggtcattatcagaagcaatttcacaaaccaaagcactttctcagtgtaaaaatcgaaatgtgtcaacaccttcagcatttggtgaaggacagtctggactggcagttctaaaagaattgttacaaaaaagacagcagaaagcacaaaatgcaaatactacacaagacccattatccaataaacatcaaccaaataaaaatatttctggttcccttgagcataacaaagcaaataaacggacacgatcggtaacgtccccaagaaaacctcgaactcccagaagtacaaaacaaaaagaaaaaatccccaaacttctcaaagtagactctttaaatttacaaaactctagccagttggataactctgtatcagatgatagtcccatctttttttcagatccaggctttgaaagttgttactcacttgaagatagtttatctcctgaacataattataattttgatattaacacaataggtcagactggattttgtagcttttattctggaagtcagtttgtcccagctgatcagaatttgcctcagaagttcctaagtgatgctgttcaggatctttttccaggacaagctatagaaaaaaatgagtttttaagtcatgacaaccagaaatgtgatgaagacaagcatcataccacagactcagcctcatggattagatctggtactttaagtcctgaaatttttgagaagtcaaccatagatagcaatgagaatcgtcgccacaaccagtggaaaaatagctttcatcctctaacaactcggtctaactcaataatggattctttctgtgttcagcaggcagaagactgtctaagtgaaaaatctagattgaataggagttcagtaagcaaagaagtgtttcttagcctcccacagccaaacaattcagactggattcaaggtcacaccagaaaagaaatgggacagtctcttgactcagccaatacctcttttactgcaatactctcctcccctgatggtgaacttgtagacgtggcctgtgaagatttagaactgtatgtttcaagaaacaatgatatgttgacaccaactcctgatagttcaccaagatctactagctctccttcacaatctaaaaatggcagcttcacccctcgaactgctaacattctgaaaccacttatgtcccccccaagtagggaagaaattatggcaactttgttggatcatgacctgtctgagactatttaccaggaaccattttgcagtaatccttctgatgtaccagaaaagcccagggagattggtggacggctcctcatggtagaaactcgacttgcaaatgatctggctgagtttgagggagacttttccttggaaggacttcgtctttggaaaacagcattctcagcaatgactcagaatccaaggccagggtcaccccttcgcagtggccaaggagttgtcaataaagggtcaagtaatagccctaagatggttgaagataaaaaaattgtgattatgccttgcaaatgtgccccaagtcgacaactggttcaagtgtggcttcaagccaaagaagaatacgaacgttccaagaaactgcctaaaaccaagccaactggagttgtaaaatctgctgagaactttagctcttcagttaacccagatgacaaacctgtagtgcctccaaaaatggatgtaagtccatgtatactccccactacagcacataccaaggaggatgttgataattctcagattgctttacaagcaccaaccacgggatgtagtcaaactgcaagtgaaagtcagatgctgccaccagttgcctctgcaagtgatcccgaaaaagatgaagatgatgatgataactattacattagttatagctcccctgattctccagtaattcccccttggcaacaaccaatatccccagattccaaagcattaaatggagatgatagaccctcatcaccagtagaggagctgccttcattggcttttgagaacttcttaaagccaataaaagatggtatacaaaaaagcccctgcagtgagcctcaagagcctctagtgatatctccaattaatactagggcaagaactgggaaatgtgaatcactttgctttcatagtacaccaatcatacagagaaaacttctggaaaggcttcctgaagcacctggccttagcccattatcaacagaaccaaaaacacagaagttgagtaataagaaaggaagtaatactgacactcttagaagagtactgttaacacaagcaaagaatcaatttgcagcagtaaataccccacagaaagaaacttctcagattgatggaccatctttaaacaatacttacggtttcaaagtcagcatacaaaacttacaggaggcaaaagctttacatgagatacaaaatcttaccctaatcagtgtggagttgcatgctcgaactagacgagacttagaaccggatcctgaatttgacccaatctgtgctctgttctactgcatctcatctgacactccactgccagatacagaaaaaacagaactcacaggtgtaatagtgattgataaagacaagacagttttcagtcaagatatcagatatcagactccattacttattagatctggaattacaggactcgaagtcacctatgctgctgatgagaaggcactttttcatgaaattgcaaatataataaagaggtatgatcctgatattctgctaggatatgagattcagatgcattcctggggttacctcttacaaagggctgccgctttaagtattgacttatgtcggatgatctctcgggtgccagatgacaaaattgagaacagatttgcagctgaaagagatgagtatggatcatatacaatgagtgagataaatattgttggccgaattacactaaatctttggagaatcatgagaaatgaggtggctctaactaactacacctttgaaaatgtgagctttcatgttcttcatcagcgttttcccctctttacctttcgagtcttgtcagactggtttgataacaagacagatctatacagatggaaaatggttgatcattatgttagccgtgtccgtggaaatctccaaatgttagaacagctggacctgattgggaaaaccagtgagatggctagactttttggcattcagtttttacatgtactgacaaggggttcacagtaccgtgtggaatcaatgatgttgcgtattgctaaaccaatgaactatattcctgtgacacctagtgttcagcaaagatcccagatgagagccccacagtgtgttcctctaattatggagcctgaatcccgcttctatagcaactctgttctcgttttggatttccaatcactttatccttctattgtgattgcatataactactgcttttccacctgccttggccatgtggagaacttgggaaagtatgatgagttcaaatttggctgtacctctctgagagtacctccagatttactttaccaagttaggcatgatatcacagtgtcccccaatggagtagcttttgtcaagccttcagtaagaaaaggtgtactaccaagaatgcttgaagaaattttgaagactagatttatggtgaagcagtcaatgaaggcttacaagcaagacagagccctgtcacgaatgcttgatgcgcgtcagttgggacttaagctgatagcaaatgtcacatttggctatacatctgctaatttttctgggagaatgccatgcattgaggttggcgatagtattgttcacaaagccagagagaccttggaacgagctattaaactggtgaatgataccaagaaatggggggctagggttgtatatggcgatactgacagtatgtttgtgctactgaaaggagccactaaggagcagtcttttaagattggtcaggaaattgccgaagctgtaactgctaccaatcctaaaccagtgaaattgaagtttgaaaaggtatatttgccctgtgttttacaaacaaaaaagaggtatgtgggttacatgtatgaaacactggatcagaaggacccagtatttgatgcaaaaggaatagaaacagtcagaagagattcctgccctgctgtttctaagatacttgagcgttctctaaagctgctatttgaaacgagagatataagtctaattaaacagtatgttcagcgacaatgtatgaagcttctggaaggaaaggccagcatacaagactttatctttgccaaggaatacagaggaagtttttcttataaaccaggagcttgtgtgccagcccttgaacttacaaggaaaatgctgacttatgaccggcgctctgagcctcaggttggggagcgagtgccatacgtcatcatttatgggacccccggagtaccacttatccagcttgtaaggcgcccagtggaagtcctgcaggacccaactctgagactgaatgctacttactatattaccaagcaaatccttccacccttggcaagaatcttctcacttattggtattgatgtcttcagctggtatcatgaattaccaaggatccataaagctaccagctcctcgcgaagtgaacctgaagggcggaaaggcactatttcacaatattttactaccttacactgtcctgtgtgtgatgacctaactcagcatggcatctgtagtaaatgtcggagccaacctcagcatgttgcagtcatcctcaaccaagaaatccgggagttggaacgtcaacaggagcaacttgtaaagatatgcaagaactgtacaggttgctttgatcgacacatcccatgtgtttctctgaactgcccagtacttttcaaactctcccgagtaaatagagaattgtccaaggcaccatatctccggcagttattagaccagttttaaattgtcaatatcacagtattacaggtgctatttttttcagtgcttaccactaaactgttgtgcatggtgctttttaactttcatcgagtcaaggatgttcactgtctgttatctgaagactatgaagacttctatgctaaccgaattaaaatgtacttgttgatctctgaatagctcacttcttacaatgtacaaattcctcattctgtcaccttttaaacattgttttataatgcaggtgttggatttgctccagtatgtgtaccatcttgtaaattcatttgagtagatcatgtttacttcccagtggaaggagcactgaaaacctcttaaagaaaaagcatttgtgtgttttccttgaactgtctgtatcaagacgtgttacttcgagatatccattcactttataattttgactgcaaaatattttgtaaatacacttttttacttttcaaacgagtaaaataatgtgcaatgatttttatacaaatgattttcaagttgtttggtatatttcctctaggttttgcttgactcaaagtagatcgttattttgatcaaactgtgcaaacagtagtaccacgtgtagcattttgaaacattattttttaaaaaatgctgtcttgctttagctattaatggggcattgtgaggaactgtgcaaagacatttttgttacaaacctgtgggcctgttgcaatactttaaaaataaaaaattttattccatttgcttgttttgtatagacatttctattgcttctaaatatacttaaaatattttctttccttatgtactgtacagttaatcttatttgccatcatcttgaacacaaaatgtgtatttagaatatttgtataactgtgtaaaataaaaaaggaattatgtggtcagtgcattgttttttaaactggaaatcattttgttttaaaagttaataatggaaaccatattaaaattgaataaaatataaaataatataac

SEQ ID NO: 423209 - DNA, 9928 bp, Homo sapiens
  misc_feature (537)..(537): n is a, c, g, or t
tggttctcccagcatggtgtttgaactctgagaacggacaggctgcctcctcaagtgggtccctgacccccatgtagcctaactgggagacatctgcagtaggggccaacagacacctcatacaggtgggtgcccctctgggatgaagcttccagaagaaggatcaggcagcaatatttgctgttctgcaggctccgctggtgatacccaggcaaacagggtctggagtggacctccagcaaactccaacagtcctgcagctgacggaccttgtgaaaaaccgtctcagcggctgcccccgcctcctctgctggatgtgaaatggcggtcggcgagtggtttgcgtccgtgacatcatcatcatggcaacaagagctgcagcctgggaccgaggagcccgtgtgattcccggcggtggcggcagtggcggcagcaccagcaccgacgaaagcttcgagggcttctctccttgcggccccttgccgggtgctcctgaggaggcggcggcagcagcgcctacaccgccccgcccgccgntcctcgaggtgcctctgtgtgaggggagggggccgtgccgagaaggggagggggcgccgccgccgctgcggagggagccgccgccgctgctgctgccgctgccgggtcgccagtgaagggaggcagtggcggcggcggcgaacatgttttcagtaaggatagtgactgcagactactacatggccagcccgctgcaggggctggatacctgccaatcccccctcacccaggcccctgtcaagaaggtgccggtggtgcgagtcttcggagcgaccccggcagaataaaacccaagacaagccacataaaagcaacctaaaaattaaactgtcatcatattatttgttttaaaactatggaataatatatctgaggaagatttctctcaaaattgtttttctcaatttcaaattccgggtgtacctgtgcaggtttattacaaaggtatattgcataatgctgaggtttgaagtacgactgaacccgtcacctaggaagtgagcatagtactcaataggtcagaagacatgtcttcatctacatggcatctttccttacctctatgtgccatacgatggttatggacagcagccagaaagctatctttctcagatggcattcagtatcgacagagcacttaatgtggctttaggcaatccatcttccactgctcagcatgtgttcaaagtgtcattagtatcaggaatgcctttttatggttatcatgagaaggaaagacactttatgaagatctatctttacaatcctacaatggtgaaaaggatatgtgaacttttgcaaagcggagccataatgaataaattttaccagcctcatgaagcgcatattccctacctcctacagctcttcattgactacaatctttatggcatgaatttaataaatctggctgctgtcaagttccgaaaagcaagaaggaaaagtaatacattgcatgcaactggatcctgcaagaatcatttatcaggaaattctcttgctgatactttatttcggtgggaacaagatgaaataccaagctctttaatattggaaggtgttgaaccacagagtacatgtgaattagaagtggatgctgtagctgctgatatcttaaatcgtctggacattgaagctcaaattggtggaaaccctggtctacaggccatatgggaagatgaaaagcaacggcgaagaaacagaaatgaaacttctcaaatgagccaacctgagtcacaagatcacaggtttgtgccagcaacagaaagtgaaaaaaaatttcagaagagacttcaggaaattctcaaacagaatgatttctctgtaacattatcaggatctgtggactacagcgatggatcccaggagttctctgctgagttaacattgcactctgaggttctgtctcctgaaatgcttcagtgtacaccagccaatatggtagaagttcacaaagacaaagagtcaagcaaaggtcacactagacacaaagtggaagaagctcttattaatgaagaagcaattttgaaccttatggaaaatagtcagacttttcagcctttgacccaaagactgagtgagtcacctgttttcatggacagtagtcctgatgaggctctggtacatcttcttgctggtttggaaagtgatggatatcggggggaaagaaataggatgccatcaccatgtcgctcctttggaaataataaatatccacaaaatagtgatgatgaagaaaatgaaccacagattgaaaaagaggaaatggagcttagtttggtgatgtcccagagatgggacagcaatattgaagaacattgtgccaaaaagagatcactgtgcagaaatacccacagaagttcaactgaagatgatgactcatcttcaggagaagaaatggaatggagtgataacagtttgcttctagccagtctttctatacctcagttagatggaactgcagatgaaaatagtgacaatccattgaacaatgaaaattctagaacccactcttctgtaattgcaacaagcaagctttcagttaaaccctccatctttcacaaagatgctgctacattagaaccctcatcttctgctaagattacctttcagtgtaaacacacaagtgccctttcttcccatgttttgaacaaggaagatttaattgaagacctttcacagacaaacaaaaatacagaaaaaggtctagataactcagtcacttcttttacaaacgaaagcacttattctatgaaataccctggatctttaagcagtactgttcattcagaaaattctcataaagagaatagtaagaaagagatcctcccagtatcttcctgtgaaagtagtatttttgattatgaagaagatattccatctgttacaagacaagtaccaagtagaaaatatacaaacattagaaaaatcgaaaaggattccccttttatacatatgcaccgtcaccctaacgagaatacattgggcaaaaattctttcaacttttctgacttaaatcattcaaaaaataaagtatcctctgaaggaaatgaaaaaggaaacagcacagctctgagtagtttattcccttcatcatttactgaaaattgtgaattactgtcatgctcaggggagaatagaactatggtgcattctcttaatagcactgctgatgaaagtggactaaataaacttaaaattaggtatgaagaatttcaagaacataaaacagaaaagccaagcctcagccagcaagcagcacactatatgttttttcccagtgttgttctttctaactgtcttactagaccacagaaactatctcctgtcacatataaattacaacctggcaataaaccatcccggttaaaattgaataaaaggaaacttgcaggtcatcaggagacttctaccaaaagtagtgagactggatccacaaaagataattttatacaaaataatccttgtaatagtaatcctgagaaggataatgcattggctagtgatttaactaaaaccactcgtggagcttttgaaaataaaacacccacagatggttttatagactgtcactttggagatggaacgttagaaactgagcagtcctttggactatatggaaataaatacacacttagagccaaacgcaaggtaaattatgagactgaagacagtgagtcaagttttgtaactcacaactcaaaaattagtctacctcatcccatggaaattggtgaaagtttagatggaactctcaaatcccgaaaacgaagaaaaatgtctaaaaagctgccccctgtcatcataaagtatattattattaatagatttagagggagaaaaaatatgcttgtgaagctaggaaaaatagactctaaagaaaaacaagtaatattaacagaagaaaaaatggaactatataaaaagcttgcacctttgaaggacttttggccaaaagttcccgactcccctgcaaccaaatatcccatttatccactaacaccaaagaaaagtcacagaagaaagtcaaaacataaatctgctaagaaaaaaactggtaaacaacaaaggacaaataatgaaaatattaaaagaactttgtctttcaggaaaaaacggtcacatgctattctttctcctccctcaccatcttacaatgctgaaaccgaagattgtgacttgaattatagtgatgttatgtctaaactaggttttctttctgagagaagcacaagtcccataaattcttctccacctcgctgctggtctcccacagatccaagagctgaagaaatcatggctgctgcagaaaaagaggcaatgctttttaagggtcctaatgtatataagaagactgttaattctcgtataggaaaaactagtcgcgcaagagcacagattaagaaatcaaaagcaaagcttgctaatccctctatagttactaagaaaaggaacaaacgaaatcagacaaataaactagtagatgatggaaaaaagaaaccaagagcaaaacaaaaaacaaatgagaaaggtacatcgagaaagcatataacacttaaggatgaaaaaataaaatctcagtctggtgctgaggttaagtttgtactgaaacaccagaatgtgtctgaatttgcaagtagttctggaggctctcaactactttttaaacagaaagatatgccactaatgggctctgctgtagatcatcccctttctgcttccctacccactggaattaatgcacaacagaagttatctggctgcttttcttctttcttagaaagcaagaagtctgtagatttgcagacattccccagttcacgagatgatttgcatccatcagttgtttgtaattctataggacctggagtctcaaaaattaatgttcaaaggcctcataatcaaagtgctatgtttactctaaaggaatcaacgttaattcaaaaaaatatatttgacctttccaatcatttatctcaggtagcacagaatacacagatatcttctggtatgtcctcaaagatagaagataatgcaaataatatacaaagaaactatttgtcatcaatcggaaagttaagtgaatatcgcaattccctagaatcaaagctggaccaagcatatacccctaattttttgcattgcaaagacagtcagcagcagattgtgtgcatagcggaacagtcaaagcacagtgaaacttgttctccgggaaatacagcttcagaggaaagccaaatgcctaataattgctttgtaacttccttgagaagtccaatcaaacaaatagcatgggagcaaaagcaaaggggctttattttagatatgtcaaattttaaacctgaaagagtaaaaccgaggtcattatcagaagcaatttcacaaaccaaagcactttctcagtgtaaaaatcgaaatgtgtcaacaccttcagcatttggtgaaggacagtctggactggcagttctaaaagaattgttacaaaaaagacagcagaaagcacaaaatgcaaatactacacaagacccattatccaataaacatcaaccaaataaaaatatttctggttcccttgagcataacaaagcaaataaacggacacgatcggtaacgtccccaagaaaacctcgaactcccagaagtacaaaacaaaaagaaaaaatccccaaacttctcaaagtagactctttaaatttacaaaactctagccagttggataactctgtatcagatgatagtcccatctttttttcagatccaggctttgaaagttgttactcacttgaagatagtttatctcctgaacataattataattttgatattaacacaataggtcagactggattttgtagcttttattctggaagtcagtttgtcccagctgatcagaatttgcctcagaagttcctaagtgatgctgttcaggatctttttccaggacaagctatagaaaaaaatgagtttttaagtcatgacaaccagaaatgtgatgaagacaagcatcataccacagactcagcctcatggattagatctggtactttaagtcctgaaatttttgagaagtcaaccatagatagcaatgagaatcgtcgccacaaccagtggaaaaatagctttcatcctctaacaactcggtctaactcaataatggattctttctgtgttcagcaggcagaagactgtctaagtgaaaaatctagattgaataggagttcagtaagcaaagaagtgtttcttagcctcccacagccaaacaattcagactggattcaaggtcacaccagaaaagaaatgggacagtctcttgactcagccaatacctcttttactgcaatactctcctcccctgatggtgaacttgtagacgtggcctgtgaagatttagaactgtatgtttcaagaaacaatgatatgttgacaccaactcctgatagttcaccaagatctactagctctccttcacaatctaaaaatggcagcttcacccctcgaactgctaacattctgaaaccacttatgtcccccccaagtagggaagaaattatggcaactttgttggatcatgacctgtctgagactatttaccaggaaccattttgcagtaatccttctgatgtaccagaaaagcccagggagattggtggacggctcctcatggtagaaactcgacttgcaaatgatctggctgagtttgagggagacttttccttggaaggacttcgtctttggaaaacagcattctcagcaatgactcagaatccaaggccagggtcaccccttcgcagtggccaaggagttgtcaataaagggtcaagtaatagccctaagatggttgaagataaaaaaattgtgattatgccttgcaaatgtgccccaagtcgacaactggttcaagtgtggcttcaagccaaagaagaatacgaacgttccaagaaactgcctaaaaccaagccaactggagttgtaaaatctgctgagaactttagctcttcagttaacccagatgacaaacctgtagtgcctccaaaaatggatgtaagtccatgtatactccccactacagcacataccaaggaggatgttgataattctcagattgctttacaagcaccaaccacgggatgtagtcaaactgcaagtgaaagtcagatgctgccaccagttgcctctgcaagtgatcccgaaaaagatgaagatgatgatgataactattacattagttatagctcccctgattctccagtaattcccccttggcaacaaccaatatccccagattccaaagcattaaatggagatgatagaccctcatcaccagtagaggagctgccttcattggcttttgagaacttcttaaagccaataaaagatggtatacaaaaaagcccctgcagtgagcctcaagagcctctagtgatatctccaattaatactagggcaagaactgggaaatgtgaatcactttgctttcatagtacaccaatcatacagagaaaacttctggaaaggcttcctgaagcacctggccttagcccattatcaacagaaccaaaaacacagaagttgagtaataagaaaggaagtaatactgacactcttagaagagtactgttaacacaagcaaagaatcaatttgcagcagtaaataccccacagaaagaaacttctcagattgatggaccatctttaaacaatacttacggtttcaaagtcagcatacaaaacttacaggaggcaaaagctttacatgagatacaaaatcttaccctaatcagtgtggagttgcatgctcgaactagacgagacttagaaccggatcctgaatttgacccaatctgtgctctgttctactgcatctcatctgacactccactgccagatacagaaaaaacagaactcacaggtgtaatagtgattgataaagacaagacagttttcagtcaagatatcagatatcagactccattacttattagatctggaattacaggactcgaagtcacctatgctgctgatgagaaggcactttttcatgaaattgcaaatataataaagaggtatgatcctgatattctgctaggatatgagattcagatgcattcctggggttacctcttacaaagggctgccgctttaagtattgacttatgtcggatgatctctcgggtgccagatgacaaaattgagaacagatttgcagctgaaagagatgagtatggatcatatacaatgagtgagataaatattgttggccgaattacactaaatctttggagaatcatgagaaatgaggtggctctaactaactacacctttgaaaatgtgagctttcatgttcttcatcagcgttttcccctctttacctttcgagtcttgtcagactggtttgataacaagacagatctatacagatggaaaatggttgatcattatgttagccgtgtccgtggaaatctccaaatgttagaacagctggacctgattgggaaaaccagtgagatggctagactttttggcattcagtttttacatgtactgacaaggggttcacagtaccgtgtggaatcaatgatgttgcgtattgctaaaccaatgaactatattcctgtgacacctagtgttcagcaaagatcccagatgagagccccacagtgtgttcctctaattatggagcctgaatcccgcttctatagcaactctgttctcgttttggatttccaatcactttatccttctattgtgattgcatataactactgcttttccacctgccttggccatgtggagaacttgggaaagtatgatgagttcaaatttggctgtacctctctgagagtacctccagatttactttaccaagttaggcatgatatcacagtgtcccccaatggagtagcttttgtcaagccttcagtaagaaaaggtgtactaccaagaatgcttgaagaaattttgaagactagatttatggtgaagcagtcaatgaaggcttacaagcaagacagagccctgtcacgaatgcttgatgcgcgtcagttgggacttaagctgatagcaaatgtcacatttggctatacatctgctaatttttctgggagaatgccatgcattgaggttggcgatagtattgttcacaaagccagagagaccttggaacgagctattaaactggtgaatgataccaagaaatggggggctagggttgtatatggcgatactgacagtatgtttgtgctactgaaaggagccactaaggagcagtcttttaagattggtcaggaaattgccgaagctgtaactgctaccaatcctaaaccagtgaaattgaagtttgaaaaggtatatttgccctgtgttttacaaacaaaaaagaggtatgtgggttacatgtatgaaacactggatcagaaggacccagtatttgatgcaaaaggaatagaaacagtcagaagagattcctgccctgctgtttctaagatacttgagcgttctctaaagctgctatttgaaacgagagatataagtctaattaaacagtatgttcagcgacaatgtatgaagcttctggaaggaaaggccagcatacaagactttatctttgccaaggaatacagaggaagtttttcttataaaccaggagcttgtgtgccagcccttgaacttacaaggtaatgataccctcagtaccttgccaggatagtcctgagattctgcacaggtctagaagacccaaatgaaaagacagtccatagacacagacacaaaattgtttctttacctgcgcacatgaagcctcactgaaagttagtgaatattccctcatacttcgtaagatgtgaagaggaaatcctcttttgggctttccttcagaaacttatgcaaagaa

SEQ ID NO: 423210 - DNA, 8781 bp, Homo sapiens
  misc_feature (537)..(537): n is a, c, g, or t
tggttctcccagcatggtgtttgaactctgagaacggacaggctgcctcctcaagtgggtccctgacccccatgtagcctaactgggagacatctgcagtaggggccaacagacacctcatacaggtgggtgcccctctgggatgaagcttccagaagaaggatcaggcagcaatatttgctgttctgcaggctccgctggtgatacccaggcaaacagggtctggagtggacctccagcaaactccaacagtcctgcagctgacggaccttgtgaaaaaccgtctcagcggctgcccccgcctcctctgctggatgtgaaatggcggtcggcgagtggtttgcgtccgtgacatcatcatcatggcaacaagagctgcagcctgggaccgaggagcccgtgtgattcccggcggtggcggcagtggcggcagcaccagcaccgacgaaagcttcgagggcttctctccttgcggccccttgccgggtgctcctgaggaggcggcggcagcagcgcctacaccgccccgcccgccgntcctcgaggtgcctctgtgtgaggggagggggccgtgccgagaaggggagggggcgccgccgccgctgcggagggagccgccgccgctgctgctgccgctgccgggtcgccagtgaagggaggcagtggcggcggcggcgaacatgttttcagtaaggatagtgactgcagactactacatggccagcccgctgcaggggctggatacctgccaatcccccctcacccaggcccctgtcaagaaggtgccggtggtgcgagtcttcggagcgaccccggcagaataaaacccaagacaagccacataaaagcaacctaaaaattaaactgtcatcatattatttgttttaaaactatggaataatatatctgaggaagatttctctcaaaattgtttttctcaatttcaaattccgggtgtacctgtgcaggtttattacaaaggtatattgcataatgctgaggtttgaagtacgactgaacccgtcacctaggaagtgagcatagtactcaataggtcagaagacatgtcttcatctacatggcatctttccttacctctatgtgccatacgatggttatggacagcagccagaaagctatctttctcagatggcattcagtatcgacagagcacttaatgtggctttaggcaatccatcttccactgctcagcatgtgttcaaagtgtcattagtatcaggaatgcctttttatggttatcatgagaaggaaagacactttatgaagatctatctttacaatcctacaatggtgaaaaggatatgtgaacttttgcaaagcggagccataatgaataaattttaccagcctcatgaagcgcatattccctacctcctacagctcttcattgactacaatctttatggcatgaatttaataaatctggctgctgtcaagttccgaaaagcaagaaggaaaagtaatacattgcatgcaactggatcctgcaagaatcatttatcaggaaattctcttgctgatactttatttcggtgggaacaagatgaaataccaagctctttaatattggaaggtgttgaaccacagagtacatgtgaattagaagtggatgctgtagctgctgatatcttaaatcgtctggacattgaagctcaaattggtggaaaccctggtctacaggccatatgggaagatgaaaagcaacggcgaagaaacagaaatgaaacttctcaaatgagccaacctgagtcacaagatcacaggtttgtgccagcaacagaaagtgaaaaaaaatttcagaagagacttcaggaaattctcaaacagaatgatttctctgtaacattatcaggatctgtggactacagcgatggatcccaggagttctctgctgagttaacattgcactctgaggttctgtctcctgaaatgcttcagtgtacaccagccaatatggtagaagttcacaaagacaaagagtcaagcaaaggtcacactagacacaaagtggaagaagctcttattaatgaagaagcaattttgaaccttatggaaaatagtcagacttttcagcctttgacccaaagactgagtgagtcacctgttttcatggacagtagtcctgatgaggctctggtacatcttcttgctggtttggaaagtgatggatatcggggggaaagaaataggatgccatcaccatgtcgctcctttggaaataataaatatccacaaaatagtgatgatgaagaaaatgaaccacagattgaaaaagaggaaatggagcttagtttggtgatgtcccagagatgggacagcaatattgaagaacattgtgccaaaaagagatcactgtgcagaaatacccacagaagttcaactgaagatgatgactcatcttcaggagaagaaatggaatggagtgataacagtttgcttctagccagtctttctatacctcagttagatggaactgcagatgaaaatagtgacaatccattgaacaatgaaaattctagaacccactcttctgtaattgcaacaagcaagctttcagttaaaccctccatctttcacaaagatgctgctacattagaaccctcatcttctgctaagattacctttcagtgtaaacacacaagtgccctttcttcccatgttttgaacaaggaagatttaattgaagacctttcacagacaaacaaaaatacagaaaaaggtctagataactcagtcacttcttttacaaacgaaagcacttattctatgaaataccctggatctttaagcagtactgttcattcagaaaattctcataaagagaatagtaagaaagagatcctcccagtatcttcctgtgaaagtagtatttttgattatgaagaagatattccatctgttacaagacaagtaccaagtagaaaatatacaaacattagaaaaatcgaaaaggattccccttttatacatatgcaccgtcaccctaacgagaatacattgggcaaaaattctttcaacttttctgacttaaatcattcaaaaaataaagtatcctctgaaggaaatgaaaaaggaaacagcacagctctgagtagtttattcccttcatcatttactgaaaattgtgaattactgtcatgctcaggggagaatagaactatggtgcattctcttaatagcactgctgatgaaagtggactaaataaacttaaaattaggtatgaagaatttcaagaacataaaacagaaaagccaagcctcagccagcaagcagcacactatatgttttttcccagtgttgttctttctaactgtcttactagaccacagaaactatctcctgtcacatataaattacaacctggcaataaaccatcccggttaaaattgaataaaaggaaacttgcaggtcatcaggagacttctaccaaaagtagtgagactggatccacaaaagataattttatacaaaataatccttgtaatagtaatcctgagaaggataatgcattggctagtgatttaactaaaaccactcgtggagcttttgaaaataaaacacccacagatggttttatagactgtcactttggagatggaacgttagaaactgagcagtcctttggactatatggaaataaatacacacttagagccaaacgcaaggtaaattatgagactgaagacagtgagtcaagttttgtaactcacaactcaaaaattagtctacctcatcccatggaaattggtgaaagtttagatggaactctcaaatcccgaaaacgaagaaaaatgtctaaaaagctgccccctgtcatcataaagtatattattattaatagatttagagggagaaaaaatatgcttgtgaagctaggaaaaatagactctaaagaaaaacaagtaatattaacagaagaaaaaatggaactatataaaaagcttgcacctttgaaggacttttggccaaaagttcccgactcccctgcaaccaaatatcccatttatccactaacaccaaagaaaagtcacagaagaaagtcaaaacataaatctgctaagaaaaaaactggtaaacaacaaaggacaaataatgaaaatattaaaagaactttgtctttcaggaaaaaacggtcacatgctattctttctcctccctcaccatcttacaatgctgaaaccgaagattgtgacttgaattatagtgatgttatgtctaaactaggttttctttctgagagaagcacaagtcccataaattcttctccacctcgctgctggtctcccacagatccaagagctgaagaaatcatggctgctgcagaaaaagaggcaatgctttttaagggtcctaatgtatataagaagactgttaattctcgtataggaaaaactagtcgcgcaagagcacagattaagaaatcaaaagcaaagcttgctaatccctctatagttactaagaaaaggaacaaacgaaatcagacaaataaactagtagatgatggaaaaaagaaaccaagagcaaaacaaaaaacaaatgagaaaggtacatcgagaaagcatataacacttaaggatgaaaaaataaaatctcagtctggtgctgaggttaagtttgtactgaaacaccagaatgtgtctgaatttgcaagtagttctggaggctctcaactactttttaaacagaaagatatgccactaatgggctctgctgtagatcatcccctttctgcttccctacccactggaattaatgcacaacagaagttatctggctgcttttcttctttcttagaaagcaagaagtctgtagatttgcagacattccccagttcacgagatgatttgcatccatcagttgtttgtaattctataggacctggagtctcaaaaattaatgttcaaaggcctcataatcaaagtgctatgtttactctaaaggaatcaacgttaattcaaaaaaatatatttgacctttccaatcatttatctcaggtagcacagaatacacagatatcttctggtatgtcctcaaagatagaagataatgcaaataatatacaaagaaactatttgtcatcaatcggaaagttaagtgaatatcgcaattccctagaatcaaagctggaccaagcatatacccctaattttttgcattgcaaagacagtcagcagcagattgtgtgcatagcggaacagtcaaagcacagtgaaacttgttctccgggaaatacagcttcagaggaaagccaaatgcctaataattgctttgtaacttccttgagaagtccaatcaaacaaatagcatgggagcaaaagcaaaggggctttattttagatatgtcaaattttaaacctgaaagagtaaaaccgaggtcattatcagaagcaatttcacaaaccaaagcactttctcagtgtaaaaatcgaaatgtgtcaacaccttcagcatttggtgaaggacagtctggactggcagttctaaaagaattgttacaaaaaagacagcagaaagcacaaaatgcaaatactacacaagacccattatccaataaacatcaaccaaataaaaatatttctggttcccttgagcataacaaagcaaataaacggacacgatcggtaacgtccccaagaaaacctcgaactcccagaagtacaaaacaaaaagaaaaaatccccaaacttctcaaagtagactctttaaatttacaaaactctagccagttggataactctgtatcagatgatagtcccatctttttttcagatccaggctttgaaagttgttactcacttgaagatagtttatctcctgaacataattataattttgatattaacacaataggtcagactggattttgtagcttttattctggaagtcagtttgtcccagctgatcagaatttgcctcagaagttcctaagtgatgctgttcaggatctttttccaggacaagctatagaaaaaaatgagtttttaagtcatgacaaccagaaatgtgatgaagacaagcatcataccacagactcagcctcatggattagatctggtactttaagtcctgaaatttttgagaagtcaaccatagatagcaatgagaatcgtcgccacaaccagtggaaaaatagctttcatcctctaacaactcggtctaactcaataatggattctttctgtgttcagcaggcagaagactgtctaagtgaaaaatctagattgaataggagttcagtaagcaaagaagtgtttcttagcctcccacagccaaacaattcagactggattcaaggtcacaccagaaaagaaatgggacagtctcttgactcagccaatacctcttttactgcaatactctcctcccctgatggtgaacttgtagacgtggcctgtgaagatttagaactgtatgtttcaagaaacaatgatatgttgacaccaactcctgatagttcaccaagatctactagctctccttcacaatctaaaaatggcagcttcacccctcgaactgctaacattctgaaaccacttatgtcccccccaagtagggaagaaattatggcaactttgttggatcatgacctgtctgagactatttaccaggaaccattttgcagtaatccttctgatgtaccagaaaagcccagggagattggtggacggctcctcatggtagaaactcgacttgcaaatgatctggctgagtttgagggagacttttccttggaaggacttcgtctttggaaaacagcattctcagcaatgactcagaatccaaggccagggtcaccccttcgcagtggccaaggagttgtcaataaagggtcaagtaatagccctaagatggttgaagataaaaaaattgtgattatgccttgcaaatgtgccccaagtcgacaactggttcaagtgtggcttcaagccaaagaagaatacgaacgttccaagaaactgcctaaaaccaagccaactggagttgtaaaatctgctgagaactttagctcttcagttaacccagatgacaaacctgtagtgcctccaaaaatggatgtaagtccatgtatactccccactacagcacataccaaggaggatgttgataattctcagattgctttacaagcaccaaccacgggatgtagtcaaactgcaagtgaaagtcagatgctgccaccagttgcctctgcaagtgatcccgaaaaagatgaagatgatgatgataactattacattagttatagctcccctgattctccagtaattcccccttggcaacaaccaatatccccagattccaaagcattaaatggagatgatagaccctcatcaccagtagaggagctgccttcattggcttttgagaacttcttaaagccaataaaagatggtatacaaaaaagcccctgcagtgagcctcaagagcctctagtgatatctccaattaatactagggcaagaactgggaaatgtgaatcactttgctttcatagtacaccaatcatacagagaaaacttctggaaaggcttcctgaagcacctggccttagcccattatcaacagaaccaaaaacacagaagttgagtaataagaaaggaagtaatactgacactcttagaagagtactgttaacacaagcaaagaatcaatttgcagcagtaaataccccacagaaagaaacttctcagattgatggaccatctttaaacaatacttacggtttcaaagtcagcatacaaaacttacaggaggcaaaagctttacatgagatacaaaatcttaccctaatcagtgtggagttgcatgctcgaactagacgagacttagaaccggatcctgaatttgacccaatctgtgctctgttctactgcatctcatctgacactccactgccagatacagaaaaaacagaactcacaggtgtaatagtgattgataaagacaagacagttttcagtcaagatatcagatatcagactccattacttattagatctggaattacaggactcgaagtcacctatgctgctgatgagaaggcactttttcatgaaattgcaaatataataaagaggtatgatcctgatattctgctaggatatgagattcagatgcattcctggggttacctcttacaaagggctgccgctttaagtattgacttatgtcggatgatctctcgggtgccagatgacaaaattgagaacagatttgcagctgaaagagatgagtatggatcatatacaatgagtgagataaatattgttggccgaattacactaaatctttggagaatcatgagaaatgaggtgggtgatttatccaaaatgttgtttagaaataagatattcggtcaatataatgatttaatcattatagagtattagtaagatttactatatagcttatgcgtttgtcaattactgttatacttaagtagagttaaaatagtactttctaaaatgcaaaactacagaggtaatagactttaatgttttaagtgagtttttttttttttcttgtgtctaaggtagcaataactagaaaggtctatagctataataaaatattggggccaggtgcagtgctcacacttgtaatctcagcactttgggaggcccaggcaggggcatcccttgagcccaggagttccagaccagcctgagcaacatggcaaaaccctgtctctacaaataatagctaaaaaaaattagctggatgtggaggcgcatgcctgtggtcccagctacttggga

SEQ ID NO: 423211 - DNA, 1749 bp, Homo sapiens
  misc_feature (537)..(537): n is a, c, g, or t
tggttctcccagcatggtgtttgaactctgagaacggacaggctgcctcctcaagtgggtccctgacccccatgtagcctaactgggagacatctgcagtaggggccaacagacacctcatacaggtgggtgcccctctgggatgaagcttccagaagaaggatcaggcagcaatatttgctgttctgcaggctccgctggtgatacccaggcaaacagggtctggagtggacctccagcaaactccaacagtcctgcagctgacggaccttgtgaaaaaccgtctcagcggctgcccccgcctcctctgctggatgtgaaatggcggtcggcgagtggtttgcgtccgtgacatcatcatcatggcaacaagagctgcagcctgggaccgaggagcccgtgtgattcccggcggtggcggcagtggcggcagcaccagcaccgacgaaagcttcgagggcttctctccttgcggccccttgccgggtgctcctgaggaggcggcggcagcagcgcctacaccgccccgcccgccgntcctcgaggtgcctctgtgtgaggggagggggccgtgccgagaaggggagggggcgccgccgccgctgcggagggagccgccgccgctgctgctgccgctgccgggtcgccagtgaagggaggcagtggcggcggcggcgaacatgttttcagtaaggatagtgactgcagactactacatggccagcccgctgcaggggctggatacctgccaatcccccctcacccaggcccctgtcaagaaggtgccggtggtgcgagtcttcggagcgaccccggcagaataaaacccaagacaagccacataaaagcaacctaaaaattaaactgtcatcatattatttgttttaaaactatggaataatatatctgaggaagatttctctcaaaattgtttttctcaatttcaaattccgggtgtacctgtgcaggtttattacaaaggtatattgcataatgctgaggtttgaagtacgactgaacccgtcacctaggaagtgagcatagtactcaataggtcagaagacatgtcttcatctacatggcatctttccttacctctatgtgccatacgatggttatggacagcagccagaaagctatctttctcagatggcattcagtatcgacagagcacttaatgtggctttaggcaatccatcttccactgctcagcatgtgttcaaagtgtcattagtatcaggaatgcctttttatggttatcatgagaaggaaagacactttatgaagatctatctttacaatcctacaatggtgaaaaggatatgtgaacttttgcaaagcggagccataatgaataaattttaccagcctcatgaagcgcatattccctacctcctacagctcttcattgactacaatctttatggcatgaatttaataaatctggctgctgtcaagttccgaaaagcaagaaggaaaagtaatacattgcatgcaactggatcctgcaagaatcatttatcaggaaattctcttgctgatactttatttcggtgggaacaagatgaaataccaaggttagttaatgttgtaaaggaaatgaaaattttacatatatcctagttgtgatcagaaatcagtggttaccataattaaattttaaccttttattgtattggatctttttaatctatacacttaacagaaacaaaccttgacattagtgtattacaaggaataaacgatttt

SEQ ID NO: 423212 - DNA, 2837 bp, Homo sapiens
agtggcggctgaagcgccgccggcggggctcactgtggtggtgtgagtgggaggcggcggcgctggtggctgcagctggggtgaggcgcgaggcggcgcactcgacggctgactggagcagcggtaaaggcgaggatggagaccgaaggatataagtcaaagagtacagcagaaaatgtctactgaacggacttcttggacaagcctgtccaccattcagaaaatagccctgggccttgggatcccagccagtgcaacagttgcctatatcctataccgcaggtatagggaaagcagagaagagcggctgacatttgttggggaagatgacattgagatagagatgcgggttccccaggaggctgtgaaactcatcattggccggcaaggagccaatattaaacagctgcggaaacagacaggtgctcggattgatgtggacacagaggatgtaggcgatgagcgagtgctgcttatcagtggttttcctgttcaggtgtgcaaggccaaagcagcaatccatcagatcctgacagagaataccccagtgtctgagcagctttcagttccccagagatctgtgggcagaatcatagggagaggcggcgagacaattcgttctatctgtaaggcatctggagccaaaattacctgtgacaaagaatcagaagggacattactactatcaagacttataaaaatctcaggaacacagaaggaagtggcagcagccaagcatttgatactggagaaagtttcagaagatgaagaacttcggaagagaattgctcattctgcagaaaccagggtcccacgcaaacagccaatcagtgtgagaagagaagacatgacagagccaggtggagctggagagccagcattatggaaaaacaccagttctagcatggagccgactgcacccctggtgactcctccacccaaaggaggaggcgacatggctgtggtagtgtcaaaggaaggttcctgggagaaacctagtgatgacagctttcagaagtctgaagcccaggccatcccagagatgcccatgtttgaaatccccagtcctgacttcagttttcatgctgatgagtacctagaagtctacgtttctgcttctgagcaccctaaccacttctggatccagatcgttggctcccgcagcctgcaattggataagcttgtcaatgagatgacccagcactatgagaatagtgtgcctgaagacttgactgtgcatgtaggagacattgtagcagcacctttacctacaaatggttcctggtatcgagcccgggtcctcggcaccttggagaatgggaacttggacctctattttgttgactttggagataatggagattgcccactgaaggacctcagggctctcaggagtgacttcctaagccttccatttcaagcaatagaatgtagtctggcacggattgctccctcaggtgaccagtgggaagaggaagctttggatgagtttgatagactcactcattgtgctgactggaagcctctggtagccaagatctctagctatgtccagactgggatctcaacttggccaaagatctacttatatgatactagcaatgggaagaaacttgatattgggctagaattagtacacaaaggatacgcaattgagcttcctgaagacatagaagaaaacagagctgtcccagacatgttgaaggacatggccacagaaacagatgcctctctcagcacgttgctcactgagaccaaaaagagctctggagagataacacataccctgtcctgcctcagcttatcagaagctgcttccatgtctggtgatgataaccttgaagatgactacttactctgaagtctgggcttcagtttgctcagccatctgctttgctgtgtgagtgcagctatcatctatctgtagcaacaggaaagtaatgagggcgacagtggggcacttgctttgattccctctttcccatgccctgtcttaatatacttctctgcagctgctttcctgcagcttaacttgctctcagattgagcactttcaagctttttgtgtatttctgtctttggcaggatttggcataggaattggtgcatggaggagaggagtgtatgataaaggatccatgcagtccttcctttattacacatatagtctggcttgctgtggaccaaattaatattctcctcccatcagactacaaaaaaattggactaccacgctacaagtgtgtctcccccattccacctcctgatccctccccaaccctccagtgtttgaatactgctgtgttacttccaggccgttcaacgtcaggctcagtcccctctaccagtcatgattcacattactactaggctgtatcctttttgaggctgggaaacagtcaggctttcgtcattggaagtgattctgcagacttctgactcaccttatcaggtgactctggttaaggaaagcttttgagtggtgaactcaaagactccagttgaatcaggaggcaaaggcaaaaattagcataattatatttaaaagcctcaggaagtgggaagagaatactgcctcccagcctcaattgctgatatgttattggagacaggcttttgaaactgctccagctatttctctgtaacctttagttaaaatataagtagaaaggagacaggaggctcaggaaattttctaaattgctagtataatatctatatgtatacacacatatacacccgtggagagagaggaagagtatacagtcctgtttgaatcatttggaggatttttttgctgaataaagttctcaagaaaattttctaaaaaaaaattc

SEQ ID NO: 423213 - DNA, 574 bp, Homo sapiens
ctgtgtgacacagcaagatgctgtctccaaaaaaagaaaagaaaaatctcagtcccaattagcagaaaggctctagtgaaggaacagttctggtgagtagttcaggtactcttggaggaatctttaaggagcttccatttatttgatgtttcagatgttgcctgcaatgaactcgctgaagcatgctcagccctggaactggtgctaccagagttccgtagggaacctttactctttagaggttccctgatataaatcattcataagacttcctaccctggaaaatgagtaatgtctcattcttacctgcagtttgttactatgtataaaagtctttttctttaatatgcctttaagtcttacctgtttacagcccattctgatgggttctttgtcattctgttagtataacccagtacttttcctgctgcctggaatgccctcttctatgttacctattctgtccgttgagatcccccaacttgggccaaagccaagagatctatgtgccttctctggttttctccacatctatagcacctcaactgaaatatatggataaaaacagcctaac

SEQ ID NO: 423214 - DNA, 883 bp, Homo sapiens
tataggatgtgctttagtccaacagacctaggctctaactctggttttaacacttgttctgtgagttagtcctgcagaacttcagtttccatctatagaattttccatttataaatcatagaaccttcctcctcacagaatttaagatgaaatgagatgttcatgaagtgcttaacactagagattagtgaggtctacctatatactaatacaatgatgacatagtaagctctgaaatagtatctatcacttatgaatggttattcaccatcccttatatccaacagagtttgagctccttgaggcaagaggctatagtttctgtaacatatgctccaggcatccggttaaatatgtccccgttcccttggccttatgtctgaccctttcacattgtaggtgctccatatgtttgagatccattttgtcctgctggccacatcccttgaatggattctgtgtaatttcaccagtgcttcttcagtctggcccctaacaccacctgcaggggcttcctcagagtccagttgtaacttgatggaacaagttacaacttcccaccttcgtggtaggtgggaagaaaagaatccctgaaatgcctgagggtgcatttttaaagacaggggaagagggtctcctataaaggaaaaggagttatccagctgcctcagcgcgaaaagcaaggaagaacagcagatccccacctctgtcgttccgatcattctggaagttcacaaacacagagtccacatttgtcttctcttccacgtactccagggttgcagtcaaactaggagccacagaaaaacagttaaaatgtttggccgctccctctccctctccctctccctctccctccacggtctccctctgatgccaccaa

SEQ ID NO: 423215 - DNA, 2818 bp, Homo sapiens
agtggcggctgaagcgccgccggcggggctcactgtggtggtgtgagtgggaggcggcggcgctggtggctgcagctggggtgaggcgcgaggcggcgcactcgacggctgactggagcagcggtaaaggatataagtcaaagagtacagcagaaaatgtctactgaacggacttcttggacaagcctgtccaccattcagaaaatagccctgggccttgggatcccagccagtgcaacagttgcctatatcctataccgcaggtatagggaaagcagagaagagcggctgacatttgttggggaagatgacattgagatagagatgcgggttccccaggaggctgtgaaactcatcattggccggcaaggagccaatattaaacagctgcggaaacagacaggtgctcggattgatgtggacacagaggatgtaggcgatgagcgagtgctgcttatcagtggttttcctgttcaggtgtgcaaggccaaagcagcaatccatcagatcctgacagagaataccccagtgtctgagcagctttcagttccccagagatctgtgggcagaatcatagggagaggcggcgagacaattcgttctatctgtaaggcatctggagccaaaattacctgtgacaaagaatcagaagggacattactactatcaagacttataaaaatctcaggaacacagaaggaagtggcagcagccaagcatttgatactggagaaagtttcagaagatgaagaacttcggaagagaattgctcattctgcagaaaccagggtcccacgcaaacagccaatcagtgtgagaagagaagacatgacagagccaggtggagctggagagccagcattatggaaaaacaccagttctagcatggagccgactgcacccctggtgactcctccacccaaaggaggaggcgacatggctgtggtagtgtcaaaggaaggttcctgggagaaacctagtgatgacagctttcagaagtctgaagcccaggccatcccagagatgcccatgtttgaaatccccagtcctgacttcagttttcatgctgatgagtacctagaagtctacgtttctgcttctgagcaccctaaccacttctggatccagatcgttggctcccgcagcctgcaattggataagcttgtcaatgagatgacccagcactatgagaatagtgtgcctgaagacttgactgtgcatgtaggagacattgtagcagcacctttacctacaaatggttcctggtatcgagcccgggtcctcggcaccttggagaatgggaacttggacctctattttgttgactttggagataatggagattgcccactgaaggacctcagggctctcaggagtgacttcctaagccttccatttcaagcaatagaatgtagtctggcacggattgctccctcaggtgaccagtgggaagaggaagctttggatgagtttgatagactcactcattgtgctgactggaagcctctggtagccaagatctctagctatgtccagactgggatctcaacttggccaaagatctacttatatgatactagcaatgggaagaaacttgatattgggctagaattagtacacaaaggatacgcaattgagcttcctgaagacatagaagaaaacagagctgtcccagacatgttgaaggacatggccacagaaacagatgcctctctcagcacgttgctcactgagaccaaaaagagctctggagagataacacataccctgtcctgcctcagcttatcagaagctgcttccatgtctggtgatgataaccttgaagatgactacttactctgaagtctgggcttcagtttgctcagccatctgctttgctgtgtgagtgcagctatcatctatctgtagcaacaggaaagtaatgagggcgacagtggggcacttgctttgattccctctttcccatgccctgtcttaatatacttctctgcagctgctttcctgcagcttaacttgctctcagattgagcactttcaagctttttgtgtatttctgtctttggcaggatttggcataggaattggtgcatggaggagaggagtgtatgataaaggatccatgcagtccttcctttattacacatatagtctggcttgctgtggaccaaattaatattctcctcccatcagactacaaaaaaattggactaccacgctacaagtgtgtctcccccattccacctcctgatccctccccaaccctccagtgtttgaatactgctgtgttacttccaggccgttcaacgtcaggctcagtcccctctaccagtcatgattcacattactactaggctgtatcctttttgaggctgggaaacagtcaggctttcgtcattggaagtgattctgcagacttctgactcaccttatcaggtgactctggttaaggaaagcttttgagtggtgaactcaaagactccagttgaatcaggaggcaaaggcaaaaattagcataattatatttaaaagcctcaggaagtgggaagagaatactgcctcccagcctcaattgctgatatgttattggagacaggcttttgaaactgctccagctatttctctgtaacctttagttaaaatataagtagaaaggagacaggaggctcaggaaattttctaaattgctagtataatatctatatgtatacacacatatacacccgtggagagagaggaagagtatacagtcctgtttgaatcatttggaggatttttttgctgaataaagttctcaagaaaattttctaaaaaaaaattc

SEQ ID NO: 423216 - DNA, 2667 bp, Homo sapiens
agtggcggctgaagcgccgccggcggggctcactgtggtggtgtgagtgggaggcggcggcgctggtggctgcagctggggtgaggcgcgaggcggcgcactcgacggctgactggagcagcggtaaaggcgaggatggagaccgaaggatataagtcaaagagtacagcagaaaatgtctactgaacggacttcttggacaagcctgtccaccattcagaaaatagccctgggccttgggatcccagccagtgcaacagttgcctatatcctataccgcaggtatagggaaagcagagaagagcggctgacatttgttggggaagatgacattgagatagagatgcgggttccccaggaggctgtgaaactcatcattggccggcaaggagccaatattaaacagctgcggaaacagacaggtgctcggattgatgtggacacagaggatgtaggcgatgagcgagtgctgcttatcagtggttttcctgttcaggtgtgcaaggccaaagcagcaatccatcagatcctgacagagaataccccagtgtctgagcagctttcagttccccagagatctgtgggcagaatcatagggagaggcggcgagacaattcgttctatctgtaaggcatctggagccaaaattacctgtgacaaagaatcagaagggacattactactatcaagacttataaaaatctcaggaacacagaaggaagtggcagcagccaagcatttgatactggagaaagtttcagaagatgaagaacttcggaagagaattgctcattctgcagaaaccagggtcccacgcaaacagccaatcagtgtgagaagagaagacatgacagagccaggtggagctggagagccagcattatggaaaaacaccagttctagcatggagccgactgcacccctggtgactcctccacccaaaggaggaggcgacatggctgtggtagtgtcaaaggaaggttcctgggagaaacctagtgatgacagctttcagaagtctgaagcccaggccatcccagagatgcccatgtttgaaatccccagtcctgacttcagttttcatgctgatgagtacctagaagtctacgtttctgcttctgagcaccctaaccacttctggatccagatcgttggctcccgcagcctgcaattggataagcttgtcaatgagatgacccagcactatgagaatagtgtgcctgaagacttgactgtgcatgtaggagacattgtagcagcacctttacctacaaatggttcctggtatcgagcccgggtcctcggcaccttggagaatgggaacttggacctctattttgttgactttggagataatggagattgcccactgaaggacctcagggctctcaggagtgacttcctaagccttccatttcaagcaatagaatgtagtctggcacggattgctccctcaggtgaccagtgggaagaggaagctttggatgagtttgatagactcactcattgtgctgactggaagcctctggtagccaagatctctagctatgtccagactgggatctcaacttggccaaagatctacttatatgatactagcaatgggaagaaacttgatattgggctagaattagtacacaaaggatacgcaattgagcttcctgaagacatagaagaaaacagagctgtcccagacatgttgaaggacatggccacagaaacagatgcctctctcagcacgttgctcactgagaccaaaaagagctctggagagataacacataccctgtcctgcctcagcttatcagaagctgcttccatgtctggtgatgataaccttgaagatgactacttactctgaagtctgggcttcagtttgctcagccatctgctttgctgtatgttgcctgcaatgaactcgctgaagcatgctcagccctggaactggtgctaccagagttccgtagggaacctttactctttagaggttccctgatataaatcattcataagacttcctaccctggaaaatgagtaatgtctcattcttacctgcagtttgttactatgtataaaagtctttttctttaatatgcaaaaaaaaaaaaaaaaaaaaaaacaaaaaaaaataacacagacaaaaaaaaaaaaaaaaaataaagaaaacaatagaaacaaaaaaaaaacaaagataacacagaacacaagaaacaaggaggcgatgggggagccgatccgaaagggcccagaggcggatcccttgacgggcaagggcaaggagacgcccctcgatgcattgggaatgtatacagaggagaaagaggcggggagaacctagaaacgaggagaggcgatagagtaaggacataaccgatagaagaggagcacagcccagagggcagcgagcacatagagagtaaaaagaaaaaaaaggagcaaagacagtgggggagaagaaagagaaacaaagacaaacgaacgacaaggaaatacaaacagacaagagtgaagaaaagagagagagcagaaccacccacaagaaagacaacgggggagagagagacacaaaaacaaataaagtgagagcgagaaaagaaaaaacaaaacaaaggaagagaaagagaataaaacacagaaacagacacacagaagagaaaaaaaaataca

SEQ ID NO: 423217 - DNA, 2384 bp, Homo sapiens
agtggcggctgaagcgccgccggcggggctcactgtggtggtgtgagtgggaggcggcggcgctggtggctgcagctggggtgaggcgcgaggcggcgcactcgacggctgactggagcagcggtaaaggcgaggatggagaccgaaggatataagtcaaagagtacagcagaaaatgtctactgaacggacttcttggacaagcctgtccaccattcagaaaatagccctgggccttgggatcccagccagtgcaacagttgcctatatcctataccgcaggtatagggaaagcagagaagagcggctgacatttgttggggaagatgacattgagatagagatgcgggttccccaggaggctgtgaaactcatcattggccggcaaggagccaatattaaacagctgcggaaacagacaggtgctcggattgatgtggacacagaggatgtaggcgatgagcgagtgctgcttatcagtggttttcctgttcaggtgtgcaaggccaaagcagcaatccatcagatcctgacagagaataccccagtgtctgagcagctttcagttccccagagatctgtgggcagaatcatagggagaggcggcgagacaattcgttctatctgtaaggcatctggagccaaaattacctgtgacaaagaatcagaagggacattactactatcaagacttataaaaatctcaggaacacagaaggaagtggcagcagccaagcatttgatactggagaaagtttcagaagatgaagaacttcggaagagaattgctcattctgcagaaaccagggtcccacgcaaacagccaatcagtgtgagaagagaagacatgacagagccaggtggagctggagagccagcattatggaaaaacaccagttctagcatggagccgactgcacccctggtgactcctccacccaaaggaggaggcgacatggctgtggtagtgtcaaaggaaggttcctgggagaaacctagtgatgacagctttcagaagtctgaagcccaggccatcccagagatgcccatgtttgaaatccccagtcctgacttcagttttcatgctgatgagtacctagaagtctacgtttctgcttctgagcaccctaaccacttctggatccagatcgttggctcccgcagcctgcaattggataagcttgtcaatgagatgacccagcactatgagaatagtgtgcctgaagacttgactgtgcatgtaggagacattgtagcagcacctttacctacaaatggttcctggtatcgagcccgggtcctcggcaccttggagaatgggaacttggacctctattttgttgactttggagataatggagattgcccactgaaggacctcagggctctcaggagtgacttcctaagccttccatttcaagcaatagaatgtagtctggcacggattgctccctcaggtgaccagtgggaagaggaagctttggatgagtttgatagactcactcattgtgctgactggaagcctctggtagccaagatctctagctatgtccagactgggatctcaacttggccaaagatctacttatatgatactagcaatgggaagaaacttgatattgggctagaattagtacacaaaggatacgcaattgagcttcctgaagacatagaagaaaacagagctgtcccagacatgttgaaggacatggccacagaaacagatgcctctctcagcacgttgctcactgagaccaaaaagagctctggagagataacacataccctgtcctgcctcagcttatcagaagctgcttccatgtctggtgatgataaccttgaagatgactacttactctgaagtctgggcttcagtttgctcagccatctgctttgctgtgtgctccatatgtttgagatccattttgtcctgctggccacatcccttgaatggattctgtgtaatttcaccagtgcttcttcagtctggcccctaacaccacctgcaggggcttcctcagagtccagttgtaacttgatggaacaagttacaacttcccaccttcgtggtaggtgggaagaaaagaatccctgaaatgcctgagggtgcatttttaaagacaggggaagagggtctcctataaaggaaaaggagttatccagctgcctcagcgcgaaaagcaaggaagaacagcagatccccacctctgtcgttccgatcattctggaagttcacaaacacagagtccacatttgtcttctcttccacgtactccagggttgcagtcaaactaggagccacagaaaaacagttaaaatgtttggccgctccctctccctctccctctccctctccctccacggtctccctctgatgccaccaa

SEQ ID NO: 423218 - DNA, 1844 bp, Homo sapiens
agtggcggctgaagcgccgccggcggggctcactgtggtggtgtgagtgggaggcggcggcgctggtggctgcagctggggtgaggcgcgaggcggcgcactcgacggctgactggagcagcggtaaaggcgaggatggagaccgaaggatataagtcaaagagtacagcagaaaatgtctactgaacggacttcttggacaagcctgtccaccattcagaaaatagccctgggccttgggatcccagccagtgcaacagttgcctatatcctataccgcaggtatagggaaagcagagaagagcggctgacatttgttggggaagatgacattgagatagagatgcgggttccccaggaggctgtgaaactcatcattggccggcaaggagccaatattaaacagctgcggaaacagacaggtgctcggattgatgtggacacagaggatgtaggcgatgagcgagtgctgcttatcagtggttttcctgttcaggtgtgcaaggccaaagcagcaatccatcagatcctgacagagaataccccagtgtctgagcagctttcagttccccagagatctgtgggcagaatcatagggagaggcggcgagacaattcgttctatctgtaaggcatctggagccaaaattacctgtgacaaagaatcagaagggacattactactatcaagacttataaaaatctcaggaacacagaaggaagtggcagcagccaagcatttgatactggagaaagtttcagaagatgaagaacttcggaagagaattgctcattctgcagaaaccagggtcccacgcaaacagccaatcagtgtgagaagagaagacatgacagagccaggtggagctggagagccagcattatggaaaaacaccagttctagcatggagccgactgcacccctggtgactcctccacccaaaggaggaggcgacatggctgtggtagtgtcaaaggaaggttcctgggagaaacctagtgatgacagctttcagaagtctgaagcccaggccatcccagagatgcccatgtttgaaagtatgtaacaaagagggagcccattaatcattgaagatagaaatactggcttagatattggagagattagaaggaatgccttctcagtctgagcagccagtataatatggctggggtcaggacagaagattcggtaagatattttgaagatgggatggaggtagaatccacaccaacagttgctggacagtttgaggatgcagatgttgatcactgaaaatgatttatgcaggtataagattctgctcctaattgtaggagagaacttggtgcctcttccactctgaagcaaagttgatgaaagtcttcttccttttcccaaaacccaacctgaactacttctttcttggagacagactatattgagacaagttgttaccagcaaaagatagatacatgacctttattaacaaaaatgaattaaccaagaggatatttgtagtttattatttaccccaaactttctgtgtctgggtaccctctgagtaggcctataattcctgccttcactgtatgcattttatgtaagctagcagacctatgtggtgagaatgcacaggagcttggaggtataaatagacagggtgggaaagagagagctcctttcgccatgttttaccagcccgctctgttataacctcttaggttatattctttaatttccaaccttttaggttagtttctgtaacagaacaaatgagtctgggataaagtcctcaaagtacttcaaatggtaattgttttgtttttgtaacggcttaacaaataacctaggttttctgttta

SEQ ID NO: 423219 - DNA, 2320 bp, Homo sapiens
agtggcggctgaagcgccgccggcggggctcactgtggtggtgtgagtgggaggcggcggcgctggtggctgcagctggggtgaggcgcgaggcggcgcactcgacggctgactggagcagcggtaaaggcgaggatggagaccgaaggatataagtcaaagagtacagcagaaaatgtctactgaacggacttcttggacaagcctgtccaccattcagaaaatagccctgggccttgggatcccagccagtgcaacagttgcctatatcctataccgcaggtatagggaaagcagagaagagcggctgacatttgttggggaagatgacattgagatagagatgcgggttccccaggaggctgtgaaactcatcattggccggcaaggagccaatattaaacagctgcggaaacagacaggtgctcggattgatgtggacacagaggatgtaggcgatgagcgagtgctgcttatcagtggttttcctgttcaggtgtgcaaggccaaagcagcaatccatcagatcctgacagagaataccccagtgtctgagcagctttcagttccccagagatctgtgggcagaatcatagggagaggcggcgagacaattcgttctatctgtaaggcatctggagccaaaattacctgtgacaaagaatcagaagggacattactactatcaagacttataaaaatctcaggaacacagaaggaagtggcagcagccaagcatttgatactggagaaagtttcagaagatgaagaacttcggaagagaattgctcattctgcagaaaccagggtcccacgcaaacagccaatcagtgtgagaagagaagacatgacagagccaggtggagctggagagccagcattatggaaaaacaccagttctagcatggagccgactgcacccctggtgactcctccacccaaaggaggaggcgacatggctgtggtagtgtcaaaggaaggttcctgggagaaacctagtgatgacagctttcagaagtctgaagcccaggccatcccagagatgcccatgtttgaaatccccagtcctgacttcagttttcatgctgatgagtacctagaagtctacgtttctgcttctgagcaccctaaccacttctggatccagatcgttggctcccgcagcctgcaattggataagcttgtcaatgagatgacccagcactatgagaatagtgtgcctgaagacttgactgtgcatgtaggagacattgtagcagcacctttacctacaaatggttcctggtatcgagcccgggtcctcggcaccttggagaatgggaacttggacctctattttgttgactttggagataatggagattgcccactgaaggacctcagggctctcaggagtgacttcctaagccttccatttcaagcaatagaatgtagtctggcacggattgctccctcaggtgaccagtgggaagaggaagctttggatgagtttgatagactcactcattgtgctgactggaagcctctggtagccaagatctctagctatgtccagactgggatctcaacttggccaaagatctacttatatgatactagcaatgggaagaaacttgatattgggctagaattagtacacaaaggatacgcaattgagcttcctgaagacatagaagaaaacagagctgtcccagacatgttgaaggacatggccacagaaacagatgcctctctcagcacgttgctcactgagaccaaaaagagctctggagagataacacataccctgtcctgcctcagcttatcagaagctgcttccatgtctggtgatgataaccttgaagatgactacttactctgaagtctgggcttcagtttgctcagccatctgctttgctgtatgttgcctgcaatgaactcgctgaagcatgctcagccctggaactggtgctaccagagttccgtagggaacctttactctttagaggttccctgatataaatcattcataagacttcctaccctggaaaatgagtaatgtctcattcttacctgcagtttgttactatgtataaaagtctttttctttaatatgcctttaagtcttacctgtttacagcccattctgatgggttctttgtcattctgttagtataacccagtacttttcctgctgcctggaatgccctcttctatgttacctattctgtccgttgagatcccccaacttgggccaaagccaagagatctatgtgccttctctggttttctccacatctatagcacctcaactgaaatatatggataaaaacagcctaac

SEQ ID NO: 423220 - DNA, 2702 bp, Homo sapiens
agtggcggctgaagcgccgccggcggggctcactgtggtggtgtgagtgggaggcggcggcgctggtggctgcagctggggtgaggcgcgaggcggcgcactcgacggctgactggagcagcggtaaaggcgaggatggagaccgaaggatataagtcaaagagtacagcagaaaatgtctactgaacggacttcttggacaagcctgtccaccattcagaaaatagccctgggccttgggatcccagccagtgcaacagttgcctatatcctataccgcaggtatagggaaagcagagaagagcggctgacatttgttggggaagatgacattgagatagagatgcgggttccccaggaggctgtgaaactcatcattggccggcaaggagccaatattaaacagctgcggaaacagacaggtgctcggattgatgtggacacagaggatgtaggcgatgagcgagtgctgcttatcagtggttttcctgttcaggcatctggagccaaaattacctgtgacaaagaatcagaagggacattactactatcaagacttataaaaatctcaggaacacagaaggaagtggcagcagccaagcatttgatactggagaaagtttcagaagatgaagaacttcggaagagaattgctcattctgcagaaaccagggtcccacgcaaacagccaatcagtgtgagaagagaagacatgacagagccaggtggagctggagagccagcattatggaaaaacaccagttctagcatggagccgactgcacccctggtgactcctccacccaaaggaggaggcgacatggctgtggtagtgtcaaaggaaggttcctgggagaaacctagtgatgacagctttcagaagtctgaagcccaggccatcccagagatgcccatgtttgaaatccccagtcctgacttcagttttcatgctgatgagtacctagaagtctacgtttctgcttctgagcaccctaaccacttctggatccagatcgttggctcccgcagcctgcaattggataagcttgtcaatgagatgacccagcactatgagaatagtgtgcctgaagacttgactgtgcatgtaggagacattgtagcagcacctttacctacaaatggttcctggtatcgagcccgggtcctcggcaccttggagaatgggaacttggacctctattttgttgactttggagataatggagattgcccactgaaggacctcagggctctcaggagtgacttcctaagccttccatttcaagcaatagaatgtagtctggcacggattgctccctcaggtgaccagtgggaagaggaagctttggatgagtttgatagactcactcattgtgctgactggaagcctctggtagccaagatctctagctatgtccagactgggatctcaacttggccaaagatctacttatatgatactagcaatgggaagaaacttgatattgggctagaattagtacacaaaggatacgcaattgagcttcctgaagacatagaagaaaacagagctgtcccagacatgttgaaggacatggccacagaaacagatgcctctctcagcacgttgctcactgagaccaaaaagagctctggagagataacacataccctgtcctgcctcagcttatcagaagctgcttccatgtctggtgatgataaccttgaagatgactacttactctgaagtctgggcttcagtttgctcagccatctgctttgctgtgtgagtgcagctatcatctatctgtagcaacaggaaagtaatgagggcgacagtggggcacttgctttgattccctctttcccatgccctgtcttaatatacttctctgcagctgctttcctgcagcttaacttgctctcagattgagcactttcaagctttttgtgtatttctgtctttggcaggatttggcataggaattggtgcatggaggagaggagtgtatgataaaggatccatgcagtccttcctttattacacatatagtctggcttgctgtggaccaaattaatattctcctcccatcagactacaaaaaaattggactaccacgctacaagtgtgtctcccccattccacctcctgatccctccccaaccctccagtgtttgaatactgctgtgttacttccaggccgttcaacgtcaggctcagtcccctctaccagtcatgattcacattactactaggctgtatcctttttgaggctgggaaacagtcaggctttcgtcattggaagtgattctgcagacttctgactcaccttatcaggtgactctggttaaggaaagcttttgagtggtgaactcaaagactccagttgaatcaggaggcaaaggcaaaaattagcataattatatttaaaagcctcaggaagtgggaagagaatactgcctcccagcctcaattgctgatatgttattggagacaggcttttgaaactgctccagctatttctctgtaacctttagttaaaatataagtagaaaggagacaggaggctcaggaaattttctaaattgctagtataatatctatatgtatacacacatatacacccgtggagagagaggaagagtatacagtcctgtttgaatcatttggaggatttttttgctgaataaagttctcaagaaaattttctaaaaaaaaattc

SEQ ID NO: 423221 - DNA, 2092 bp, Homo sapiens
gagattcggaaatttgccatgaaggagatgggaactccagatgtgcgcattgacaccaggctcaacaaagctgtctgggccaaaggaataaggaatgtgccataccgaatccgtgtgcggctgtccagaaaacgtaatgaggatgaagattcaccaaataagctatatactttggttacctatgtacctgttaccactttcaaaaatctacagacagtcaatgtggatgagaactaatcgctgatcgtcagatcaaataaagttataaaattgcaaaaaaaaaaggccatcccagagatgcccatgtttgaaatccccagtcctgacttcagttttcatgctgatgagtacctagaagtctacgtttctgcttctgagcaccctaaccacttctggatccagatcgttggctcccgcagcctgcaattggataagcttgtcaatgagatgacccagcactatgagaatagtgtgcctgaagacttgactgtgcatgtaggagacattgtagcagcacctttacctacaaatggttcctggtatcgagcccgggtcctcggcaccttggagaatgggaacttggacctctattttgttgactttggagataatggagattgcccactgaaggacctcagggctctcaggagtgacttcctaagccttccatttcaagcaatagaatgtagtctggcacggattgctccctcaggtgaccagtgggaagaggaagctttggatgagtttgatagactcactcattgtgctgactggaagcctctggtagccaagatctctagctatgtccagactgggatctcaacttggccaaagatctacttatatgatactagcaatgggaagaaacttgatattgggctagaattagtacacaaaggatacgcaattgagcttcctgaagacatagaagaaaacagagctgtcccagacatgttgaaggacatggccacagaaacagatgcctctctcagcacgttgctcactgagaccaaaaagagctctggagagataacacataccctgtcctgcctcagcttatcagaagctgcttccatgtctggtgatgataaccttgaagatgactacttactctgaagtctgggcttcagtttgctcagccatctgctttgctgtgtgagtgcagctatcatctatctgtagcaacaggaaagtaatgagggcgacagtggggcacttgctttgattccctctttcccatgccctgtcttaatatacttctctgcagctgctttcctgcagcttaacttgctctcagattgagcactttcaagctttttgtgtatttctgtctttggcaggatttggcataggaattggtgcatggaggagaggagtgtatgataaaggatccatgcagtccttcctttattacacatatagtctggcttgctgtggaccaaattaatattctcctcccatcagactacaaaaaaattggactaccacgctacaagtgtgtctcccccattccacctcctgatccctccccaaccctccagtgtttgaatactgctgtgttacttccaggccgttcaacgtcaggctcagtcccctctaccagtcatgattcacattactactaggctgtatcctttttgaggctgggaaacagtcaggctttcgtcattggaagtgattctgcagacttctgactcaccttatcaggtgactctggttaaggaaagcttttgagtggtgaactcaaagactccagttgaatcaggaggcaaaggcaaaaattagcataattatatttaaaagcctcaggaagtgggaagagaatactgcctcccagcctcaattgctgatatgttattggagacaggcttttgaaactgctccagctatttctctgtaacctttagttaaaatataagtagaaaggagacaggaggctcaggaaattttctaaattgctagtataatatctatatgtatacacacatatacacccgtggagagagaggaagagtatacagtcctgtttgaatcatttggaggatttttttgctgaataaagttctcaagaaaattttctaaaaaaaaattc

SEQ ID NO: 423222 - DNA, 1623 bp, Homo sapiens
agtggcggctgaagcgccgccggcggggctcactgtggtggtgtgagtgggaggcggcggcgctggtggctgcagctggggtgaggcgcgaggcggcgcactcgacggctgactggagcagcggtaaaggcgaggatggagaccgaaggatataagtcaaagagtacagcagaaaatgtctactgaacggacttcttggacaagcctgtccaccattcagaaaatagccctgggccttgggatcccagccagtgcaacagttgcctatatcctataccgcaggtatagggaaagcagagaagagcggctgacatttgttggggaagatgacattgagatagagatgcgggttccccaggaggctgtgaaactcatcattggccggcaaggagccaatattaaacagctgcggaaacagacaggtgctcggattgatgtggacacagaggatgtaggcgatgagcgagtgctgcttatcagtggttttcctgttcaggtgtgcaaggccaaagcagcaatccatcagatcctgacagagaataccccagtgtctgagcagctttcagttccccagagatctgtgggcagaatcatagggagaggcggcgagacaattcgttctatctgtaaggcatctggagccaaaattacctgtgacaaagaatcagaagggacattactactatcaagacttataaaaatctcaggaacacagaaggaagtggcagcagccaagcatttgatactggagaaagtttcagaagatgaagaacttcggaagagaattgctcattctgcagaaaccagggtcccacgcaaacagccaatcagtgtgagaagagaagacatgacagagccaggtggagctggagagccagcattatggaaaaacaccagttctagcatggagccgactgcacccctggtgactcctccacccaaaggaggaggcgacatggctgtggtagtgtcaaaggaaggttcctgggagaaacctagtgatgacagctttcagaagtctgaagcccaggccatcccagagatgcccatgtttgaaatccccagtcctgacttcagttttcatgctgatgagtacctagaagtctacgtttctgcttctgagcaccctaaccacttctggatccagatcgttggctcccgcagcctgcaattggataagcttgtcaatgagatgacccagcactatgagaatagtgtgcctgaagacttgactgtgcatgtaggagacattgtagcagcacctttacctacaaatggttcctggtatcgagcccgggtcctcggcaccttggagaatgggaacttggacctctattttgttgactttggagataatggagattgcccactgaaggacctcagggctctcagggagtgacttcctaagccttccatttcaagcaataggaatttaacccctacaatcttttgccaggtgaccagtgggaagaggaagctttggatgagtttgatagactcactcattgtgctgactggaagcctctggtagccaagatctctagctatgtcttgctaggaagctcatatcgcgtatcacttcgtgtactaattctagcccgtatactcagagtttcttcccgt

SEQ ID NO: 423223 - DNA, 2391 bp, Homo sapiens
gctacagcagaataaaaactgctgtcaaagagctattgccagctatcagtggtggtacaaggacggttttgtgttcatctgaaacccagctgaatttataattatgtaggaaataaacagttaatatggttatataatagaaacagtaccacacattgtaactaaattatactatgtatgcctacactaccattgtaacttttggaataatgattatactatttgccttattgctttttgaagtatgggtattttagtgcatactttgtagacctcaaaacccatgaagggtctcaaagaagctggctggatacaagcctgctgtggatgcctttttactctcatagattgggattacctaaattcaacctattctctgtttacaaactccaactagagcagctatgcgaccttgtgcctttagactcttggtttttcatttctccccgtcccttccccacctttttaaagtaagccacagcttttctgattgaaagagtgaaaggccagtgcatataatgacaaactgatgataaccttatattggcagtagggggtggggggggcggtggggtgggacgatcagctgtcatcaatttgcacagcaagtattatctcctgataagatgctggtgaatgcaggggagtgagattcattgctcatctttggatatgaagtctgttagggaagaaacagtgccactattcccttagatgcaacagtagcatagcctcttcacccaggcgtcccaaaagcttggcgtgaagatttcagcaaacatgtcttacaacatgaggaggaggagtctaaatcagtcaggggataaaagtatcgaatcattgacaacacacacttggctttagttcttaggagggttttgtttttgtttttgtttttaggttgaagattttcttttaatattcagttttttgaaaaaaaatggatctacactgttaactgattgagactccactgtgattcacttgtttacttaaaaacttttcagggatgtctgtaaatttcagtgttaatatgtcatgaaaagtggtgtggattgatctaaggagggaccagaaataatttttgctattccaaatactgaaggaaaaagataattgatttatactatgttttaaaaaaaaaaaggtattgatgagcccccccccccaggacatttaaccttaaaatttattttaaatgtattcttttattattataagggaaatacagatggctgataaataccaaaaagattcaaaagcagcttaatttaaaaagcacaaagagattctggcttacagtgccccaatctcaatgtttttatagttgctgagctaactaatgtgattattgagtttacagatttaaaaattgtcactgttagagtatctactgtttttatgaagtcaaacttatgctgcctcagaaatccctgggtactgaaatggtaacatggaagtgaagaggtcactttgaaatattggtgagtcacaaagattaaagaaaaggatcagtttgcagatactcagaaaaggttattgaaataattactgaacagcacattttctctctaaaaagtagtttcatatgggttgtatttttaagatcagattatcattttgatatttggtcaaaattttgtaccttaggttacttagagccagatttaacatcatgaacattatgtggctttgtctttactacagatatgtggaactgtaaccaaatatgttgtctctaaaacttgttgattgcaaaatacagttctataaacaaaacccatatgtatatataaatgttaattttgcggaagtctggaaattataactatagcatttaagtttgagtctgtattggacaaataagcaccatgcttttcaaatgatttaaaaattacttttatttgcctctttattttgatggtggttggattttttttttttaatagtaaaatcactaaacttgtgcaatggtagcatggaaattatctgaggtatattgtatgattgtactttagccagggtggacatagcttaaattataaaaactaaagatgaaagtacaaggaagtataagttatacttatgtaagtataaattcatgctgcctacttctaagagaaatttcattcttcataaccacataacattataatgccactgattcatacgggatttacattaattctatgggggaggacactagaattattagtgttcattttcatctaagatctttattctctaacgttcttggtcctattgaaacattgcagtatgcaaaactactgcaatgttaaacccaagagaaaagccattatcatgtgtatgctggtcatcatgatcagtgtggtacaatttttaaaaataaactatcatgcccttcatgcc

SEQ ID NO: 423224 - DNA, 2285 bp, Homo sapiens
cggtgttgcgtcgagttcgcgcagcgactggagcgggcagcgtctctcctggcgcgtagagcggtagtcgtccactgattcagggctcttgtgtacacgtggcgtgtgcttagcgccaaagggctctgtccgcacaggtggtgctgcagctcctcgtgttttgccgtctgccgtcgccgtcttgttaccgttgttcccggaggtcccgattggtttggtctcgcgcgctgcttctgccttggtgccttggtgcccccgcttcccccgacctgtttgttcggttgtgtcagttcagcccgccttgttgtacgtcctgtttgctgtttgtatttcgcgcgagtggggctgtcgtccacgcgttggcggtgcatcgtctcgccgttcagctggtcgtgtcgtgggccgtgggtgtacggggcggtcgcttcgtgcggggggggggggtcccgtcgcaaggcgcctgctgtggcggtgtgttgccatcggtgggtatggaggccgctcgatgctgtgtgtgccgctccgctatgtcgccgtatgcggagagttagtgcttgctggggtcgcgcgtcgctttggtggccggcgccgacacgccctgtggtgcattgagccgttatgtgggtccctgcgagggcgtgcggaccagtgcccctgggaaagttgtttgaagtgacaatgaaatcacagtggagtgctcaatcacttaacaatgttagatccattttgtttcaaaaaactgaatattaaagaaaatctgtcaacctagacgaccgatcaccaatactaaccctcctaagaactaaagccacagctgtgtctttcaatggattcgatacttttatcccctgactgattgagactccactgtgattcacttgtttacttaaaaacttttcagggatgtctgtaaatttcagtgttaatatgtcatgaaaagtggtgtggattgatctaaggagggaccagaaataatttttgctattccaaatactgaaggaaaaagataattgatttatactatgttttaaaaaaaaaaaggtattgatgagcccccccccccaggacatttaaccttaaaatttattttaaatgtattcttttattattataagggaaatacagatggctgataaataccaaaaagattcaaaagcagcttaatttaaaaagcacaaagagattctggcttacagtgccccaatctcaatgtttttatagttgctgagctaactaatgtgattattgagtttacagatttaaaaattgtcactgttagagtatctactgtttttatgaagtcaaacttatgctgcctcagaaatccctgggtactgaaatggtaacatggaagtgaagaggtcactttgaaatattggtgagtcacaaagattaaagaaaaggatcagtttgcagatactcagaaaaggttattgaaataattactgaacagcacattttctctctaaaaagtagtttcatatgggttgtatttttaagatcagattatcattttgatatttggtcaaaattttgtaccttaggttacttagagccagatttaacatcatgaacattatgtggctttgtctttactacagatatgtggaactgtaaccaaatatgttgtctctaaaacttgttgattgcaaaatacagttctataaacaaaacccatatgtatatataaatgttaattttgcggaagtctggaaattataactatagcatttaagtttgagtctgtattggacaaataagcaccatgcttttcaaatgatttaaaaattacttttatttgcctctttattttgatggtggttggattttttttttttaatagtaaaatcactaaacttgtgcaatggtagcatggaaattatctgaggtatattgtatgattgtactttagccagggtggacatagcttaaattataaaaactaaagatgaaagtacaaggaagtataagttatacttatgtaagtataaattcatgctgcctacttctaagagaaatttcattcttcataaccacataacattataatgccactgattcatacgggatttacattaattctatgggggaggacactagaattattagtgttcattttcatctaagatctttattctctaacgttcttggtcctattgaaacattgcagtatgcaaaactactgcaatgttaaacccaagagaaaagccattatcatgtgtatgctggtcatcatgatcagtgtggtacaatttttaaaaataaactatcatgcccttcatgcc

SEQ ID NO: 423225 - DNA, 3113 bp, Homo sapiens
gctacagcagaataaaaactgctgtcaaagagctattgccagctatcagtggtggtacaaggacggttttgtgttcatctgaaacccagctgaatttataattatgtaggaaataaacagttaatatggttatataatagaaacagtaccacacattgtaactaaattatactatgtatgcctacactaccattgtaacttttggaataatgattatactatttgccttattgctttttgaagtatgggtattttagtgcatactttgtagacctcaaaacccatgaagggtctcaaagaagctggctggatacaagcctgctgtggatgcctttttactctcatagattgggattacctaaattcaacctattctctgtttacaaactccaactagagcagctatgcgaccttgtgcctttagactcttggtttttcatttctccccgtcccttccccacctttttaaagtaagccacagcttttctgattgaaagagtgaaaggccagtgcatataatgacaaactgatgataaccttatattggcagtagggggtggggggggcggtggggtgggacgatcagctgtcatcaatttgcacagcaagtattatctcctgataagatgctggtgaatgcaggggagtgagattcattgctcatctttggatatgaagtctgttagggaagaaacagtgccactattcccttagatgcaacagtagcatagcctcttcacccaggcgtcccaaaagcttggcgtgaagatttcagcaaacatgtcttacaacatgaggaggaggagtctaaatcagtcaggggataaaagtatcgaatcattgacaacacacacttggctttagttcttaggagggttttgtttttgtttttgtttttaggttgaagattttcttttaatattcagttttttgaaaaaaaatggatctacactgttaactgattgagactccactgtgattcacttgtttacttaaaaacttttcagggatgtctgtaaatttcagtgttaatatgtcatgaaaagtggtgtggattgatctaaggagggaccagaaataatttttgctattccaaatactgaaggaaaaagataattgatttatactatgttttaaaaaaaaaaaggtattgatgagcccccccccccaggacatttaaccttaaaatttattttaaatgtattcttttattattataagggaaatacagatggctgataaataccaaaaagattcaaaagcagcttaatttaaaaagcacaaagagattctggcttacagtgccccaatctcaatgtttttatagttgctgagctaactaatgtgattattgagtttacagatttaaaaattgtcactgttagagtatctactgtttttatgaagtcaaacttatgctgcctcagaaatccctgggtactgaaatggtaacatggaagtgaagaggtcactttgaaatattggtgagtcacaaagattaaagaaaaggatcagtttgcagatactcagaaaaggttattgaaataattactgaacagcacattttctctctaaaaagtagtttcatatgggttgtatttttaagatcagattatcattttgatatttggtcaaaattttgtaccttaggttacttagagccagatttaacatcatgaacattatgtggctttgtctttactacagatatgtggaactgtaaccaaatatgttgtctctaaaacttgttgattgcaaaatacagttctataaacaaaacccatatgtatatataaatgttaattttgcggaagtctggaaattataactatagcatttaagtttgagtctgtattggacaaataagcaccatgcttttcaaatgatttaaaaattacttttatttgcctctttattttgatggtggttggattttttttttttaatagtaaaatcactaaacttgtgcaatggtagcatggaaattatctgaggtatattgtatgattgtactttagccagggtggacatagcttaaattataaaaactaaagatgaaagtacaaggaagtataagttatacttatgtaagtataaattcatgctgcctacttctaagagaaatttcattcttcataaccacataacattataatgccactgattcatacgggatttacattaattctatgggggaggacactagaattattagtgttcattttcatctaagatctttattctctaacgttcttggtcctattgaaacattgcagtatgcaaaactactgcaatgttaaacccaagagaaaagccattatcatgtgtatgctggtcatcatgatcagtgtggtacaatttttaaaaataaactatcatgcccttcatgccattatttgtctttatttctatgatttataatcctgatatgtgatgtgtttgtaacacagggtgtgcacttgagcctggttttactgtttttattagacagagttgtttatatgctgtaactgtaacgcagcgagactggttctacagccatgtgtcgtaatcttgttccccgtccaagctgttgtatctgaaggtacccagtttgcacccaggatgagggaacgcattcaaaagtgaaatgtaaagccagtgcacgaatattatagtaattgagattttcccaggcttcactgatacagttgttttgcatttattcacaataatacagcagattcttaaatgccgatttttaattgtcttaaattttgctgctgttctcataattaaggacttgaaaaatgttttagtctgtcaagtatgtaaagtttgtgtaaaaacttttaaatgtcattcttaagttcattgccatagccattttccatttatgtcttcattttccaaaaatcaaatgccatgtctgatacctttaagtccataagcattcaattttctcatttccaccttcatctttggttaacagaataagtaaaacagggtattatttatttgtagtctagaaatgttgaatattgttttatttccttcaaaatgttatgattagtgcagatcagccatgtttatctttttaaaaaataaacaggttgctttatttcttaaaaaaa

SEQ ID NO: 423226 - DNA, 2881 bp, Homo sapiens
gctacagcagaataaaaactgctgtcaaagagctattgccagctatcagtggtggtacaaggacggttttgtgttcatctgaaacccagctgaatttataattatgtaggaaataaacagttaatatggttatataatagaaacagtaccacacattgtaactaaattatactatgtatgcctacactaccattgtaacttttggaataatgattatactatttgccttattgctttttgaagtatgggtattttagtgcatactttgtagacctcaaaacccatgaagggtctcaaagaagctggctggatacaagcctgctgtggatgcctttttactctcatagattgggattacctaaattcaacctattctctgtttacaaactccaactagagcagctatgcgaccttgtgcctttagactcttggtttttcatttctccccgtcccttccccacctttttaaagtaagccacagcttttctgattgaaagagtgaaaggccagtgcatataatgacaaactgatgataaccttatattggcagtagggggtggggggggcggtggggtgggacgatcagctgtcatcaatttgcacagcaagtattatctcctgataagatgctggtgaatgcaggggagtgagattcattgctcatctttggatatgaagtctgttagggaagaaacagtgccactattcccttagatgcaacagtagcatagcctcttcacccaggcgtcccaaaagcttggcgtgaagatttcagcaaacatgtcttacaacatgaggaggaggagtctaaatcagtcaggggataaaagtatcgaatcattgacaacacacacttggctttagttcttaggagggttttgtttttgtttttgtttttaggttgaagattttcttttaatattcagttttttgaaaaaaaatggatctacactgttaactgattgagactccactgtgattcacttgtttacttaaaaacttttcagggatgtctgtaaatttcagtgttaatatgtcatgaaaagtggtgtggattgatctaaggagggaccagaaataatttttgctattccaaatactgaaggaaaaagataattgatttatactatgttttaaaaaaaaaaaggtattgatgagcccccccccccaggacatttaaccttaaaatttattttaaatgtattcttttattattataagggaaatacagatggctgataaataccaaaaagattcaaaagcagcttaatttaaaaagcacaaagagattctggcttacagtgccccaatctcaatgtttttatagttgctgagctaactaatgtgattattgagtttacagatttaaaaattgtcactgttagagtatctactgtttttatgaagtcaaacttatgctgcctcagaaatccctgggtactgaaatggtaacatggaagtgaagaggtcactttgaaatattggtgagtcacaaagattaaagaaaaggatcagtttgcagatactcagaaaaggttattgaaataattactgaacagcacattttctctctaaaaagtagtttcatatgggttgtatttttaagatcagattatcattttgatatttggtcaaaattttgtaccttaggttacttagagccagatttaacatcatgaacattatgtggctttgtctttactacagatatgtggaactgtaaccaaatatgttgtctctaaaacttgttgattgcaaaatacagttctataaacaaaacccatatgtatatataaatgttaattttgcggaagtctggaaattataactatagcatttaagtttgagtctgtattggacaaataagcaccatgcttttcaaatgatttaaaaattacttttatttgcctctttattttgatggtggttggattttttttttttaatagtaaaatcactaaacttgtgcaatggtagcatggaaattatctgaggtatattgtatgattgtactttagccagggtggacatagcttaaattataaaaactaaagatgaaagtacaaggaagtataagttatacttatgtaagtataaattcatgctgcctacttctaagagaaatttcattcttcataaccacataacattataatgccattatttgtctttatttctatgatttataatcctgatatgtgatgtgtttgtaacacagggtgtgcacttgagcctggttttactgtttttattagacagagttgtttatatgctgtaactgtaacgcagcgagactggttctacagccatgtgtcgtaatcttgttccccgtccaagctgttgtatctgaaggtacccagtttgcacccaggatgagggaacgcattcaaaagtgaaatgtaaagccagtgcacgaatattatagtaattgagattttcccaggcttcactgatacagttgttttgcatttattcacaataatacagcagattcttaaatgccgatttttaattgtcttaaattttgctgctgttctcataattaaggacttgaaaaatgttttagtctgtcaagtatgtaaagtttgtgtaaaaacttttaaatgtcattcttaagttcattgccatagccattttccatttatgtcttcattttccaaaaatcaaatgccatgtctgatacctttaagtccataagcattcaattttctcatttccaccttcatctttggttaacagaataagtaaaacagggtattatttatttgtagtctagaaatgttgaatattgttttatttccttcaaaatgttatgattagtgcagatcagccatgtttatctttttaaaaaataaacaggttgctttatttcttaaaaaaa

SEQ ID NO: 423227 - DNA, 1031 bp, Homo sapiens
cgacggtggccggcgccctagaggacctatctactgtttttatgaagtcaaacttatgctgcctcagaaatccctgggtactgaaatggtaacatggaagtgaagaggtcactttgaaatattggtgagtcacaaagattaaagaaaaggatcagtttgcagatactcagaaaaggttattgaaataattactgaacagcacattttctctctaaaaagtagtttcatatgggttgtatttttaagatcagattatcattttgatatttggtcaaaattttgtaccttaggttacttagagccagatttaacatcatgaacattatgtggctttgtctttactacagatatgtggaactgtaaccaaatatgttgtctctaaaacttgttgattgcaaaatacagttctataaacaaaacccatatgtatatataaatgttaattttgcggaagtctggaaattataactatagcatttaagtttgagtctgtattggacaaataagcaccatgcttttcaaatgatttaaaaattacttttatttgcctctttattttgatggtggttggattttttttttttaatagtaaaatcactaaacttgtgcaatggtagcatggaaattatctgaggtatattgtatgattgtactttagccagggtggacatagcttaaattataaaaactaaagatgaaagtacaaggaagtataagttatacttatgtaagtataaattcatgctgcctacttctaagagaaatttcattcttcataaccacataacattataatgccactgattcatacgggatttacattaattctatgggggaggacactagaattattagtgttcattttcatctaagatctttattctctaacgttcttggtcctattgaaacattgcagtatgcaaaactactgcaatgttaaacccaagagaaaagccattatcatgtgtatgctggtcatcatgatcagtgtggtacaatttttaaaaataaactatcatgcccttcatgcc

SEQ ID NO: 423228 - DNA, 1979 bp, Homo sapiens
gctacagcagaataaaaactgctgtcaaagagctattgccagctatcagtggtggtacaaggacggttttgtgttcatctgaaacccagctgaatttataattatgtaggaaataaacagttaatatggttatataatagaaacagtaccacacattgtaactaaattatactatgtatgcctacactaccattgtaacttttggaataatgattatactatttgccttattgctttttgaagtatgggtattttagtgcatactttgtagacctcaaaacccatgaagggtctcaaagaagctggctggatacaagcctgctgtggatgcctttttactctcatagattgggattacctaaattcaacctattctctgtttacaaactccaactagagcagctatgcgaccttgtgcctttagactcttggtttttcatttctccccgtcccttccccacctttttaaagtaagccacagcttttctgattgaaagagtgaaaggccagtgcatataatgacaaactgatgataaccttatattggcagtagggggtggggggggcggtggggtgggacgatcagctgtcatcaatttgcacagcaagtattatctcctgataagatgctggtgaatgcaggggagtgagattcattgctcatctttggatatgaagtctgttagggaagaaacagtgccactattcccttagatgcaacagtagcatagcctcttcacccaggcgtcccaaaagcttggcgtgaagatttcagcaaacatgtcttacaacatgaggaggaggagtctaaatcagtcaggggataaaagtatcgaatcattgacaacacacacttggctttagttcttaggagggttttgtttttgtttttgtttttaggttgaagattttcttttaatattcagttttttgaaaaaaaatggatctacactgttaactgattgagactccactgtgattcacttgtttacttaaaaacttttcagggatgtctgtaaatttcagtgttaatatgtcatgaaaagtggtgtggattgatctaaggagggaccagaaataatttttgctattccaaatactgaaggaaaaagataattgatttatactatgttttaaaaaaaaaaaggtattgatgagcccccccccccaggacatttaaccttaaaatttattttaaatgtattcttttattattataagggaaatacagatggctgataaataccaaaaagattcaaaagcagcttaatttaaaaagcacaaagagattctggcttacagtgccccaatctcaatgtttttatagttgctgagctaactaatgtgattattgagtttacagatttaaaaattgtcactgttagagtatctactgtttttatgaagtcaaacttatgctgcctcagaaatccctgggtactgaaatggtaacatggaagtgaagaggtcactttgaaatattggtgagtcacaaagattaaagaaaaggatcagtttgcagatactcagaaaaggttattgaaataattactgaacagcacattttctctctaaaaagtagtttcatatgggttgtatttttaagatcagattatcattttgatatttggtcaaaattttgtaccttaggttacttagagccagatttaacatcatgaacattatgtggctttgtctttactacagatatgtggaactgtaaccaaatatgttgtctctaaaacttgttgattgcaaaatacagttctataaacaaaacccatatgtatatataaatgttaattttgcggaagtctggaaattataactatagcatttaagtttgagtctgtattggacaaataagcaccatgcttttcaaatgatttaaaaattacttttatttgaaaagcatggtgcttatttgtccaatacagactcaaacttaaatgctgtcgacgcggccgcgaatttagtag

SEQ ID NO: 423229 - DNA, 588 bp, Homo sapiens
caaagatttgaattcagaaagtctagggttgggctcaggaatctgagagacagagagagttgagggaaactgagaagccaaccaaggctgacttccaagtctcttgactgttagagactataggaaaaggaaaaggaacatacctcggtgaatacaattgggaacttattccatttgaagtgcctaaggaatatctgagtggcaatcagctatgtgggcctatggttctaatactcaacacacagagagagagagtatggatggctgctgcctgttaatcttaggaccatctcacatcaggatgttccagtaaaaacctttctgataaagtgtgtctaataatgaatcaatacaaatgtgaaaatgatcttttattttggtcttgtggcttaattccaaataatttgcttcatgctccatcttcacaaaagggtttagtctaaatacttggagaattattcgtaacagctctagtttcaggctcctctgtttggcactggttggtggtccagttccttccatctgaccaagatgttacagcctactccaaaaactatgccagggagtgttctgagacataattcctat

SEQ ID NO: 423230 - DNA, 1281 bp, Homo sapiens
acgtgactccgcggccgggccgggacgcgacgggacgcgctgggaccggcgtcgggggtcgcggggaccatgcagcggaggtgggtcttcgtgctgctcgacgtgctgtgcttactggtcgcctccctgcccttcgctatcctgacgctggtgaacgccccgtacaagcgaggattttactgcggggatgactccatccggtacccctaccgtccagataccatcacccacgggctcatggctggggtcaccatcacggccaccgtcatccttgtctcggccggggaagcctacctggtgtacacagaccggctctattctcgctcggacttcaacaactacgtggctgctgtatacaaggtgctggggaccttcctgtttggggctgccgtgagccagtctctgacagacctggccaagtacatgattgggcgtctgaggcccaacttcctagccgtctgcgaccccgactggagccgggtcaactgctcggtctatgtgcagctggagaaggtgtgcaggggaaaccctgctgatgtcaccgaggccaggttgtctttctactcgggacactcttcctttgggatgtactgcatggtgttcttggtgctgtatgtgcaggcacgactctgttggaagtgggcacggctgctgcgacccacagtccagttcttcctggtggcctttgccctctacgtgggctacacccgcgtgtctgattacaaacaccactggagcgatgtccttgttggcctcctgcagggggcactggtggctgccctcactgtctgctacatctcagacttcttcaaagcccgacccccacagcactgtctgaaggaggaggagctggaacggaagcccagcctgtcactgacgttgaccctgggcgaggctgaccacaaccactatggatacccgcactcctcctcctgaggccggaccccgcccaggcagggagctgctgtgagtccagctgaggcccacccaggtggtccctccagccctggttaggcactgagggctctggacgggctccaggaaccctgggctgatgggagcagtgagcgggctccgctgccccctgccctgcactggaccaggagtctggagatgcctgggtagccctcagcatttggaggggaacctgttcccgtcggtccccaaatatccccttctttttatggggttaaggaagggaccgagagatcagatagttgctgttttgtaaaatgtaatgtatatgtggtttttagtaaaatagggcacctgtttcacaaa

SEQ ID NO: 423231 - DNA, 305 bp, Homo sapiens
ctagaggacccccgccttttacaactatctctggaacggaagcccagcctgtcactgacgttgaccctgggcgaggctgaccacaaccactatggatacccgcactcctcctcctgaggccggaccccgcccaggcagggagctgctgtgagtccagctgaggcccacccaggtggtccctccagccctggttaggcactgagggctctggacgggctccaggaaccctgggctgatgggagcagtgagcgggccgccatttacaactatctcacacctttcttagcctggctcctctcaagggc

SEQ ID NO: 423232 - DNA, 1447 bp, Homo sapiens
acgtgactccgcggccgggccgggacgcgacgggacgcgctgggaccggcgtcgggggtcgcggggaccatgcagcggaggtgggtcttcgtgctgctcgacgtgctgtgcttactggtcgcctccctgcccttcgctatcctgacgctggtgaacgccccgtacaagcgaggattttactgcggggatgactccatccggtacccctaccgtccagataccatcacccacgggctcatggctggggtcaccatcacggccaccgtcatccttgtctcggccggggaagcctacctggtgtacacagaccggctctattctcgctcggacttcaacaactacgtggctgctgtatacaaggtgctggggaccttcctgtttggggctgccgtgagccagtctctgacagacctggccaagtacatgattgggcgtctgaggcccaacttcctagccgtctgcgaccccgactggagccgggtcaactgctcggtctatgtgcagctggagaaggtgtgcaggggaaaccctgctgatgtcaccgaggccaggttgtctttctactcgggacactcttcctttgggatgtactgcatggtgttcttggtgctgtatgtgcaggcacgactctgttggaagtgggcacggctgctgcgacccacagtccagttcttcctggtggcctttgccctctacgtgggctacacccgcgtgtctgattacaaacaccactggagcgatgtccttgttggcctcctgcagggggcactggtggctgccctcactgtctgctacatctcagacttcttcaaagcccgacccccacagcactgtctgaaggaggaggagctggaacggaagcccagcctgtcactgacgttgaccctgggcgaggctgaccacaaccactatggatacccgcactcctcctcctgaggccggaccccgcccaggcagggagctgctgtgagtccagctgaggcccacccaggtggtccctccagccctggttaggcactgagggctctggacgggctccaggaaccctgggctgatgggagcagtgagcgggctccgctgccccctgccctgcactggaccaggagtctggagatgcctgggtagccctcagcatttggaggggaacctgttcccgtcggtccccaaatatccccttctttttatggggttaaggaagggaccgagagatcagatagttgctgttttgtaaaatgtaatgtatatgtggtttttagtaaaatagggcacctgtttcacaaaaaaaaaacaaaaaaaaaagaaaacttgcggggagctttattcgcgggggggggcaacaagggttctctggaacttggcacgttggccatagttgttatctgaacacgttttttggacacagggggaaattgggggtcacataaaggggggatacattaaaaagcag

SEQ ID NO: 423233 - DNA, 1386 bp, Homo sapiens
taggctaggtacgaggctgggtgttaatcggccgaggacagacctccctccgcgccccgcactgcgcgcgccctcccaggctcgggggtccccgcgtccaggcccagggggatgggggtcgcgagaggcccggggagccggggccagcatcccccgccccggcagcaggaagtctgtgcggaggggccgcgcgcgcgcctccatcccgccccgcctggcctgggagcctccctgcccttcgctatcctgacgctggtgaacgccccgtacaagcgaggattttactgcggggatgactccatccggtacccctaccgtccagataccatcacccacgggctcatggctggggtcaccatcacggccaccgtcatccttgtctcggccggggaagcctacctggtgtacacagaccggctctattctcgctcggacttcaacaactacgtggctgctgtatacaaggtgctggggaccttcctgtttggggctgccgtgagccagtctctgacagacctggccaagtacatgattgggcgtctgaggcccaacttcctagccgtctgcgaccccgactggagccgggtcaactgctcggtctatgtgcagctggagaaggtgtgcaggggaaaccctgctgatgtcaccgaggccaggttgtctttctactcgggacactcttcctttgggatgtactgcatggtgttcttggtgctgtatgtgcaggcacgactctgttggaagtgggcacggctgctgcgacccacagtccagttcttcctggtggcctttgccctctacgtgggctacacccgcgtgtctgattacaaacaccactggagcgatgtccttgttggcctcctgcagggggcactggtggctgccctcactgtctgctacatctcagacttcttcaaagcccgacccccacagcactgtctgaaggaggaggagctggaacggaagcccagcctgtcactgacgttgaccctgggcgaggctgaccacaaccactatggatacccgcactcctcctcctgaggccggaccccgcccaggcagggagctgctgtgagtccagctgaggcccacccaggtggtccctccagccctggttaggcactgagggctctggacgggctccaggaaccctgggctgatgggagcagtgagcgggctccgctgccccctgccctgcactggaccaggagtctggagatgcctgggtagccctcagcatttggaggggaacctgttcccgtcggtccccaaatatccccttctttttatggggttaaggaagggaccgagagatcagatagttgctgttttgtaaaatgtaatgtatatgtggtttttagtaaaatagggcacctgtttcacaaa

SEQ ID NO: 423234 - DNA, 1219 bp, Homo sapiens
gtgggtagaccgtggcttgtgggttgaccgtggcttgtgggttgaccgtggcttggtcgcctccctgcccttcgctatcctgacgctggtgaacgccccgtacaagcgaggattttactgcggggatgactccatccggtacccctaccgtccagataccatcacccacgggctcatggctggggtcaccatcacggccaccgtcatccttgtctcggccggggaagcctacctggtgtacacagaccggctctattctcgctcggacttcaacaactacgtggctgctgtatacaaggtgctggggaccttcctgtttggggctgccgtgagccagtctctgacagacctggccaagtacatgattgggcgtctgaggcccaacttcctagccgtctgcgaccccgactggagccgggtcaactgctcggtctatgtgcagctggagaaggtgtgcaggggaaaccctgctgatgtcaccgaggccaggttgtctttctactcgggacactcttcctttgggatgtactgcatggtgttcttggtgctgtatgtgcaggcacgactctgttggaagtgggcacggctgctgcgacccacagtccagttcttcctggtggcctttgccctctacgtgggctacacccgcgtgtctgattacaaacaccactggagcgatgtccttgttggcctcctgcagggggcactggtggctgccctcactgtctgctacatctcagacttcttcaaagcccgacccccacagcactgtctgaaggaggaggagctggaacggaagcccagcctgtcactgacgttgaccctgggcgaggctgaccacaaccactatggatacccgcactcctcctcctgaggccggaccccgcccaggcagggagctgctgtgagtccagctgaggcccacccaggtggtccctccagccctggttaggcactgagggctctggacgggctccaggaaccctgggctgatgggagcagtgagcgggctccgctgccccctgccctgcactggaccaggagtctggagatgcctgggtagccctcagcatttggaggggaacctgttcccgtcggtccccaaatatccccttctttttatggggttaaggaagggaccgagagatcagatagttgctgttttgtaaaatgtaatgtatatgtggtttttagtaaaatagggcacctgtttcacaaa

SEQ ID NO: 423235 - DNA, 1040 bp, Homo sapiens
acgtgactccgcggccgggccgggacgcgacgggacgcgctgggaccggcgtcgggggtcgcggggaccatgcagcggaggtgggtcttcgtgctgctcgacgtgctgtgcttactggtcgcctccctgcccttcgctatcctgacgctggtgaacgccccgtacaagcgaggattttactgcggggatgactccatccggtacccctaccgtccagataccatcacccacgggctcatggctggggtcaccatcacggccaccgtcatccttgtctcggccggggaagcctacctggtgtacacagaccggctctattctcgctcggacttcaacaactacgtggctgctgtatacaaggtgctggggaccttcctgtttggggctgccgtgagccagtctctgacagacctggccaagtacatgattgggcgtctgaggcccaacttcctagccgtctgcgaccccgactggagccgggtcaactgctcggtctatgtgcagctggagaaggtgtgcaggggaaaccctgctgatgtcaccgaggccaggttgtctttctactcgggacactcttcctttgggatgtactgcatggtgttcttggtgctgtatgtgcaggcacgactctgttggaagtgggcacggctgctgcgacccacagtccagttcttcctggtggcctttgccctctacgtgggctacacccgcgtgtctgattacaaacaccactggagcgatgtccttgttggcctcctgcagggggcactggtggctgccctcactgtgagcttctaaccctaactctatcccctgtgttgtccagagaccactccccagccaaccctagtgctgccctgggtacccttgccccactgagtccttccttgggcctcctccctgtcagtcctccctgggaccccttcccccaaccccagtccttccctttaccccatccttccccccagtcctcccctggaccccttctccccagtcccagtccttacctggaccctcttcattacccccaaagtcctccc

SEQ ID NO: 423236 - DNA, 597 bp, Homo sapiens
acgtgactccgcggccgggccgggacgcgacgggacgcgctgggaccggcgtcgggggtcgcggggaccatgcagcggaggtgggtcttcgtgctgctcgacgtgctgtgcttactggtcgcctccctgcccttcgctatcctgacgctggtgaacgccccgtacaagcgaggattttactgcggggatgactccatccggtacccctaccgtccagataccatcacccacgggctcatggctggggtcaccatcacggccaccgtcatccttggagctgctgtgagtccagctgaggcccacccaggtggtccctccagccctggttaggcactgagggctctggacgggctccaggaaccctgggctgatgggagcagtgagcgggctccgctgccccctgccctgcactggaccaggagtctggagatgcctgggtagccctcagcatttggaggggaacctgttcccgtcggtccccaaatatccccttctttttatggggttaaggaagggaccgagagatcagatagttgctgttttgtaaaatgtaatgtatatgtggtttttagtaaaatagggcacctgtttcacaaa

SEQ ID NO: 423237 - DNA, 1117 bp, Homo sapiens
  misc_feature (13)..(13): n is a, c, g, or t
  misc_feature (15)..(15): n is a, c, g, or t
actaggctcaagngnttggtcaacaaaccccaggcggtttattaaacgagcatacatacgtcctagtcagctggtgcgatcggacgagcgcgcctcgtctcgagacctggaggcggggacctcgcgtgaggaccagacctccctccgcgccccgcactgcgcgcgccctcccaggctcgggggtccccgcgtccaggcccagggggatgggggtcgcgagaggcccggggagccggggccagcatcccccgccccggcagcaggaagtctgtgcggaggggccgcgcgcgcgcctccatcccgccccgcctggcctgggagcctccctgcccttcgctatcctgacgctggtgaacgccccgtacaagcgaggattttactgcggggatgactccatccggtacccctaccgtccagataccatcacccacgggctcatggctggggtcaccatcacggccaccgtcatccttgtctcggccggggaagcctacctggtgtacacagaccggctctattctcgctcggacttcaacaactacgtggctgctgtatacaaggtgctggggaccttcctgtttggggctgccgtgagccagtctctgacagacctggccaagtacatgattgggcgtctgaggcccaacttcctagccgtctgcgaccccgactggagccgggtcaactgctcggtctatgtgcagctggagaaggtgtgcaggggaaaccctgctgatgtcaccgaggccaggtgggtgtggaccagcagccttcactcttgtggggaatgggagctgaagaaggccctggagccaaatcatgaagagccagcaggcagctgagactacaggcgtgcgccaccacgcccggctaattttttttgtattaagtagagacggggtttcaccatgttggctaggctggtctcgaactcctgacctcaggtgatccacccgcctcggcctcccaaagtgctgggattacaggctgagccaccgtgccaggccatagatagtgtttcttaagagtgagtttgcttctgaggaagacaagtggggggtcgggggcatcccacctccctggccacctccagtggtgtgagttggttgcttgatgt

SEQ ID NO: 423238 - DNA, 1481 bp, Homo sapiens
  misc_feature (13)..(13): n is a, c, g, or t
  misc_feature (15)..(15): n is a, c, g, or t
actaggctcaagngnttggtcaacaaaccccaggcggtttattaaacgagcatacatacgtcctagtcagctggtgcgatcggacgagcgcgcctcgtctcgagacctggaggcggggacctcgcgtgaggaccagacctccctccgcgccccgcactgcgcgcgccctcccaggctcgggggtccccgcgtccaggcccagggggatgggggtcgcgagaggcccggggagccggggccagcatcccccgccccggcagcaggaagtctgtgcggaggggccgcgcgcgcgcctccatcccgccccgcctggcctgggagcctccctgcccttcgctatcctgacgctggtgaacgccccgtacaagcgaggattttactgcggggatgactccatccggtacccctaccgtccagataccatcacccacgggctcatggctggggtcaccatcacggccaccgtcatccttgtctcggccggggaagcctacctggtgtacacagaccggctctattctcgctcggacttcaacaactacgtggctgctgtatacaaggtgctggggaccttcctgtttggggctgccgtgagccagtctctgacagacctggccaagtacatgattgggcgtctgaggcccaacttcctagccgtctgcgaccccgactggagccgggtcaactgctcggtctatgtgcagctggagaaggtgtgcaggggaaaccctgctgatgtcaccgaggccaggttgtctttctactcgggacactcttcctttgggatgtactgcatggtgttcttggtgctgtatgtgcaggcacgactctgttggaagtgggcacggctgctgcgacccacagtccagttcttcctggtggcctttgccctctacgtgggctacacccgcgtgtctgattacaaacaccactggagcgatgtccttgttggcctcctgcagggggcactggtggctgccctcactgtctgctacatctcagacttcttcaaagcccgacccccacagcactgtctgaaggaggaggagctggaacggaagcccagcctgtcactgacgttgaccctgggcgaggctgaccacaaccactatggatacccgcactcctcctcctgaggccggaccccgcccaggcagggagctgctgtgagtccagctgaggcccacccaggtggtccctccagccctggttaggcactgagggctctggacgggctccaggaaccctgggctgatgggagcagtgagcgggctccgctgccccctgccctgcactggaccaggagtctggagatgcctgggtagccctcagcatttggaggggaacctgttcccgtcggtccccaaatatccccttctttttatggggttaaggaagggaccgagagatcagatagttgctgttttgtaaaatgtaatgtatatgtggtttttagtaaaatagggcacctgtttcacaaa

SEQ ID NO: 423239 - DNA, 1240 bp, Homo sapiens
acgtgactccgcggccgggccgggacgcgacgggacgcgctgggaccggcgtcgggggtcgcggggaccatgcagcggagcctccctgcccttcgctatcctgacgctggtgaacgccccgtacaagcgaggattttactgcggggatgactccatccggtacccctaccgtccagataccatcacccacgggctcatggctggggtcaccatcacggccaccgtcatccttgtctcggccggggaagcctacctggtgtacacagaccggctctattctcgctcggacttcaacaactacgtggctgctgtatacaaggtgctggggaccttcctgtttggggctgccgtgagccagtctctgacagacctggccaagtacatgattgggcgtctgaggcccaacttcctagccgtctgcgaccccgactggagccgggtcaactgctcggtctatgtgcagctggagaaggtgtgcaggggaaaccctgctgatgtcaccgaggccaggttgtctttctactcgggacactcttcctttgggatgtactgcatggtgttcttggtgctgtatgtgcaggcacgactctgttggaagtgggcacggctgctgcgacccacagtccagttcttcctggtggcctttgccctctacgtgggctacacccgcgtgtctgattacaaacaccactggagcgatgtccttgttggcctcctgcagggggcactggtggctgccctcactgtctgctacatctcagacttcttcaaagcccgacccccacagcactgtctgaaggaggaggagctggaacggaagcccagcctgtcactgacgttgaccctgggcgaggctgaccacaaccactatggatacccgcactcctcctcctgaggccggaccccgcccaggcagggagctgctgtgagtccagctgaggcccacccaggtggtccctccagccctggttaggcactgagggctctggacgggctccaggaaccctgggctgatgggagcagtgagcgggctccgctgccccctgccctgcactggaccaggagtctggagatgcctgggtagccctcagcatttggaggggaacctgttcccgtcggtccccaaatatccccttctttttatggggttaaggaagggaccgagagatcagatagttgctgttttgtaaaatgtaatgtatatgtggtttttagtaaaatagggcacctgtttcacaaa

SEQ ID NO: 423240 - DNA, 811 bp, Homo sapiens
agaggcttattagaagtgtgaaaacgtaggcttggattaaggcgacagcgatttctaggatagtcagtagaattagaattgtgaagatgataagtgtagagggaaggttaatggttgatattgcatggtgttcttggtgctgtatgtgcaggcacgactctgttggaagtgggcacggctgctgcgacccacagtccagttcttcctggtggcctttgccctctacgtgggctacacccgcgtgtctgattacaaacaccactggagcgatgtccttgttggcctcctgcagggggcactggtggctgccctcactgtctgctacatctcagacttcttcaaagcccgacccccacagcactgtctgaaggaggaggagctggaacggaagcccagcctgtcactgacgttgaccctgggcgaggctgaccacaaccactatggatacccgcactcctcctcctgaggccggaccccgcccaggcagggagctgctgtgagtccagctgaggcccacccaggtggtccctccagccctggttaggcactgagggctctggacgggctccaggaaccctgggctgatgggagcagtgagcgggctccgctgccccctgccctgcactggaccaggagtctggagatgcctgggtagccctcagcatttggaggggaacctgttcccgtcggtccccaaatatccccttctttttatggggttaaggaagggaccgagagatcagatagttgctgttttgtaaaatgtaatgtatatgtggtttttagtaaaatagggcacctgtttcacaaa

SEQ ID NO: 423241 - DNA, 787 bp, Homo sapiens
  misc_feature (749)..(749): n is a, c, g, or t
  misc_feature (758)..(758): n is a, c, g, or t
acgtgactccgcggccgggccgggacgcgacgggacgcgctgggaccggcgtcgggggtcgcggggaccatgcagcggaggtgggtcttcgtgctgctcgacgtgctgtgcttactggtcgcctccctgcccttcgctatcctgacgctggtgaacgccccgtacaagcgaggattttactgcggggatgactccatccggtacccctaccgtccagataccatcacccacgggctcatggctggggtcaccatcacggccaccgtcatccttgtctcggccggggaagcctacctggtgtacacagaccggctctattctcgctcggacttcaacaactacgtggctgctgtatacaaggtgctggggaccttcctgtttggggctgccgtgagccagtctctgacagacctggccaagtacatgattgggcgtctgaggcccaacttcctagccgtctgcgaccccgactggagccgggtcaactgctcggtctatgtgcagctggagaaggtgtgcaggggaaaccctgctgatgtcaccgaggccaggttgtctttctactcgggacactcttcctttgggatgtactgcatggtgttcttggtgctgtatgtgcaggcacgactctgttggaagtgggcacggctgctgcgacccacagtccagttcttcctggtggcctttgccctctacgtgggctacacccgcgtgtctgattacaaacaccactggagagtacaataaancaccacaanacacgctacaaacgggagtaatgtcagtc

SEQ ID NO: 423242 - DNA, 917 bp, Homo sapiens
acgtgactccgcggccgggccgggacgcgacgggacgcgctgggaccggcgtcgggggtcgcggggaccatgcagcggaggtgggtcttcgtgctgctcgacgtgctgtgcttactggtcgcctccctgcccttcgctatcctgacgctggtgaacgccccgtacaagcgaggattttactgcggggatgactccatccggtacccctaccgtccagataccatcacccacgggctcatggctggggtcaccatcacggccaccgtcatccttgtctcggccggggaagcctacctggtgtacacagaccggctctattctcgctcggacttcaacaactacgtggctgctgtatacaaggtgctggggaccttcctgtttggggctgccgtgagccagtctctgacagacctggccaagtacatgattgggcgtctgaggcccaacttcctagccgtctgcgaccccgactggagccgggtcaactgctcggtctatgtgcagctggagaaggtgtgcaggggaaaccctgctgatgtcaccgaggccaggtgggtgtggaccagcagccttcactcttgtggggaatgggagctgaagaaggccctggagccaaatcatgaagagccagcaggcagctgagactacaggcgtgcgccaccacgcccggctaattttttttgtattaagtagagacggggtttcaccatgttggctaggctggtctcgaactcctgacctcaggtgatccacccgcctcggcctcccaaagtgctgggattacaggctgagccaccgtgccaggccatagatagtgtttcttaagagtgagtttgcttctgaggaagacaagtggggggtcgggggcatcccacctccctggccacctccagtggtgtgagttggttgcttgatgt

SEQ ID NO: 423243 - DNA, 230 bp, Homo sapiens
cagctttggaccttattgattgtctgcagttaccaccagaacaaaagaacatacatagattctgcctaggagaaaagaacaatgcttttctttatcatcagcaacgttttcaccatgacccatccccaaaaatactattgtcagaaactgtactctaaagtgattacacagttgcactgaaatagcgtttgtattataacgatcatacaaaagcaatataagaaacctgt

SEQ ID NO: 423244 - DNA, 2535 bp, Homo sapiens
ggcgcagttcgctgcgtgcagcgacgtggcggcggggccggcaccgggcagcggaagtggctccggcggtgggacttgagtgtttgtgttttggttcgtgaaggagccggcggctggccttaggggaggaggcagagggaggaggaggaggaagaattagtcggaactccagcgcgcggcggcggcggcggcggcggaggaggagaaaggaaagaggaagggggagcggcgagaggcggagacggagcccgacaggggcggcaccacggcacgagccccgcacagtccagtgtgaggggagcggcgctaagagcaggcgacgccgccgccgccaccaccaccgccatagatacactctcatcctacgggccacgcctgggccttgctgccaggaagcttcggccccgcagctcggcttgctgcggtctcaggtttctttacctccagaaagaagaatattggccccttgaattctggaagttcattgaagagtctgaaattagggacttatttcaaatttggacatggctagtcgaggcgcaacaagacccaacgggccaaatactggaaataaaatatgccagttcaaactagtacttctgggagagtccgctgttggcaaatcaagcctagtgcttcgttttgtgaaaggccaatttcatgaatttcaagagagtaccattggggctgcttttctaacccaaactgtatgtcttgatgacactacagtaaagtttgaaatatgggatacagctggtcaagaacgataccatagcctagcaccaatgtactacagaggagcacaagcagccatagttgtatatgatatcacaaatgaggagtcctttgcaagagcaaaaaattgggttaaagaacttcagaggcaagcaagtcctaacattgtaatagctttatcgggaaacaaggccgacctagcaaataaaagagcagtagatttccaggaagcacagtcctatgcagatgacaatagtttattattcatggagacatccgctaaaacatcaatgaatgtaaatgaaatattcatggcaatagctaaaaaattgccaaagaatgaaccacaaaatccaggagcaaattctgccagaggaagaggagtagaccttaccgaacccacacaaccaaccaggaatcagtgttgtagtaactaaacctctagtttgaactagctggaatagtcttctgcttcctaaatgttaataacaatggaattggagcatttaaccagcccagtatgacttccaaaagaagagacttatgatagagtcaagtttctaatacagaattattttaagtgttttgaacttaatttttaataacatgcatgggtccctctcactaatgtttcaacaatagggaaaaatgagaactatgtggacacttgtttcattggaaggttagggggaataatttctcatcactaggaatatagacaaatgactgtctgggcccacacagttaaccagcccatttctccacactggtacagtagtcacctgtgaaaaaaaaaattggaacttactaatttgggcttttcaaaaacattctttgtttagaaggagattctaaagttatttatgatgcttagccatagtattcaggcaaatgttcatttctcctggtacctgtatttaaaatgtacattccacattttaataaattaaccacaagaaaataatcccacatatacaaggtcaggggtggggaagagtattaatggtatcttaattatacccagtctggttttttttttttaaatggggtaaaaatcaaatgcaaccccatcttgttttaggaattttgagaactaataaatgcaccttaatggtcagtgttcctttcaaacatgtgagttctttaacaaaaatgaaataaaccaggtgtctgtgatttctaattaatcaccgctggccattacacaggttttgttgtttggggtggggagggggcttttgttcccttttgacataatatagtcaatgcactaacaattatgtatattcaaacttgattattttaaattcgatcttcagctgtactgtaaatagggtactgcattgtagtctccatatctgtattacttttctgtaatatttaagagttgcttaaaagcatacaaaatgtactgttactaaaacagctaattatttctctctccccctttgacaggaaggggcttcagttgttcctccatggctagaaccataataaacaatgtacccgtaatttgtaacataaagtattgcaatatgttagtaacaatcttgcagccttcctttccaaagttcattttattttgatcagttcagtatattgcactaattattttaggtattttcattatatgaaagctaccatgtgtcagagatgatttaatctatttaagtgttggactgctaggagaacttgtacatttatgataatgcagaattaggaaaacggttcaccagtgtttagttttatattgaggtgctcaggttggaataaagtggtataaaaagcaaaaaaaaaaat

SEQ ID NO: 423245 - DNA, 2481 bp, Homo sapiens
ggcgcagttcgctgcgtgcagcgacgtggcggcggggccggcaccgggcagcggaagtggctccggcggtgggacttgagtgtttgtgttttggttcgtgaaggagccggcggctggccttaggggaggaggcagagggaggaggaggaggaagaattagtcggaactccagcgcgcggcggcggcggcggcggcggaggaggagaaaggaaagaggaagggggagcggcgagaggcggagacggagcccgacaggggcggcaccacggcacgagccccgcacagtccagtgtgaggggagcggcgctaagagcaggcgacgccgccgccgccaccaccaccgccatagatacactctcatcctacgggccacgcctgggccttgctgccaggaagcttcggccccgcagctcggcttgctgcggtctcaggtttctttacctccagaaagaagaatattggccccttgaattctggaagttcattgaagagtctgaaattagggacttatttcaaatttggacatggctagtcgaggcgcaacaagacccaacgggccaaatactggaaataacctagtgcttcgttttgtgaaaggccaatttcatgaatttcaagagagtaccattggggctgcttttctaacccaaactgtatgtcttgatgacactacagtaaagtttgaaatatgggatacagctggtcaagaacgataccatagcctagcaccaatgtactacagaggagcacaagcagccatagttgtatatgatatcacaaatgaggagtcctttgcaagagcaaaaaattgggttaaagaacttcagaggcaagcaagtcctaacattgtaatagctttatcgggaaacaaggccgacctagcaaataaaagagcagtagatttccaggaagcacagtcctatgcagatgacaatagtttattattcatggagacatccgctaaaacatcaatgaatgtaaatgaaatattcatggcaatagctaaaaaattgccaaagaatgaaccacaaaatccaggagcaaattctgccagaggaagaggagtagaccttaccgaacccacacaaccaaccaggaatcagtgttgtagtaactaaacctctagtttgaactagctggaatagtcttctgcttcctaaatgttaataacaatggaattggagcatttaaccagcccagtatgacttccaaaagaagagacttatgatagagtcaagtttctaatacagaattattttaagtgttttgaacttaatttttaataacatgcatgggtccctctcactaatgtttcaacaatagggaaaaatgagaactatgtggacacttgtttcattggaaggttagggggaataatttctcatcactaggaatatagacaaatgactgtctgggcccacacagttaaccagcccatttctccacactggtacagtagtcacctgtgaaaaaaaaaattggaacttactaatttgggcttttcaaaaacattctttgtttagaaggagattctaaagttatttatgatgcttagccatagtattcaggcaaatgttcatttctcctggtacctgtatttaaaatgtacattccacattttaataaattaaccacaagaaaataatcccacatatacaaggtcaggggtggggaagagtattaatggtatcttaattatacccagtctggttttttttttttaaatggggtaaaaatcaaatgcaaccccatcttgttttaggaattttgagaactaataaatgcaccttaatggtcagtgttcctttcaaacatgtgagttctttaacaaaaatgaaataaaccaggtgtctgtgatttctaattaatcaccgctggccattacacaggttttgttgtttggggtggggagggggcttttgttcccttttgacataatatagtcaatgcactaacaattatgtatattcaaacttgattattttaaattcgatcttcagctgtactgtaaatagggtactgcattgtagtctccatatctgtattacttttctgtaatatttaagagttgcttaaaagcatacaaaatgtactgttactaaaacagctaattatttctctctccccctttgacaggaaggggcttcagttgttcctccatggctagaaccataataaacaatgtacccgtaatttgtaacataaagtattgcaatatgttagtaacaatcttgcagccttcctttccaaagttcattttattttgatcagttcagtatattgcactaattattttaggtattttcattatatgaaagctaccatgtgtcagagatgatttaatctatttaagtgttggactgctaggagaacttgtacatttatgataatgcagaattaggaaaacggttcaccagtgtttagttttatattgaggtgctcaggttggaataaagtggtataaaaagcaaaaaaaaaaat

SEQ ID NO: 423246 - DNA, 2582 bp, Homo sapiens
tgggtttcccccaacttcattttttaagactatcagtgcatttctttaattgtagagcaattttgaaatgcagtcttcgctgggcttggtggcttacgcctgtcatcccagcactttgggaggccaaggtgggcggatcacctgagatcaggagttcgagaccagcctggccaacatggtgaaaccccatctctactaaaactacaaaaattagccacgtgtggtggtgcatgcctgtagtcccagctactcaggaggctgaggcaggagaattgcttgaacccgggaggcggaggttgcagtgagctgagatcgcgcccctgcactctagtctgagactcttgtatcaaaaaaaaaaaaaaaaagaagaaggaaaagaaatgtagtcttaagtttatttagtattataacaagcttttttaagatgcagaagtttttcaatctgtgatttcactacaaaggccctatatgtaagcatatatgtaaatagcttagaagcacaggtttgccagtatttaaagctattatcagctgtgggtatgcaatctgtcaagtttctaggtgttttctttttttttcccccctcatttattacttttaactgacacataatagttgtacatacttacggggtacagtgtgacattttgatagatgtatacaagcaggtgttttctatattatgaaaacatttggagaaaaatgattgacttattgtagtccttttctttcagctgcttttctaacccaaactgtatgtcttgatgacactacagtaaagtttgaaatatgggatacagctggtcaagaacgataccatagcctagcaccaatgtactacagaggagcacaagcagccatagttgtatatgatatcacaaatgaggagtcctttgcaagagcaaaaaattgggttaaagaacttcagaggcaagcaagtcctaacattgtaatagctttatcgggaaacaaggccgacctagcaaataaaagagcagtagatttccaggaagcacagtcctatgcagatgacaatagtttattattcatggagacatccgctaaaacatcaatgaatgtaaatgaaatattcatggcaatagctaaaaaattgccaaagaatgaaccacaaaatccaggagcaaattctgccagaggaagaggagtagaccttaccgaacccacacaaccaaccaggaatcagtgttgtagtaactaaacctctagtttgaactagctggaatagtcttctgcttcctaaatgttaataacaatggaattggagcatttaaccagcccagtatgacttccaaaagaagagacttatgatagagtcaagtttctaatacagaattattttaagtgttttgaacttaatttttaataacatgcatgggtccctctcactaatgtttcaacaatagggaaaaatgagaactatgtggacacttgtttcattggaaggttagggggaataatttctcatcactaggaatatagacaaatgactgtctgggcccacacagttaaccagcccatttctccacactggtacagtagtcacctgtgaaaaaaaaaattggaacttactaatttgggcttttcaaaaacattctttgtttagaaggagattctaaagttatttatgatgcttagccatagtattcaggcaaatgttcatttctcctggtacctgtatttaaaatgtacattccacattttaataaattaaccacaagaaaataatcccacatatacaaggtcaggggtggggaagagtattaatggtatcttaattatacccagtctggttttttttttttaaatggggtaaaaatcaaatgcaaccccatcttgttttaggaattttgagaactaataaatgcaccttaatggtcagtgttcctttcaaacatgtgagttctttaacaaaaatgaaataaaccaggtgtctgtgatttctaattaatcaccgctggccattacacaggttttgttgtttggggtggggagggggcttttgttcccttttgacataatatagtcaatgcactaacaattatgtatattcaaacttgattattttaaattcgatcttcagctgtactgtaaatagggtactgcattgtagtctccatatctgtattacttttctgtaatatttaagagttgcttaaaagcatacaaaatgtactgttactaaaacagctaattatttctctctccccctttgacaggaaggggcttcagttgttcctccatggctagaaccataataaacaatgtacccgtaatttgtaacataaagtattgcaatatgttagtaacaatcttgcagccttcctttccaaagttcattttattttgatcagttcagtatattgcactaattattttaggtattttcattatatgaaagctaccatgtgtcagagatgatttaatctatttaagtgttggactgctaggagaacttgtacatttatgataatgcagaattaggaaaacggttcaccagtgtttagttttatattgaggtgctcaggttggaataaagtggtataaaaagcaaaaaaaaaaat

SEQ ID NO: 423247 - DNA, 2493 bp, Homo sapiens
ggcgcagttcgctgcgtgcagcgacgtggcggcggggccggcaccgggcagcggaagtggctccggcggtgggacttgagtgtttgtgttttggttcgtgaaggagccggcggctggccttaggggaggaggcagagggaggaggaggaggaagaattagtcggaactccagcgcgcggcggcggcggcggcggcggaggaggagaaaggaaagaggaagggggagcggcgagaggcggagacggagcccgacaggggcggcaccacggcacgagccccgcacagtccagtgtgaggggagcggcgctaagagcaggcgacgccgccgccgccaccaccaccgccatagatacactctcatcctacgggccacgcctgggccttgctgccaggaagcttcggccccgcagctcggcttgctgcggtctcaggtttctttacctccagaaagaagaatattggccccttgaattctggaagttcattgaagagtctgaaattagggacttatttcaaatttggacatggctagtcgaggcgcaacaagacccaacgggccaaatactggaaataaaatatgccagttcaaactagtacttctgggagagtccgctgttggcaaatcaagcctagtgcttcgttttgtgaaaggccaatttcatgaatttcaagagagtaccattggggtaaagtttgaaatatgggatacagctggtcaagaacgataccatagcctagcaccaatgtactacagaggagcacaagcagccatagttgtatatgatatcacaaatgaggagtcctttgcaagagcaaaaaattgggttaaagaacttcagaggcaagcaagtcctaacattgtaatagctttatcgggaaacaaggccgacctagcaaataaaagagcagtagatttccaggaagcacagtcctatgcagatgacaatagtttattattcatggagacatccgctaaaacatcaatgaatgtaaatgaaatattcatggcaatagctaaaaaattgccaaagaatgaaccacaaaatccaggagcaaattctgccagaggaagaggagtagaccttaccgaacccacacaaccaaccaggaatcagtgttgtagtaactaaacctctagtttgaactagctggaatagtcttctgcttcctaaatgttaataacaatggaattggagcatttaaccagcccagtatgacttccaaaagaagagacttatgatagagtcaagtttctaatacagaattattttaagtgttttgaacttaatttttaataacatgcatgggtccctctcactaatgtttcaacaatagggaaaaatgagaactatgtggacacttgtttcattggaaggttagggggaataatttctcatcactaggaatatagacaaatgactgtctgggcccacacagttaaccagcccatttctccacactggtacagtagtcacctgtgaaaaaaaaaattggaacttactaatttgggcttttcaaaaacattctttgtttagaaggagattctaaagttatttatgatgcttagccatagtattcaggcaaatgttcatttctcctggtacctgtatttaaaatgtacattccacattttaataaattaaccacaagaaaataatcccacatatacaaggtcaggggtggggaagagtattaatggtatcttaattatacccagtctggttttttttttttaaatggggtaaaaatcaaatgcaaccccatcttgttttaggaattttgagaactaataaatgcaccttaatggtcagtgttcctttcaaacatgtgagttctttaacaaaaatgaaataaaccaggtgtctgtgatttctaattaatcaccgctggccattacacaggttttgttgtttggggtggggagggggcttttgttcccttttgacataatatagtcaatgcactaacaattatgtatattcaaacttgattattttaaattcgatcttcagctgtactgtaaatagggtactgcattgtagtctccatatctgtattacttttctgtaatatttaagagttgcttaaaagcatacaaaatgtactgttactaaaacagctaattatttctctctccccctttgacaggaaggggcttcagttgttcctccatggctagaaccataataaacaatgtacccgtaatttgtaacataaagtattgcaatatgttagtaacaatcttgcagccttcctttccaaagttcattttattttgatcagttcagtatattgcactaattattttaggtattttcattatatgaaagctaccatgtgtcagagatgatttaatctatttaagtgttggactgctaggagaacttgtacatttatgataatgcagaattaggaaaacggttcaccagtgtttagttttatattgaggtgctcaggttggaataaagtggtataaaaagcaaaaaaaaaaat

SEQ ID NO: 423248 - DNA, 1767 bp, Homo sapiens
aagctgcatacatcattgtatatgatctcacaactgatgagtccttggccatagccataactggggtctaggaacattcatgagtgcatgacctagttgttaagattgtttctacgcttaatcgagtcacggggccgaccgagcgtatagaagagctgcagatggccatgcagacgctacatccatttggcatcatgtaccaactaggtaagtctctatgcgaatgcgtacgactatacagaatatacagcactcgctccagtgtaaatgaaatattcatggcaatagctaaaaaattgccaaagaatgaaccacaaaatccaggagcaaattctgccagaggaagaggagtagaccttaccgaacccacacaaccaaccaggaatcagtgttgtagtaactaaacctctagtttgaactagctggaatagtcttctgcttcctaaatgttaataacaatggaattggagcatttaaccagcccagtatgacttccaaaagaagagacttatgatagagtcaagtttctaatacagaattattttaagtgttttgaacttaatttttaataacatgcatgggtccctctcactaatgtttcaacaatagggaaaaatgagaactatgtggacacttgtttcattggaaggttagggggaataatttctcatcactaggaatatagacaaatgactgtctgggcccacacagttaaccagcccatttctccacactggtacagtagtcacctgtgaaaaaaaaaattggaacttactaatttgggcttttcaaaaacattctttgtttagaaggagattctaaagttatttatgatgcttagccatagtattcaggcaaatgttcatttctcctggtacctgtatttaaaatgtacattccacattttaataaattaaccacaagaaaataatcccacatatacaaggtcaggggtggggaagagtattaatggtatcttaattatacccagtctggttttttttttttaaatggggtaaaaatcaaatgcaaccccatcttgttttaggaattttgagaactaataaatgcaccttaatggtcagtgttcctttcaaacatgtgagttctttaacaaaaatgaaataaaccaggtgtctgtgatttctaattaatcaccgctggccattacacaggttttgttgtttggggtggggagggggcttttgttcccttttgacataatatagtcaatgcactaacaattatgtatattcaaacttgattattttaaattcgatcttcagctgtactgtaaatagggtactgcattgtagtctccatatctgtattacttttctgtaatatttaagagttgcttaaaagcatacaaaatgtactgttactaaaacagctaattatttctctctccccctttgacaggaaggggcttcagttgttcctccatggctagaaccataataaacaatgtacccgtaatttgtaacataaagtattgcaatatgttagtaacaatcttgcagccttcctttccaaagttcattttattttgatcagttcagtatattgcactaattattttaggtattttcattatatgaaagctaccatgtgtcagagatgatttaatctatttaagtgttggactgctaggagaacttgtacatttatgataatgcagaattaggaaaacggttcaccagtgtttagttttatattgaggtgctcaggttggaataaagtggtataaaaagcaaaaaaaaaaat

SEQ ID NO: 423249 - DNA, 1455 bp, Homo sapiens
ggcgcagttcgctgcgtgcagcgacgtggcggcggggccggcaccgggcagcggaagtggctccggcggtgggacttgagtgtttgtgttttggttcgtgaaggagccggcggctggccttaggggaggaggcagagggaggaggaggaggaagaattagtcggaactccagcgcgcggcggcggcggcggcggcggaggaggagaaaggaaagaggaagggggagcggcgagaggcggagacggagcccgacaggggcggcaccacggcacgagccccgcacagtccagtgtgaggggagcggcgctaagagcaggcgacgccgccgccgccaccaccaccgccatagatacactctcatcctacgggccacgcctgggccttgctgccaggaagcttcggccccgcagctcggcttgctgcggtctcaggtttctttacctccagaaagaagaatattggccccttgaattctggaagttcattgaagagtctgaaattagggacttatttcaaatttggacatggctagtcgaggcgcaacaagacccaacgggccaaatactggaaataaaatatgccagttcaaactagtacttctgggagagtccgctgttggcaaatcaagcctagtgcttcgttttgtgaaaggccaatttcatgaatttcaagagagtaccattggggctgcttttctaacccaaactgtatgtcttgatgacactacagtaaagtttgaaatatgggatacagctggtcaagaacgataccatagcctagcaccaatgtactacagaggagcacaagcagccatagttgtatatgatatcacaaatgaggagtcctttgcaagagcaaaaaattgggttaaagaacttcagaggcaagcaagtcctaacattgtaatagctttatcgggaaacaaggccgacctagcaaataaaagagcagtagatttccaggaagcacagtcctatgcagatgacaatagtttattattcatggagacatccgctaaaacatcaatgaatgtaaatgaaatattcatggcaatagctaaaaaattgccaaagaatgaaccacaaaatccaggagcaaattctgccagaggaagaggagtagaccttaccgaacccacacaaccaaccaggaatcagtgttgtagtaactaaacctctagtttgaactagctggaatagtcttctgcttcctaaatgttaataacaatggaattggagcatttaaccagcccagtatgacttccaaaagaagagacttatgatagatgaaagctaccatgtgtcagagatgatttaatctatttaagtgttggactgctaggagaacttgtacatttatgataatgcagaattaggaaaacggttcaccagtgtttagttttatattgaggtgctcaggttggaataaagtggtataaaaagcaaaaaaaaaaat

SEQ ID NO: 423250 - DNA, 1545 bp, Homo sapiens
ggcgcagttcgctgcgtgcagcgacgtggcggcggggccggcaccgggcagcggaagtggctccggcggtgggacttgagtgtttgtgttttggttcgtgaaggagccggcggctggccttaggggaggaggcagagggaggaggaggaggaagaattagtcggaactccagcgcgcggcggcggcggcggcggcggaggaggagaaaggaaagaggaagggggagcggcgagaggcggagacggagcccgacaggggcggcaccacggcacgagccccgcacagtccagtgtgaggggagcggcgctaagagcaggcgacgccgccgccgccaccaccaccgccatagatacactctcatcctacgggccacgcctgggccttgctgccaggaagcttcggccccgcagctcggcttgctgcggtctcaggtttctttacctccagaaagaagaatattggccccttgaattctggaagttcattgaagagtctgaaattagggacttatttcaaatttggacatggctagtcgaggcgcaacaagacccaacgggccaaatactggaaataaaatatgccagttcaaactagtacttctgggagagtccgctgttggcaaatcaagcctagtgcttcgttttgtgaaaggccaatttcatgaatttcaagagagtaccattggggctgcttttctaacccaaactgtatgtcttgatgacactacagtaaagtttgaaatatgggatacagctggtcaagaacgataccatagcctagcaccaatgtactacagaggagcacaagcagccatagttgtatatgatatcacaaatgaggagtcctttgcaagagcaaaaaattgggttaaagaacttcagaggcaagcaagtcctaacattgtaatagctttatcgggaaacaaggccgacctagcaaataaaagagcagtagatttccaggaagcacagtcctatgcagatgacaatagtttattattcatggagacatccgctaaaacatcaatgaatgtaaatgaaatattcatggcaataggtaagattaatatctctttttaaatgatcaatataagcaaaacaagtgtgaagcatatttggtttgactgtctcttttttaaaaaatttttgggggtgggtttgtgtgtatgtttatgtgtgtgtgtgagagagagagagagattataccacttttctaagtcccttccacaaaacaatattttgttggtaatattgttaaatttgaaagatgattacctattaggttgtaatactgtcagtttaggcagcttcttccaggtgagttaagccttaacctcttaacctgatagttcagacagacagattttgcaaaggtttcgctgggaaatttggataaatattttttttattagattatactttttaaaaatcaaattattggtaaatataactcagaagaacatgacacataagtatacagattgacaaattattttaatgtaaacattataaggaagatgatttcaaagcatagaggcgtaaggaa

SEQ ID NO: 423251 - DNA, 2327 bp, Homo sapiens
cgtcgccgggcgattcacacgggactgtgcggggctcgtgccatggtgctgccctgtcgggctccgtctccgactctcgccgctcccccttcctctttcctttctcctcctccgccgccgccgccaccaccaccgccatagatacactctcatcctacgggccacgcctgggccttgctgccaggaagcttcggccccgcagctcggcttgctgcggtctcaggtttctttacctccagaaagaagaatattggccccttgaattctggaagttcattgaagagtctgaaattagggacttatttcaaatttggacatggctagtcgaggcgcaacaagacccaacgggccaaatactggaaataaaatatgccagttcaaactagtacttctgggagagtccgctgttggcaaatcaagcctagtgcttcgttttgtgaaaggccaatttcatgaatttcaagagagtaccattggggctgcttttctaacccaaactgtatgtcttgatgacactacagtaaagtttgaaatatgggatacagctggtcaagaacgataccatagcctagcaccaatgtactacagaggagcacaagcagccatagttgtatatgatatcacaaatgaggagtcctttgcaagagcaaaaaattgggttaaagaacttcagaggcaagcaagtcctaacattgtaatagctttatcgggaaacaaggccgacctagcaaataaaagagcagtagatttccaggaagcacagtcctatgcagatgacaatagtttattattcatggagacatccgctaaaacatcaatgaatgtaaatgaaatattcatggcaatagctaaaaaattgccaaagaatgaaccacaaaatccaggagcaaattctgccagaggaagaggagtagaccttaccgaacccacacaaccaaccaggaatcagtgttgtagtaactaaacctctagtttgaactagctggaatagtcttctgcttcctaaatgttaataacaatggaattggagcatttaaccagcccagtatgacttccaaaagaagagacttatgatagagtcaagtttctaatacagaattattttaagtgttttgaacttaatttttaataacatgcatgggtccctctcactaatgtttcaacaatagggaaaaatgagaactatgtggacacttgtttcattggaaggttagggggaataatttctcatcactaggaatatagacaaatgactgtctgggcccacacagttaaccagcccatttctccacactggtacagtagtcacctgtgaaaaaaaaaattggaacttactaatttgggcttttcaaaaacattctttgtttagaaggagattctaaagttatttatgatgcttagccatagtattcaggcaaatgttcatttctcctggtacctgtatttaaaatgtacattccacattttaataaattaaccacaagaaaataatcccacatatacaaggtcaggggtggggaagagtattaatggtatcttaattatacccagtctggttttttttttttaaatggggtaaaaatcaaatgcaaccccatcttgttttaggaattttgagaactaataaatgcaccttaatggtcagtgttcctttcaaacatgtgagttctttaacaaaaatgaaataaaccaggtgtctgtgatttctaattaatcaccgctggccattacacaggttttgttgtttggggtggggagggggcttttgttcccttttgacataatatagtcaatgcactaacaattatgtatattcaaacttgattattttaaattcgatcttcagctgtactgtaaatagggtactgcattgtagtctccatatctgtattacttttctgtaatatttaagagttgcttaaaagcatacaaaatgtactgttactaaaacagctaattatttctctctccccctttgacaggaaggggcttcagttgttcctccatggctagaaccataataaacaatgtacccgtaatttgtaacataaagtattgcaatatgttagtaacaatcttgcagccttcctttccaaagttcattttattttgatcagttcagtatattgcactaattattttaggtattttcattatatgaaagctaccatgtgtcagagatgatttaatctatttaagtgttggactgctaggagaacttgtacatttatgataatgcagaattaggaaaacggttcaccagtgtttagttttatattgaggtgctcaggttggaataaagtggtataaaaagcaaaaaaaaaaat

SEQ ID NO: 423252 - DNA, 2441 bp, Homo sapiens
ggcgcagttcgctgcgtgcagcgacgtggcggcggggccggcaccgggcagcggaagtggctccggcggtgggacttgagtgtttgtgttttggttcgtgaaggagccggcggctggccttaggggaggaggcagagggaggaggaggaggaagaattagtcggaactccagcgcgcggcggcggcggcggcggcggaggaggagaaaggaaagaggaagggggagcggcgagaggcggagacggagcccgacaggggcggcaccacggcacgagccccgcacagtccagtgtgaggggagcggcgctaagagcaggcgacgccgccgccgccaccaccaccgccatagatacactctcatcctacgggccacgcctgggccttgctgccaggaagcttcggccccgcagctcggcttgctgcggtctcaggtttctttacctccagaaagaagaatattggccccttgaattctggaagttcattgaagagtctgaaattagggacttatttcaaatttggacatggctagtcgaggcgcaacaagacccaacgggccaaatactggaaataaaatatgccagttcaaactagtacttctgggagagtccgctgttggcaaatcaagcctagtgcttcgttttgtgaaaggccaatttcatgaatttcaagagagtaccattggggctgcttttctaacccaaactgtatgtcttgatgacactacagtaaagtttgaaatatgggatacagctggtcaagaacgataccatagcctagcaccaatgtactacagaggagcacaagcagccatagttgtatatgatatcacaaatgaggagtcctttgcaagagcaaaaaattgggttaaagaacttcagaggcaagcaagtcctaacattgtaatagctttatcgggaaacaaggccgacctagcaaataaaagagcagtagatttccaggaagcacagtcctatgcagatgacaatagtttattattcatggagacatccgctaaaacatcaatgaatgtaaatgaaatattcatggcaatagctaaaaaattgccaaagaatgaaccacaaaatccaggagcaaattctgccagaggaagaggagtagaccttaccgaacccacacaaccaaccaggaatcagtgttgtagtaactaaacctctagtttgaactagctggaatagtcttctgcttcctaaatgttaataacaatggaattggagcatttaaccagcccagtatgacttccaaaagaagagacttatgatagagtcaagtttctaatacagaattattttaagtgttttgaacttaatttttaataacatgcatgggtccctctcactaatgtttcaacaatagggaaaaatgagaactatgtggacacttgtttcattggaaggttagggggaataatttctcatcactaggaatatagacaaatgactgtctgggcccacacagttaaccagcccatttctccacactggtacagtagtcacctgtgaaaaaaaaaattggaacttactaatttgggcttttcaaaaacattctttgtttagaaggagattctaaagttatttatgatgcttagccatagtattcaggcaaatgttcatttctcctggtacctgtatttaaaatgtacattccacattttaataaattaaccacaagaaaataatcccacatatacaaggtcaggggtggggaagagtattaatggtatcttaattatacccagtctggttttttttttttaaatggggtaaaaatcaaatgcaaccccatcttgttttaggaattttgagaactaataaatgcaccttaatggtcagtgttcctttcaaacatgtgagttctttaacaaaaatgaaataaaccaggtgtctgtgatttctaattaatcaccgctggccattacacaggttttgttgtttggggtggggagggggcttttgttcccttttgacataatatagtcaatgcactaacaattatgtatattcaaacttgattattttaaattcgatcttcagctgtactgtaaatagggtactgcattgtagtctccatatctgtattacttttctgtaatatttaagagttgcttaaaagcatacaaaatgtactgttactaaaacagctaattatttctctctccccctttgacaggaaggggcttcagttgttcctccatggctagaaccataataaacaatgtacccgtaatttgtaacataaagtattgcaatatgttagtaacaatcttgcagccttcctttccaaagttcattttattttgatcagttcagtatattgcactaattattttaggtattttcattatatgaaagctaccatgtgtcagagatgatttaatctatttaagtgttggacttgttgattattgagggcctaggtgg

SEQ ID NO: 423253 - DNA, 2008 bp, Homo sapiens
  misc_feature (1976)..(1976): n is a, c, g, or t
ggcgcagttcgctgcgtgcagcgacgtggcggcggggccggcaccgggcagcggaagtggctccggcggtgggacttgagtgtttgtgttttggttcgtgaaggagccggcggctggccttaggggaggaggcagagggaggaggaggaggaagaattagtcggaactccagcgcgcggcggcggcggcggcggcggaggaggagaaaggaaagaggaagggggagcggcgagaggcggagacggagcccgacaggggcggcaccacggcacgagccccgcacagtccagtgtgaggggagcggcgctaagagcaggcgacgccgccgccgccaccaccaccgccatagatacactctcatcctacgggccacgcctgggccttgctgccaggaagcttcggccccgcagctcggcttgctgcggtctcaggtttctttacctccagaaagaagaatattggccccttgaattctggaagttcattgaagagtctgaaattagggacttatttcaaatttggacatggctagtcgaggcgcaacaagacccaacgggccaaatactggaaataaaatatgccagttcaaactagtacttctgggagagtccgctgttggcaaatcaagcctagtgcttcgttttgtgaaaggccaatttcatgaatttcaagagagtaccattggggctgcttttctaacccaaactgtatgtcttgatgacactacagtaaagtttgaaatatgggatacagctggtcaagaacgataccatagcctagcaccaatgtactacagaggagcacaagcagccatagttgtatatgatatcacaaatgaggagtcctttgcaagagcaaaaaattgggttaaagaacttcagaggcaagcaagtcctaacattgtaatagctttatcgggaaacaaggccgacctagcaaataaaagagcagtagatttccaggaagcacagtcctatgcagatgacaatagtttattattcatggagacatccgctaaaacatcaatgaatgtaaatgaaatattcatggcaatagctaaaaaattgccaaagaatgaaccacaaaatccaggagcaaattctgccagaggaagaggagtagaccttaccgaacccacacaaccaaccaggaatcagtgttgtagtaactaaacctctagtttgaactagctggaatagtcttctgcttcctaaatgttaataacaatggaattggagcatttaaccagcccagtatgacttccaaaagaagagacttatgatagagtcaagtttctaatacagaattattttaagtgttttgaacttaatttttaataacatgcatgggtccctctcactaatgtttcaacaatagggaaaaatgagaactatgtggacacttgtttcattggaaggttagggggaataatttctcatcactaggaatatagacaaatgactgtctgggcccacacagttaaccagcccatttctccacactggtacagtagtcacctgtgaaaaaaaaaattggaacttactaatttgggcttttcaaaaacattctttgtttagaaggagattctaaagttatttatgatgcttagccatagtattcaggcaaatgttcatttctcctggtacctgtatttaaaatgtacattccacattttaataaattaaccacaagaaaataatcccacatatacaaggtcaggggtggggaagagtattaatggtatcttaattatacccagtctggttttttttttttaaatggggtaaaaatcaaatgcaaccccatcttgttttaggaattttgagaactaataaatgcaccttaatggtcagtgttcctttcaaacatgtgagttctttaacaaaaatgaaataaaccaggtgtctgtgatttctaattaatcaccgctggccattacacaggttttgttgttcggaatgggtgcatggggatcntctagagtcgggccttcaggaaggggttcaaa

SEQ ID NO: 423254 - DNA, 1180 bp, Homo sapiens
  misc_feature (1179)..(1179): n is a, c, g, or t
ggcgcagttcgctgcgtgcagcgacgtggcggcggggccggcaccgggcagcggaagtggctccggcggtgggacttgagtgtttgtgttttggttcgtgaaggagccggcggctggccttaggggaggaggcagagggaggaggaggaggaagaattagtcggaactccagcgcgcggcggcggcggcggcggcggaggaggagaaaggaaagaggaagggggagcggcgagaggcggagacggagcccgacaggggcggcaccacggcacgagccccgcacagtccagtgtgaggggagcggcgctaagagcaggcgacgccgccgccgccaccaccaccgccatagatacactctcatcctacgggccacgcctgggccttgctgccaggaagcttcggccccgcagctcggcttgctgcggtctcaggtttctttacctccagaaagaagaatattggccccttgaattctggaagttcattgaagagtctgaaattagggacttatttcaaatttggacatggctagtcgaggcgcaacaagacccaacgggccaaatactggaaataaaatatgccagttcaaactagtacttctgggagagtccgctgttggcaaatcaagcctagtgcttcgttttgtgaaaggccaatttcatgaatttcaagagagtaccattggggctgcttttctaacccaaactgtatgtcttgatgacactacagtaaagtttgaaatatgggatacagctggtcaagaacgataccatagcctagcaccaatgtactacagaggagcacaagcagccatagttgtatatgatatcacaaatgaggagtcctttgcaagagcaaaaaattgggttaaagaacttcagaggcaagcaagtcctaacattgtaatagctttatcgggaaacaaggccgacctagcaaataaaagagcagtagatttccaggaagcacagtcctatgcagatgacaatagtttattattcatggagacatccgctaaaacatcaatgaatgtaaatgaaatattcatggcaatagctaaaaaattgccaaagaatgaaccacaaaatccaggagcaaattctgccagaggaagaggagtagaccttaccgaacccacacaaccaaccagtgaaatcccccagtgaatccacgtttgcng

SEQ ID NO: 423255 - DNA, 1103 bp, Homo sapiens
ggcgcagttcgctgcgtgcagcgacgtggcggcggggccggcaccgggcagcggaagtggctccggcggtgggacttgagtgtttgtgttttggttcgtgaaggagccggcggctggccttaggggaggaggcagagggaggaggaggaggaagaattagtcggaactccagcgcgcggcggcggcggcggcggcggaggaggagaaaggaaagaggaagggggagcggcgagaggcggagacggagcccgacaggggcggcaccacggcacgagccccgcacagtccagtgtgaggggagcggcgctaagagcaggcgacgccgccgccgccaccaccaccgccatagatacactctcatcctacgggccacgcctgggccttgctgccaggaagcttcggccccgcagctcggcttgctgcggtctcaggtttctttacctccagaaagaagaatattggccccttgaattctggaagttcattgaagagtctgaaattagggacttatttcaaatttggacatggctagtcgaggcgcaacaagacccaacgggccaaatactggaaataaaatatgccagttcaaactagtacttctgggagagtccgctgttggcaaatcaagcctagtgcttcgttttgtgaaaggccaatttcatgaatttcaagagagtaccattggggctgcttttctaacccaaactgtatgtcttgatgacactacagtaaagtttgaaatatgggatacagctggtcaagaacgataccatagcctagcaccaatgtactacagaggagcacaagcagccatagttgtatatgatatcacaaatgaggagtcctttgcaagagcaaaaaattgggttaaagaacttcagaggcaagcaagtcctaacattgtaatagctttatcgggaaacaaggccgacctagcaaataaaagagcagtagatttccaggaagcacagtcctatgcagatgacaatagtttattattcatggagacatccgctaaaacatcaatgaatgtaaatgaaatattcatggcaatagctaaaaaatgtccaaagaatgaactgcttggcagtttggaccgacct

SEQ ID NO: 423256 - DNA, 2395 bp, Homo sapiens
aggattgagggaagggaacccgcgccgccggaaggagccgctcgcttcacggcgctgggacccgggctggaaggcagggcatcagctatggaacaacctgggcaggatcccacctcagacgacgtcatggactcgttcctggaaaagttccagagccagccttaccgtggcggctttcatgaggaccagtgggagaaggaatttgaaaaggtccccctatttatgacgagagcgccatcagaaattgatcccagggagaatcctgacttggcttgtctccagtcaattatttttgatgaggagcgttctccagaagaacaggccaagacctataaagatgagggcaatgattactttaaagaaaaagactacaagaaagctgtaatttcatacactgaaggcttaaagaagaaatgtgcagatcctgatttgaatgctgtcctttataccaaccgggcagcagcacagtactatctgggcaattttcgttctgctctcaatgatgtgacagctgccagaaagctaaaaccctgccacctcaaagcaataataagaggtgccttatgccatctggaactgaaacactttgccgaggccgtgaactggtgtgatgagggactgcaaatagatgccaaagagaagaagcttctggaaatgagggctaaagcagacaagctgaagcgaattgaacagagggatgtgaggaaagccaacttgaaagaaaagaaggagaggaatcagaatgaggctttactccaggccatcaaggctaggaatatcaggctctcagaagctgcctgtgaggatgaagattcagcctcagaaggtctaggtgagcttttcctggatggactcagcactgagaacccccatggagccaggctgagtctagatggccagggcaggctgagctggcctgtgctctttctgtacccagagtatgcccagtcggacttcatctctgcttttcatgaggactccaggtttattgatcatctaatggtgatgtttggtgaaacaccctcttgggacctagagcaaaaatattgccctgataatttggaggtctactttgaggatgaggacagggcagaactataccgggtgcctgccaagagcaccttgctacaggttctacagcaccagaggtactttgtaaaagccctgacaccagcatttttggtctgtgtaggatcctctcctttttgcaagaattttctccgggggagaaaggtgtaccagatacgatgactaagccagggcccctggatctcctcccttaccctcctctgctgggaacctagcacacctgaatcagctggacatactgctggagtccagtgctttctttccgtcaccctggggatagtccttcctggcatcgtggtgggggaggagcctctggcttccctaaactgcagcctctctggctggtcttcactttcctcagttgatataaaactctgggtcttggccatgatgtccttggactccatcgctaaagggaccatctgctgcagttaccacagcaactgacctgagcggcaccctggtctgtggagatggactcaggatccagtgacatgattctgaacttttgtggagtttgacaccttagagaagctacccctcaaactgcacatctacacacaaacaaacaatgcataggattccaaggctttaaagctgagagaccctggcctcaagttatttcatgcgcacagagggaagccatgtggggttgctgaagatgccttgaggtgaaatgggggcaggaaagccacatcttgctctgcatttataaagaccgtacaaactgagatccttggtacccctaaaaagattgccaattttcttcatctttgccatatggaggactgtgacagactttggacagtggcctcttgagttcctctgcagttttgacatttaggattttgtgtcttttaaactggaaaatcttctagcatgttgggttgttacagagtatatttttgtctgcagctgtttgttgccccattcctaagaggagtttatccatcctgacttgtagctgtgtgacttcttgcagtgcccccaccccatccccccgggagagtgtacttccctgctcccaatgcagagggatatgcacaggcatgagctgtcctgcgtctgacagaagcctgaagagtcatgtgtggttggcctgtgctcttccctctgctgtgagaacacatttcccacagaggagccgttccatggagccgagctacagcagctggcctgcagccactgagtgtcacagcaatgagagagcaatgtttgctgtagtaagcagtgagatttaggggttggttgttactatagcagagctaatacatgagtaaactgaagccagctgctgtccttaaaa

SEQ ID NO: 423257 - DNA, 2534 bp, Homo sapiens
aggattgagggaagggaacccgcgccgccggaaggagccgctcgcttcacggcgctgggacccgggctggaaggcagggcatcagctatggaacaacctgggcaggatcccacctcagacgacgtcatggactcgttcctggaaaagttccagagccagccttaccgtggcggctttcatgaggaccagtgggagaaggaatttgaaaaggtccccctatttatgacgagagcgccatcagaaattgatcccagggagaatcctgacttggcttgtctccagtcaattatttttgatgaggagcgttctccagaagaacaggccaagacctataaagatgagggcaatgattactttaaagaaaaagactacaagaaagctgtaatttcatacactgaaggcttaaagaagaaatgtgcagatcctgatttgaatgctgtcctttataccaaccgggcagcagcacagtactatctgggcaattttcgttctgctctcaatgatgtgacagctgccagaaagctaaaaccctgccacctcaaagcaataataagaggtgccttatgccatctggaactgaaacactttgccgaggccgtgaactggtgtgatgagggactgcaaatagatgccaaagagaagaagcttctggaaatgagggctaaagcagacaagctgaagcgaattgaacagagggatgtgaggaaagccaacttgaaagaaaagaaggagaggaatcagaatgaggctttactccaggccatcaaggctaggaatatcaggctctcagaagctgcctgtgaggatgaagattcagcctcagaaggtctaggtgagcttttcctggatggactcagcactgagaacccccatggagccaggctgagtctagatggccagggcaggctgagctggcctgtgctctttctgtacccagagtatgcccagtcggacttcatctctgcttttcatgaggactccaggtttattgatcatctaatggtgatgtttggtgaaacaccctcttgggacctagagcaaaaatattgccctgataatttggaggtctactttgaggatgaggacagggcagaactataccgggtgcctgccaagagcaccttgctacaggttctacagcaccagaggtactttgtaaaagccctgacaccagcatttttggtctgtgtaggatcctctcctttttgcaagaattttctccgggggagaaaggtgtaccagatacgatgactaagccagggcccctggatctcctcccttaccctcctctgctgggaacctagcacacctgaatcagctggacatactgctggagtccagtgctttctttccgtcaccctggggatagtccttcctggcatcgtggtgggggaggagcctctggcttccctaaactgcagcctctctggctggtcttcactttcctcagttgatataaaactctgggtcttggccatgatgtccttggactccatcgctaaagggaccatctgctgcagttaccacagcaactgacctgagcggcaccctggtctgtggagatggactcaggatccagtgacatgattctgaacttttgtggagtttgacaccttagagaagctacccctcaaactgcacatctacacacaaacaaacaatgcataggattccaaggctttaaagctgagagaccctggcctcaagttatttcatgcgcacagagggaagccatgtggggttgctgaagatgccttgaggtgaaatgggggcaggaaagccacatcttgctctgcatttataaagaccgtacaaactgagatccttggtacccctaaaaagattgccaattttcttcatctttgccatatggaggactgtgacagactttggacagtggcctcttgagttcctctgcagttttgacatttaggattttgtgtcttttaaactggaaaatcttctagcatgttgggttgttacagagtatatttttgtctgcagctgtttgttgccccattcctaagaggagtttatccatcctgacttgtagctgtgtgacttcttgcagtgcccccaccccatccccccgggagagtgtacttccctgctcccaatgcagagggatatgcacaggcatgagctgtcctgcgtctgacagaagcctgaagagtcatgtgtggttggcctgtgctcttccctctgctgtgagaacacatttcccacagaggagccgttccatggagccgagctacagcagctggcctgcagccactgagtgtcacagcaatgagagagcaatgtttgctgtagtaagcagtgagatttaggggttggttgttactatagcagagctaatacatgagtaaactgaagccagctgctgtccttaaaaaaaaaaaaaaaaaaaaaaaaaaaaaaaaaaaaaaaaaaactaaagggggggcccggaacccaataccccattagcgagaacgaaaaaaaatactcgggggggggcccggtacccatttgacctttaaagacgctgatta

SEQ ID NO: 423258 - DNA, 2338 bp, Homo sapiens
aggattgagggaagggaacccgcgccgccggaaggagccgctcgcttcacggcgctgggacccgggctggaaggcagggcatcagctatggaacaacctgggcaggatcccacctcagacgacgtcatggactcgttcctggaaaagttccagagccagccttaccgtggcggctttcatgaggaccagtgggagaaggaatttgaaaaggtccccctatttatgacgagagcgccatcagaaattgatcccagggagaatcctgacttggcttgtctccagtcaattatttttgatgaggagcgttctccagaagaacaggccaagacctataaagatgagggcaatgattactttaaagaaaaagactacaagaaagctgtaatttcatacactgaaggcttaaagaagaaatgtgcagatcctgatttgaatgctgtcctttataccaaccgggcagcagcacagtactatctgggcaattttcgttctgctctcaatgatgtgacagctgccagaaagctaaaaccctgccacctcaaagcaataataagaggtgccttatgccatctggaactgaaacactttgccgaggccgtgaactggtgtgatgagggactgcaaatagatgccaaagagaagaagcttctggaaatgagggctaaagcagacaagctgaagcgaattgaacagagggatgtgaggaaagccaacttgaaagaaaagaaggagaggaatcagaatgaggctttactccaggccatcaaggctaggaatatcaggctctcagaagctgcctgtgaggatgaagattcagcctcagaaggtctaggtgagcttttcctggatggactcagcactgagaacccccatggagccaggctgagtctagatggccagggcaggctgagctggcctgtgctctttctgtacccagagtatgcccagtcggacttcatctctgcttttcatgaggactccaggtttattgatcatctaatggtgatgtttggtgaaacaccctcttgggacctagagcaaaaatattgccctgataatttggaggtctactttgaggatgaggacagggcagaactataccgggtgcctgccaagagcaccttgctacaggttctacagcaccagaggtactttgtaaaagccctgacaccagcatttttggtctgtgtaggatcctctcctttttgcaagaattttctccgggggagaaaggtgtaccagatacgatgactaagccagggcccctggatctcctcccttaccctcctctgctgggaacctagcacacctgaatcagctggacatactgctggagtccagtgctttctttccgtcaccctggggatagtccttcctggcatcgtggtgggggaggagcctctggcttccctaaactgcagcctctctggctggtcttcactttcctcagttgatataaaactctgggtcttggccatgatgtccttggactccatcgctaaagggaccatctgctgcagttaccacagcaactgacctgagcggcaccctggtctgtggagatggactcaggatccagtgacatgattctgaacttttgtggagtttgacaccttagagaagctacccctcaaactgcacatctacacacaaacaaacaatgcataggattccaaggctttaaagctgagagaccctggcctcaagttatttcatgcgcacagagggaagccatgtggggttgctgaagatgccttgaggtgaaatgggggcaggaaagccacatcttgctctgcatttataaagaccgtacaaactgagatccttggtacccctaaaaagattgccaattttcttcatctttgccatatggaggactgtgacagactttggacagtggcctcttgagttcctctgcagttttgacatttaggattttgtgtcttttaaactggaaaatcttctagcatgttgggttgttacagagtatatttttgtctgcagctgtttgttgccccattcctaagaggagtttatccatcctgtcccgacactttgggaggcggaggtgggtggatcacctgaggtcaggagttcgagaccagcctgaccaacatagcaaaccccgtgtctactaaaaatacaaaaattagccaggcgtggtggtaggcatctgtaatcccggctactcgggaggctgaggcaggagaatcacttgaacccggggggcggaggttgcagtgagccaagatcgtgccattgcactccagcctgggcaacaagagcaaaactctgtctcaaacacaaaccaaaaaaaaagtagactaatttagagttt

SEQ ID NO: 423259 - DNA, 2554 bp, Homo sapiens
aggattgagggaagggaacccgcgccgccggaaggagccgctcgcttcacggcgctgggacccgggctggaaggcagggcatcagctatggaacaacctgggcaggatcccacctcagacgacgtcatggactcgttcctggaaaagttccagagccagccttaccgtggcggctttcatgaggaccagtgggagaaggaatttgaaaaggtccccctatttatgacgagagcgccatcagaaattgatcccagggagaatcctgacttggcttgtctccagtcaattatttttgatgaggagcgttctccagaagaacaggccaagacctataaagatgagggcaatgattactttaaagaaaaagactacaagaaagctgtaatttcatacactgaaggcttaaagaagaaatgtgcagatcctgatttgaatgctgtcctttataccaaccgggcagcagcacagtactatctgggcaattttcgttctgctctcaatgatgtgacagctgccagaaagctaaaaccctgccacctcaaagcaataataagaggtgccttatgccatctggaactgaaacactttgccgaggccgtgaactggtgtgatgagggactgcaaatagatgccaaagagaagaagcttctggaaatgagggctaaagcagacaagctgaagcgaattgaacagagggatgtgaggaaagccaacttgaaagaaaagaaggagaggaatcagaatgaggctttactccaggccatcaaggctaggaatatcaggctctcagaagctgcctgtgaggatgaagattcagcctcagaaggtctaggtgagcttttcctggatggactcagcactgagaacccccatggagccaggctgagtctagatggccagggcaggctgagctggcctgtgctctttctgtacccagagtatgcccagtcggacttcatctctgcttttcatgaggactccaggtttattgatcatctaatggtgatgtttggtgaaacaccctcttgggacctagagcaaaaatattgccctgataatttggaggtctactttgaggatgaggacagggcagaactataccgggtgcctgccaagagcaccttgctacaggttctacagcaccagaggtagctggaatatcaagtgcatgccagtgacccggctcctgatactgtcatatgaagaaagcattggctcttgaagtcagacccatcatcatttactggctgtgtgactccaagcacacgctgcctctctgggactgccgcctcatctctggaatgggagtactttgtaaaagccctgacaccagcatttttggtctgtgtaggatcctctcctttttgcaagaattttctccgggggagaaaggtgtaccagatacgatgactaagccagggcccctggatctcctcccttaccctcctctgctgggaacctagcacacctgaatcagctggacatactgctggagtccagtgctttctttccgtcaccctggggatagtccttcctggcatcgtggtgggggaggagcctctggcttccctaaactgcagcctctctggctggtcttcactttcctcagttgatataaaactctgggtcttggccatgatgtccttggactccatcgctaaagggaccatctgctgcagttaccacagcaactgacctgagcggcaccctggtctgtggagatggactcaggatccagtgacatgattctgaacttttgtggagtttgacaccttagagaagctacccctcaaactgcacatctacacacaaacaaacaatgcataggattccaaggctttaaagctgagagaccctggcctcaagttatttcatgcgcacagagggaagccatgtggggttgctgaagatgccttgaggtgaaatgggggcaggaaagccacatcttgctctgcatttataaagaccgtacaaactgagatccttggtacccctaaaaagattgccaattttcttcatctttgccatatggaggactgtgacagactttggacagtggcctcttgagttcctctgcagttttgacatttaggattttgtgtcttttaaactggaaaatcttctagcatgttgggttgttacagagtatatttttgtctgcagctgtttgttgccccattcctaagaggagtttatccatcctgacttgtagctgtgtgacttcttgcagtgcccccaccccatccccccgggagagtgtacttccctgctcccaatgcagagggatatgcacaggcatgagctgtcctgcgtctgacagaagcctgaagagtcatgtgtggttggcctgtgctcttccctctgctgtgagaacacatttcccacagaggagccgttccatggagccgagctacagcagctggcctgcagccactgagtgtcacagcaatgagagagcaatgtttgctgtagtaagcagtgagatttaggggttggttgttactatagcagagctaatacatgagtaaactgaagccagctgctgtccttaaaa

SEQ ID NO: 423260 - DNA, 2098 bp, Homo sapiens
aggattgagggaagggaacccgcgccgccggaaggagccgctcgcttcacggcgctgggacccgggctggaaggcagggcatcagctatggaacaacctgggcaggatcccacctcagacgacgtcatggactcgttcctggaaaagttccagagccagccttaccgtggcggctttcatgaggaccagtgggagaaggaatttgaaaaggtccccctatttatgacgagagcgccatcagaaattgatcccagggagaatcctgacttggcttgtctccagtcaattatttttgatgaggagcgttctccagaagaacaggccaagacctataaagatgagggcaatgattactttaaagaaaaagactacaagaaagctgtaatttcatacactgaaggcttaaagaagaaatgtgcagatcctgatttgaatgctgtcctttataccaaccgggcagcagcacagtactatctgggcaattttcgttctgctctcaatgatgtgacagctgccagaaagctaaaaccctgccacctcaaagcaataataagaggtgccttatgccatctggaactgaaacactttgccgaggccgtgaactggtgtgatgagggactgcaaatagatgccaaagagaagaagcttctggaaatgagggctaaagcagacaagctgaagcgaattgaacagagggatgtgaggaaagccaacttgaaagaaaagaaggagaggaatcagaatgaggctttactccaggccatcaaggtctactttgaggatgaggacagggcagaactataccgggtgcctgccaagagcaccttgctacaggttctacagcaccagaggtactttgtaaaagccctgacaccagcatttttggtctgtgtaggatcctctcctttttgcaagaattttctccgggggagaaaggtgtaccagatacgatgactaagccagggcccctggatctcctcccttaccctcctctgctgggaacctagcacacctgaatcagctggacatactgctggagtccagtgctttctttccgtcaccctggggatagtccttcctggcatcgtggtgggggaggagcctctggcttccctaaactgcagcctctctggctggtcttcactttcctcagttgatataaaactctgggtcttggccatgatgtccttggactccatcgctaaagggaccatctgctgcagttaccacagcaactgacctgagcggcaccctggtctgtggagatggactcaggatccagtgacatgattctgaacttttgtggagtttgacaccttagagaagctacccctcaaactgcacatctacacacaaacaaacaatgcataggattccaaggctttaaagctgagagaccctggcctcaagttatttcatgcgcacagagggaagccatgtggggttgctgaagatgccttgaggtgaaatgggggcaggaaagccacatcttgctctgcatttataaagaccgtacaaactgagatccttggtacccctaaaaagattgccaattttcttcatctttgccatatggaggactgtgacagactttggacagtggcctcttgagttcctctgcagttttgacatttaggattttgtgtcttttaaactggaaaatcttctagcatgttgggttgttacagagtatatttttgtctgcagctgtttgttgccccattcctaagaggagtttatccatcctgacttgtagctgtgtgacttcttgcagtgcccccaccccatccccccgggagagtgtacttccctgctcccaatgcagagggatatgcacaggcatgagctgtcctgcgtctgacagaagcctgaagagtcatgtgtggttggcctgtgctcttccctctgctgtgagaacacatttcccacagaggagccgttccatggagccgagctacagcagctggcctgcagccactgagtgtcacagcaatgagagagcaatgtttgctgtagtaagcagtgagatttaggggttggttgttactatagcagagctaatacatgagtaaactgaagccagctgctgtccttaaaa

SEQ ID NO: 423261 - DNA, 966 bp, Homo sapiens
taggtggaaatatcaactatctcagtaattaataaaaccagtatttaaaaaatagagaggggtagtgtcaatcacagtggtggactaaagacctttacaatttttctcctccataaaatcaatgaggaaactggcaaaaatgatcagaattcacttttctaggactctggaaatgaaccagaggtttgcagcaatctggagcataactgcacatctacacacaaacaaacaatgcataggattccaaggctttaaagctgagagaccctggcctcaagttatttcatgcgcacagagggaagccatgtggggttgctgaagatgccttgaggtgaaatgggggcaggaaagccacatcttgctctgcatttataaagaccgtacaaactgagatccttggtacccctaaaaagattgccaattttcttcatctttgccatatggaggactgtgacagactttggacagtggcctcttgagttcctctgcagttttgacatttaggattttgtgtcttttaaactggaaaatcttctagcatgttgggttgttacagagtatatttttgtctgcagctgtttgttgccccattcctaagaggagtttatccatcctgacttgtagctgtgtgacttcttgcagtgcccccaccccatccccccgggagagtgtacttccctgctcccaatgcagagggatatgcacaggcatgagctgtcctgcgtctgacagaagcctgaagagtcatgtgtggttggcctgtgctcttccctctgctgtgagaacacatttcccacagaggagccgttccatggagccgagctacagcagctggcctgcagccactgagtgtcacagcaatgagagagcaatgtttgctgtagtaagcagtgagatttaggggttggttgttactatagcagagctaatacatgagtaaactgaagccagctgctgtccttaaaa

SEQ ID NO: 423262 - DNA, 1188 bp, Homo sapiens
tgcgcatcagcccggacagggtctacatcaactattacgacatgaacgcggcaatgtgggctggaacaactccaccttcgcctaagagccgcagggacccacgctgtctgcgctggctccacccgggaacccgccgcacgctgtgttctaggcccgcccaccccaaccttctggtggggagaaataaacgccgagacgcactgggggccggatgtagaatcctgcttatctgtgaaatgcagttaacacatcagctggacctatttcccgaatgcagggtaacccttctgttatttaaagatgtaaaaaatgcgggagacttgagaagaaaggccatggaaggcaccatcgatggatcactgataaatcctacagtgattgttgatccatttcagatacttgtggcagcaaacaaagcagttcacctctacaaactgggaaaaatgaagacaagaactctatctactgaaattattttcaacctttccccaaataacaatatttcagaggctttgaaaaaatttggtatctcagcaaatgacacttcaattctaattgtttacattgaagagggagaaaaacaaataaatcaagaatacctaatatctcaagtagaaggtcatcaggtttctctgaaaaatcttcctgaaataatgaatattacagaagtcaaaaagatatataaactctcttcacaagaagaaagtatcgggacattattggatgctatcatttgtagaatgtcaacaaaagatgttttatgaaatgtcagaaatattaacaaaaattctcagcattaaagaaaacattgattttcctttcctgactataaaactaattgtgcattatagaaaagtttaaatcacagaatggtattaaaaaaaaaaaaaaaaggccaggcacggtggctcacgcctgaaatcccagcaatttgggaggccaaggcaggtggatcacctgaggtcaggagttcaagaccagcctggctaacatggtgaaaccccatctctactaaaatacaaaaattagctgggcatgatggcaggtgcctgtaatcccagctattcgggaggctgagacaggagaatcgcatgaacctgggaggcacaggttgcagtgagctgagatcgtgccatagcactccagcctgggcagctgagcgagactccgtctcaaaaaaaaaaacca

SEQ ID NO: 423263 - DNA, 816 bp, Homo sapiens
tgcgcatcagcccggacagggtctacatcaactattacgacatgaacgcggcaatgtgggctggaacaactccaccttcgcctaagagccgcagggacccacgctgtctgcgctggctccacccgggaacccgccgcacgctgtgttctaggcccgcccaccccaaccttctggtggggagaaataaacgccgagacgcactgggggccggatgtagaatcctgcttatctgtgaaatgcagttaacacatcagctggacctatttcccgaatgcagggtaacccttctgttatttaaagatgtaaaaaatgcgggagacttgagaagaaaggccatggaaggcaccatcgatggatcactgataaatcctacagtgattgttgatccatttcagatacttgtggcagcaaacaaagcagttcacctctacaaactgggaaaaatgaagacaagaactctatctactgaaattattttcaacctttccccaaataacaatatttcagaggctttgaaaaaatttggtatctcagcaaatgacacttcaattctaattgtttacattgaagagggagaaaaacaaataaatcaagaatacctaatatctcaagtagaaggtcatcaggtttctctgaaaaatcttcctgaaataatgaatattacagaagtcaaaaagatatataaactctcttcacaagaagaaagtatcgggacattattggatgctatcatttgtagaatgtcaacaaaagatgttttatgaaatgtcagaaatattaacaaaaattctcagcattaaagaaaacattgatttt

SEQ ID NO: 423264 - DNA, 687 bp, Homo sapiens
aagacggggattggccatcgcttccggaagttgtgagctttgtttcggagcgggagctcttccgagacgcactgggggccggatgtagaatcctgcttatctgtgaaatgcagttaacacatcagctggacctatttcccgaatgcagggtaacccttctgttatttaaagatgtaaaaaatgcgggagacttgagaagaaaggccatggaaggcaccatcgatggatcactgataaatcctacagtgattgttgatccatttcagatacttgtggcagcaaacaaagcagttcacctctacaaactgggaaaaatgaagacaagaactctatctactgaaattattttcaacctttccccaaataacaatatttcagaggctttgaaaaaatttggtatctcagcaaatgacacttcaattctaattgtttacattgaagagggagaaaaacaaataaatcaagaatacctaatatctcaagtagaaggtcatcaggtttctctgaaaaatcttcctgaaataatgaatattacagaagtcaaaaagatatataaactctcttcacaagaagaaagtatcgggacattattggatgctatcatttgtagaatgtcaacaaaagatgttttatgaaatgtcagaaatattaacaaaaattctcagcattaaagaaaacattgatttt

SEQ ID NO: 423265 - DNA, 587 bp, Homo sapiens
aagacggggattggccatcgcttccggaagttgtgagctttgtttcggagcgggagctcttccgagacgcactgggggccggatgtagaatcctgcttatctgtgaaatgcagttaacacatcagctggacctatttcccgaatgcagattgttgatccatttcagatacttgtggcagcaaacaaagcagttcacctctacaaactgggaaaaatgaagacaagaactctatctactgaaattattttcaacctttccccaaataacaatatttcagaggctttgaaaaaatttggtatctcagcaaatgacacttcaattctaattgtttacattgaagagggagaaaaacaaataaatcaagaatacctaatatctcaagtagaaggtcatcaggtttctctgaaaaatcttcctgaaataatgaatattacagaagtcaaaaagatatataaactctcttcacaagaagaaagtatcgggacattattggatgctatcatttgtagaatgtcaacaaaagatgttttatgaaatgtcagaaatattaacaaaaattctcagcattaaagaaaacattgatttt

SEQ ID NO: 423266 - DNA, 808 bp, Homo sapiens
aagacggggattggccatcgcttccggaagttgtgagctttgtttcggagcgggagctcttccgagacgcactgggggccggatgtagaatcctgcttatctgtgaaatgcagttaacacatcagctggacctatttcccgaatgcagggtaacccttctgttatttaaagatgtaaaaaatgcgggagacttgagaagaaaggccatggaaggcaccatcgatggatcactgataaatcctacagtgattgttgatccatttcagatacttgtggcagcaaacaaagcagttcacctctacaaactgggaaaaatgaagacaagaactctatctactgaaattattttcaacctttccccaaataacaatgtaatgtgcactttcctatttctgttgaccgtgtcataataacatatgtgttcctcagtgttgggttggaggctaaattcctgcaagccagtggttagtaataaacccaaataatagtgaagagagctctggacagagagttgaggtttaaccctgcctcttactaagacagtttacatatgagtaaacataaatttagctaaattaagcgaggttaattttatctgttcttaccatatagggtcaggaagacccctcaagtatttttgcttgagaagctgacagaaatctaaatgataaaacattaggcgtggatattttgtgtgctagcctgcatatcattctctcttcccgtaaactccttgagggtgggatccatgtctttttcatataccaggaacttgcttgtacctataacagtccttaacacagcctca

SEQ ID NO: 423267 - DNA, 791 bp, Homo sapiens
atgagcgatgtgacctagcgtatgggagagaagtggacgaatcaaaagtatatttagcaggtgaaaattcaggactttacggattagatataggatttgagtgacaggttgggtctcaacgatgattccaagtttctgacctgatagaatcctgcttatctgtgaaatgcagttaacacatcagctggacctatttcccgaatgcagggtaacccttctgttatttaaagatgtaaaaaatgcgggagacttgagaagaaaggccatggaaggcaccatcgatggatcactgataaatcctacagtgtttcactcttgttgcccaggctggagtgcaatggcgcgatcttggctcacggcaacctctgcctcccgggttcaagcaattgtcctgcctcagcctcctgagttgctgggattacagattgttgatccatttcagatacttgtggcagcaaacaaagcagttcacctctacaaactgggaaaaatgaagacaagaactctatctactgaaattattttcaacctttccccaaataacaatatttcagaggctttgaaaaaatttggtatctcagcaaatgacacttcaattctaattgtttacattgaagagggagaaaaacaaataaatcaagaatacctaatatctcaagtagaaggtcatcaggtttctctgaaaaatcttcctgaaataatgaatattacagaagtcaaaaagatatataactctcttcacaagaagaaagtatcggggagtgatgcttgaggggatcctcgtagagacg

SEQ ID NO: 423268 - DNA, 329 bp, Homo sapiens
ggctgaccctgaggatcccctcttcagctgtgttgaggtttaaccctgcctcttactaagacagtttacatatgagtaaacataaatttagctaaattaagcgaggttaattttatctgttcttaccatatagggtcaggaagacccctcaagtatttttgcttgagaagctgacagaaatctaaatgataaaacattaggcgtggatattttgtgtgctagcctgcatatcattctctcttcccgtaaactccttgagggtgggatccatgtctttttcatataccaggaacttgcttgtacctataacagtccttaacacagcctca

SEQ ID NO: 423269 - DNA, 490 bp, Homo sapiens
agtgccaatggatgttggaaaggaatcattaaagtgaaaaagtaggcagtgagaactgttaggacatgaaaaataagagcctgaccaaggaagaaggcagatcaggaaatgtttcagacgtaggaaacaatggttaatgatcttgtgttttttttttcattttttttctcttagatttcagaggctttgaaaaaatttggtatctcagcaaatgacacttcaattctaattgtttacattgaagagggagaaaaacaaataaatcaagaatacctaatatctcaagtagaaggtcatcaggtttctctgaaaaatcttcctgaaataatgaatattacagaagtcaaaaagatatataaactctcttcacaagaagaaagtatcgggacattattggatgctatcatttgtagaatgtcaacaaaagatgttttatgaaatgtcagaaatattaacaaaaattctcagcattaaagaaaacattgatttt

SEQ ID NO: 423270 - DNA, 650 bp, Homo sapiens
agtgccaatggatgttggaaaggaatcattaaagtgaaaaagtaggcagtgagaactgttaggacatgaaaaataagagcctgaccaaggaagaaggcagatcaggaaatgtttcagacgtaggaaacaatggttaatgatcttgtgttttttttttcattttttttctcttagatttcagaggctttgaaaaaatttggtatctcagcaaatgacacttcaattctaattgtttacattgaagagggagaaaaacaaataaatcaagaatacctaatatctcaagtagaaggtcatcaggtttctctgaaaaatcttcctgaaataatgaatattacagaagtcaaaaaggtttgccagtccatatttttagaaagagtgtgatagatgagcaataatgctgatgccgtttgcctattgatcaccagagctccttgttttttgaacttttgagaaagttaatctaattttaaaaattacttaaaaattacagatacaaagaactgggaggtgtgatggtttatgtaaaatataattacaaactcagctgacataaccattctccacattaagaaagagaatacctttaaatatcaaacttacatagtatatttaaaatgtaaaataaatttagtatgcttttaaaatgg

SEQ ID NO: 423271 - DNA, 263 bp, Homo sapiens
atgagcgatgtgacctagcgtatgggagagaagtggacgaatcaaaagtatatttagcaggtgaaaattcaggactttacggattagatataggatttgagtgacaggttgggtctcaacgatgattccaagtttctgacctgagtgagtaaattacgctaaacaagaacaaactattttgaagttttctaagggttcttccccccactcagtgttaaaaagcacgtttttttcctttcttattatgtgtactcatgttttgt

SEQ ID NO: 423272 - DNA, 1176 bp, Homo sapiens
aagacggggattggccatcgcttccggaagttgtgagctttgtttcggagcgggagctcttccgagacgcactgggggccggatgtagaatcctgcttatctgtgaaatgcagttaacacatcagctggacctatttcccgaatgcagggtaacccttctgttatttaaagatgtaaaaaatgcgggagacttgagaagaaaggccatggaaggcaccatcgatggatcactgataaatcctacagtgtttcactcttgttgcccaggctggagtgcaatggcgcgatcttggctcacggcaacctctgcctcccgggttcaagcaattgtcctgcctcagcctcctgagttgctgggattacagattgttgatccatttcagatacttgtggcagcaaacaaagcagttcacctctacaaactgggaaaaatgaagacaagaactctatctactgaaattattttcaacctttccccaaataacaatatttcagaggctttgaaaaaatttggtatctcagcaaatgacacttcaattctaattgtttacattgaagagggagaaaaacaaataaatcaagaatacctaatatctcaagtagaaggtcatcaggtttctctgaaaaatcttcctgaaataatgaatattacagaagtcaaaaagatatataaactctcttcacaagaagaaagtatcgggacattattggatgctatcatttgtagaatgtcaacaaaagatgttttatgaaatgtcagaaatattaacaaaaattctcagcattaaagaaaacattgattttcctttcctgactataaaactaattgtgcattatagaaaagtttaaatcacagaatggtattaaaaaaaaaaaaaaaaggccaggcacggtggctcacgcctgaaatcccagcaatttgggaggccaaggcaggtggatcacctgaggtcaggagttcaagaccagcctggctaacatggtgaaaccccatctctactaaaatacaaaaattagctgggcatgatggcaggtgcctgtaatcccagctattcgggaggctgagacaggagaatcgcatgaacctgggaggcacaggttgcagtgagctgagatcgtgccatagcactccagcctgggcagctgagcgagactccgtctcaaaaaaaaaaacca

SEQ ID NO: 423273 - DNA, 925 bp, Homo sapiens
  misc_feature (825)..(825): n is a, c, g, or t
tgcgcatcagcccggacagggtctacatcaactattacgacatgaacgcggcaatgtgggctggaacaactccaccttcgcctaagagccgcagggacccacgctgtctgcgctggctccacccgggaacccgccgcacgctgtgttctaggcccgcccaccccaaccttctggtggggagaaataaacgccgagacgcactgggggccggatgtagaatcctgcttatctgtgaaatgcagttaacacatcagctggacctatttcccgaatgcagggtaacccttctgttatttaaagatgtaaaaaatgcgggagacttgagaagaaaggccatggaaggcaccatcgatggatcactgataaatcctacagtgattgttgatccatttcagatacttgtggcagcaaacaaagcagttcacctctacaaactgggaaaaatgaagacaagaactctatctactgaaattattttcaacctttccccaaataacaatatttcagaggctttgaaaaaatttggtatctcagcaaatgacacttcaattctaattgtttacattgaagagggagaaaaacaaataaatcaagaatacctaatatctcaagtagaaggtcatcaggtttctctgaaaaatcttcctgaaataatgaatattacagaagtcaaaaagatatataaactctcttcacaagaagaaagtatcgggacattattggatgctatcatttgtagaatgtcaacaaaagatgttttatgaaatgtcagaaatattaacaaaaattctcagcattaaagaaaacattgattttaaaaagaanaaaaagacaaaaaaacatttgtgggcgcctcgcctggaaagatttaaaaaaatctggggggcggagacacgaagagaagagaacgggcatagaggggtcc

SEQ ID NO: 423274 - DNA, 804 bp, Homo sapiens
aagacggggattggccatcgcttccggaagttgtgagctttgtttcggagcgggagctcttccgagacgcactgggggccggatgtagaatcctgcttatctgtgaaatgcagttaacacatcagctggacctatttcccgaatgcagggtaacccttctgttatttaaagatgtaaaaaatgcgggagacttgagaagaaaggccatggaaggcaccatcgatggatcactgataaatcctacagtgtttcactcttgttgcccaggctggagtgcaatggcgcgatcttggctcacggcaacctctgcctcccgggttcaagcaattgtcctgcctcagcctcctgagttgctgggattacagattgttgatccatttcagatacttgtggcagcaaacaaagcagttcacctctacaaactgggaaaaatgaagacaagaactctatctactgaaattattttcaacctttccccaaataacaatatttcagaggctttgaaaaaatttggtatctcagcaaatgacacttcaattctaattgtttacattgaagagggagaaaaacaaataaatcaagaatacctaatatctcaagtagaaggtcatcaggtttctctgaaaaatcttcctgaaataatgaatattacagaagtcaaaaagatatataaactctcttcacaagaagaaagtatcgggacattattggatgctatcatttgtagaatgtcaacaaaagatgttttatgaaatgtcagaaatattaacaaaaattctcagcattaaagaaaacattgatttt

SEQ ID NO: 423275 - DNA, 744 bp, Homo sapiens
tgcgcatcagcccggacagggtctacatcaactattacgacatgaacgcggcaatgtgggctggaacaactccaccttcgcctaagagccgcagggacccacgctgtctgcgctggctccacccgggaacccgccgcacgctgtgttctaggcccgcccaccccaaccttctggtggggagaaataaacgccgagacgcactgggggccggatgtagaatcctgcttatctgtgaaatgcagttaacacatcagctggacctatttcccgaatgcagggtaacccttctgttatttaaagatgtaaaaaatgcgggagacttgagaagaaaggccatggaaggcaccatcgatggatcactgataaatcctacagtgattgttgatccatttcagatacttgtggcagcaaacaaagcagttcacctctacaaactgggaaaaatgaagacaagaactctatctactgaaattattttcaacctttccccaaataacaatatttcagaggctttgaaaaaatttggtatctcagcaaatgacacttcaattctaattgtttacattgaagagggagaaaaacaaataaatcaagaatacctaatatctcaagtagaaggtcatcaggtttctctgaaaaatcttcctgaaataatgaatattacagaagtcaaaaagatatataactctcttcacaagaagaaagtatcggggagtgatgcttgaggggatcctcgtagagacg

SEQ ID NO: 423276 - DNA, 150 bp, Homo sapiens
cccccactcagtgttaaaaagcacgtttttttcctttcttattatgtgtactcatgttttgtgtgcttactgtagaaaattcagaacatacataacaaaatattttcttttatataaaggacaataaaaatcacctcataacctcactac

SEQ ID NO: 423277 - DNA, 512 bp, Homo sapiens
tgataggtgacagagatgggattcaaacccagacattctttgcctcaatttcctcatcaattacatactactactactgctactactactaataatagtgtcaatttcatagggtagttttgaggattaaagaaaatattacaagtaaaatgtttgcaatatgatcatgcccataatattagccctcaattaatgttatttaaaaaaattttactatttgcataagttccttgcagctttaaaattctgtgatttcctgactacccaggcccttgggataatagttgttttttgttttttttttttttgagacagtttcactcttgttgcccaggctggagtgcaatggcgcgatcttggctcacggcaacctctgcctcccgggttcaagcaattgtcctgcctcagcctcctgagttgctgggattacaggtgcgtgccaccacgcctgactaatttttgtatttttagtagagagggtttcgccgtgttggccaggctggtcttgaacc

SEQ ID NO: 423278 - DNA, 1059 bp, Homo sapiens
aagacggggattggccatcgcttccggaagttgtgagctttgtttcggagcgggagctcttccgagacgcactgggggccggatgtagaatcctgcttatctgtgaaatgcagttaacacatcagctggacctatttcccgaatgcagggtaacccttctgttatttaaagatgtaaaaaatgcgggagacttgagaagaaaggccatggaaggcaccatcgatggatcactgataaatcctacagtgattgttgatccatttcagatacttgtggcagcaaacaaagcagttcacctctacaaactgggaaaaatgaagacaagaactctatctactgaaattattttcaacctttccccaaataacaatatttcagaggctttgaaaaaatttggtatctcagcaaatgacacttcaattctaattgtttacattgaagagggagaaaaacaaataaatcaagaatacctaatatctcaagtagaaggtcatcaggtttctctgaaaaatcttcctgaaataatgaatattacagaagtcaaaaagatatataaactctcttcacaagaagaaagtatcgggacattattggatgctatcatttgtagaatgtcaacaaaagatgttttatgaaatgtcagaaatattaacaaaaattctcagcattaaagaaaacattgattttcctttcctgactataaaactaattgtgcattatagaaaagtttaaatcacagaatggtattaaaaaaaaaaaaaaaaggccaggcacggtggctcacgcctgaaatcccagcaatttgggaggccaaggcaggtggatcacctgaggtcaggagttcaagaccagcctggctaacatggtgaaaccccatctctactaaaatacaaaaattagctgggcatgatggcaggtgcctgtaatcccagctattcgggaggctgagacaggagaatcgcatgaacctgggaggcacaggttgcagtgagctgagatcgtgccatagcactccagcctgggcagctgagcgagactccgtctcaaaaaaaaaaacca

SEQ ID NO: 423279 - DNA, 796 bp, Homo sapiens
  misc_feature (696)..(696): n is a, c, g, or t
aagacggggattggccatcgcttccggaagttgtgagctttgtttcggagcgggagctcttccgagacgcactgggggccggatgtagaatcctgcttatctgtgaaatgcagttaacacatcagctggacctatttcccgaatgcagggtaacccttctgttatttaaagatgtaaaaaatgcgggagacttgagaagaaaggccatggaaggcaccatcgatggatcactgataaatcctacagtgattgttgatccatttcagatacttgtggcagcaaacaaagcagttcacctctacaaactgggaaaaatgaagacaagaactctatctactgaaattattttcaacctttccccaaataacaatatttcagaggctttgaaaaaatttggtatctcagcaaatgacacttcaattctaattgtttacattgaagagggagaaaaacaaataaatcaagaatacctaatatctcaagtagaaggtcatcaggtttctctgaaaaatcttcctgaaataatgaatattacagaagtcaaaaagatatataaactctcttcacaagaagaaagtatcgggacattattggatgctatcatttgtagaatgtcaacaaaagatgttttatgaaatgtcagaaatattaacaaaaattctcagcattaaagaaaacattgattttaaaaagaanaaaaagacaaaaaaacatttgtgggcgcctcgcctggaaagatttaaaaaaatctggggggcggagacacgaagagaagagaacgggcatagaggggtcc

SEQ ID NO: 423280 - DNA, 847 bp, Homo sapiens
aagacggggattggccatcgcttccggaagttgtgagctttgtttcggagcgggagctcttccgagacgcactgggggccggatgtagaatcctgcttatctgtgaaatgcagttaacacatcagctggacctatttcccgaatgcagggtaacccttctgttatttaaagatgtaaaaaatgcgggagacttgagaagaaaggccatggaaggcaccatcgatggatcactgataaatcctacagtgattgttgatccatttcagatacttgtggcagcaaacaaagcagttcacctctacaaactgggaaaaatgaagacaagaactctatctactgaaattattttcaacctttccccaaataacaatatttcagaggctttgaaaaaatttggtatctcagcaaatgacacttcaattctaattgtttacattgaagagggagaaaaacaaataaatcaagaatacctaatatctcaagtagaaggtcatcaggtttctctgaaaaatcttcctgaaataatgaatattacagaagtcaaaaaggtttgccagtccatatttttagaaagagtgtgatagatgagcaataatgctgatgccgtttgcctattgatcaccagagctccttgttttttgaacttttgagaaagttaatctaattttaaaaattacttaaaaattacagatacaaagaactgggaggtgtgatggtttatgtaaaatataattacaaactcagctgacataaccattctccacattaagaaagagaatacctttaaatatcaaacttacatagtatatttaaaatgtaaaataaatttagtatgcttttaaaatgg

SEQ ID NO: 423281 - DNA, 726 bp, Homo sapiens
aagacggggattggccatcgcttccggaagttgtgagctttgtttcggagcgggagctcttccgagacgcactgggggccggatgggtaacccttctgttatttaaagatgtaaaaaatgcgggagacttgagaagaaaggccatggaaggcaccatcgatggatcactgataaatcctacagtgattgttgatccatttcagatacttgtggcagcaaacaaagcagttcacctctacaaactgggaaaaatgaagacaagaactctatctactgaaattattttcaacctttccccaaataacaatatttcagaggctttgaaaaaatttggtatctcagcaaatgacacttcaattctaattgtttacattgaagagggagaaaaacaaataaatcaagaatacctaatatctcaagtagaaggtcatcaggtttctctgaaaaatcttcctgaaataatgaatattacagaagtcaaaaagatatataaactctcttcacaagaagaaagtatcgggacattattggatgctatcatttgtagaatgtcaacaaaagatgttttatgaaatgtcagaaatattaacaaaaattctcagcattaaagaaaacattgattttaaaaaaaaaaagctgaaaaatttggggggggttgggctctgaaaaagtttaaaacctggggggggcggggcccagggttgggacctgggcgggggtcaggaa

SEQ ID NO: 423282 - DNA, 959 bp, Homo sapiens
aagacggggattggccatcgcttccggaagttgtgagctttgtttcggagcgggagctcttccgagacgcactgggggccggatgtagaatcctgcttatctgtgaaatgcagttaacacatcagctggacctatttcccgaatgcagattgttgatccatttcagatacttgtggcagcaaacaaagcagttcacctctacaaactgggaaaaatgaagacaagaactctatctactgaaattattttcaacctttccccaaataacaatatttcagaggctttgaaaaaatttggtatctcagcaaatgacacttcaattctaattgtttacattgaagagggagaaaaacaaataaatcaagaatacctaatatctcaagtagaaggtcatcaggtttctctgaaaaatcttcctgaaataatgaatattacagaagtcaaaaagatatataaactctcttcacaagaagaaagtatcgggacattattggatgctatcatttgtagaatgtcaacaaaagatgttttatgaaatgtcagaaatattaacaaaaattctcagcattaaagaaaacattgattttcctttcctgactataaaactaattgtgcattatagaaaagtttaaatcacagaatggtattaaaaaaaaaaaaaaaaggccaggcacggtggctcacgcctgaaatcccagcaatttgggaggccaaggcaggtggatcacctgaggtcaggagttcaagaccagcctggctaacatggtgaaaccccatctctactaaaatacaaaaattagctgggcatgatggcaggtgcctgtaatcccagctattcgggaggctgagacaggagaatcgcatgaacctgggaggcacaggttgcagtgagctgagatcgtgccatagcactccagcctgggcagctgagcgagactccgtctcaaaaaaaaaaacca

SEQ ID NO: 423283 - DNA, 918 bp, Homo sapiens
tgcgcatcagcccggacagggtctacatcaactattacgacatgaacgcggcaatgtgggctggaacaactccaccttcgcctaagagccgcagggacccacgctgtctgcgctggctccacccgggaacccgccgcacgctgtgttctaggcccgcccaccccaaccttctggtggggagaaataaacgccgagacgcactgggggccggatgtagaatcctgcttatctgtgaaatgcagttaacacatcagctggacctatttcccgaatgcagggtaacccttctgttatttaaagatgtaaaaaatgcgggagacttgagaagaaaggccatggaaggcaccatcgatggatcactgataaatcctacagtgattgttgatccatttcagatacttgtggcagcaaacaaagcagttcacctctacaaactgggaaaaatgaagacaagaactctatctactgaaattattttcaacctttccccaaataacaatatttcagaggctttgaaaaaatttggtatctcagcaaatgacacttcaattctaattgtttacattgaagagggagaaaaacaaataaatcaagaatacctaatatctcaagtagaaggtcatcaggtttctctgaaaaatcttcctgaaataatgaatattacagaagtcaaaaagatatataaactctcttcacaagaagaaagtatcgggacattattggatgctatcatttgtagaatgtcaacaaaagatgttttatgaaatgtcagaaatattaacaaaaattctcagcattaaagaaaacattgattttaaaaaaaaaaagctgaaaaatttggggggggttgggctctgaaaaagtttaaaacctggggggggcggggcccagggttgggacctgggcgggggtcaggaa

SEQ ID NO: 423284 - DNA, 937 bp, Homo sapiens
tgcgcatcagcccggacagggtctacatcaactattacgacatgaacgcggcaatgtgggctggaacaactccaccttcgcctaagagccgcagggacccacgctgtctgcgctggctccacccgggaacccgccgcacgctgtgttctaggcccgcccaccccaaccttctggtggggagaaataaacgccgagacgcactgggggccggatgtagaatcctgcttatctgtgaaatgcagttaacacatcagctggacctatttcccgaatgcagggtaacccttctgttatttaaagatgtaaaaaatgcgggagacttgagaagaaaggccatggaaggcaccatcgatggatcactgataaatcctacagtgattgttgatccatttcagatacttgtggcagcaaacaaagcagttcacctctacaaactgggaaaaatgaagacaagaactctatctactgaaattattttcaacctttccccaaataacaatgtaatgtgcactttcctatttctgttgaccgtgtcataataacatatgtgttcctcagtgttgggttggaggctaaattcctgcaagccagtggttagtaataaacccaaataatagtgaagagagctctggacagagagttgaggtttaaccctgcctcttactaagacagtttacatatgagtaaacataaatttagctaaattaagcgaggttaattttatctgttcttaccatatagggtcaggaagacccctcaagtatttttgcttgagaagctgacagaaatctaaatgataaaacattaggcgtggatattttgtgtgctagcctgcatatcattctctcttcccgtaaactccttgagggtgggatccatgtctttttcatataccaggaacttgcttgtacctataacagtccttaacacagcctca

SEQ ID NO: 423285 - DNA, 1008 bp, Homo sapiens
accacccagtgtggagcagcccagccaagcactgtcaggaatcctgtgaagcagctccagctatgtgtgaagaagaggacagcactgccttggtgtgtgacaatggctctgggctctgtaaggccggctttgctggggacgatgctcccagggctgttttcccatccattgtgggacgtcccagacatcagggggtgatggtgggaatgggacaaaaagacagctacgtgggtgacgaagcacagagcaaaagaggaatcctgaccctgaagtacccgatagaacatggcatcatcaccaactgggacgacatggaaaagatctggcaccactctttctacaatgagcttcgtgttgcccctgaagagcatcccaccctgctcacggaggcacccctgaaccccaaggccaaccgggagaaaatgactcaaattatgtttgagactttcaatgtcccagccatgtatgtggctatccaggcggtgctgtctctctatgcctctggacgcacaactggcatcgtgctggactctggagatggtgtcacccacaatgtccccatctatgagggctatgccttgccccatgccatcatgcgtctggatctggctggccgagatctcactgactacctcatgaagatcctgactgagcgtggctattccttcgttactactgctgagcgtgagattgtccgggacatcaaggagaaactgtgttatgtagctctggactttgaaaatgagatgggcccttgggcggattccgtaaaccgtacccgttgagaagcagattacgaagtggacctgaatgggcacaggtgaatcaacaagcccggaacagcgcacacggtacggagggcaagaagcagccggtacgagcgaatggctctcaccgggaacgcgaggacggaagagagacaaagtgaaagcacacagaacgaacagcgacacggaaggcagcgaaaattgacactacggaaaggaccgacatgcggcacaaggacgc

SEQ ID NO: 423286 - DNA, 1283 bp, Homo sapiens
  misc_feature (896)..(896): n is a, c, g, or t
accacccagtgtggagcagcccagccaagcactgtcaggaatcctgtgaagcagctccagctatgtgtgaagaagaggacagcactgccttggtgtgtgacaatggctctgggctctgtaaggccggctttgctggggacgatgctcccagggctgttttcccatccattgtgggacgtcccagacatcagggggtgatggtgggaatgggacaaaaagacagctacgtgggtgacgaagcacagagcaaaagaggaatcctgaccctgaagtacccgatagaacatggcatcatcaccaactgggacgacatggaaaaggtatgggaggtttgctgcagcttgggccctcaggatgcataatccctgtgttctctgatacagaacaccacactactgctggggaaataactggctcacattgctcaactgtacttttacttgttaatgttcattctgggttattacccattgaaaaaaaaatccttgtagccataaaaaatgatgagttcatgtcctttgtagggacatggatgaagctggaaaccatcatcctcagcaaactgtcgcaaggacaaaaaaccaaacaccgcatgttctcactcataggtgggaattgaacaacgagaacacatggacacaggaaggggaacatcacacaccggggactgttgtggggtggggggagggggaggaatagcattaggagatatacctaatgtaaatgacgagttaatgggtgcagcacaccaacatggcacatgtatacatatgtaacaaacctgcacgttgtgcacatgtaccctaaaacttaaagtataataataataaaatttaaaaaaaaaagaaaaaaaaatcctaaaatgtttctttaaaaaaaaatcccttgccaggcanggttgctcacacgtgtaatcccaacactttgggaggccaaggtgggaggatcgcttggcccaggagtttgagaccaggctgggtaacatagtaagatcctgtctctacaaaaaataaatgaaattagccaggcatggtggcacacacctcagtcccagctacttgaaagattgaggtgggaggatcacttgagcctgggatatggaggctgcagtgggccaagatcctactccagcctaggtgacagagtgagatcctatctcaaaaaaaagaagaaaaaaatcctgcagggcacagtgactcacacctgtaatctcagcactggatcacttgaggccaggagtttgagaccagcctgagcaacatagcaaaaccctgtttctactg

SEQ ID NO: 423287 - DNA, 1682 bp, Homo sapiens
  misc_feature (1295)..(1295): n is a, c, g, or t
ttttaaatgcagctgactaatttaggcaaatgtcttaacagttgattggtatgaacttatccattagaaatcaagcctcaagtggttatttgtagatgcaatgcttttgcttataatagttagaaaataatgctcatattcttttgggtaggtgatgactttaaaagtacagtttaaaggatttataagacacaaaatgccatttaacaaatatgtaaaattgtatacattctttcaacaaataattattgagtgccacatatgtgccatgcaatttgctatagtgatggacaagacagacatgatctctgccctaaaaaagctcatcaaggaacataggagataaaaatacaaagtaaagttgactttcccccaacatctcctgttatttggaggcaattcaggtctttttccaatcaactgcagaattttgcttaagagcatagtggcaatgagactcaatatgtttattgttgctgataatcagaagaggaacttcccatctcaatgacttaaccttttgtggcttggctgtaattgattcacaagttttgggagatgctgactcataatgtgttgaacctttttagggggtgatggtgggaatgggacaaaaagacagctacgtgggtgacgaagcacagagcaaaagaggaatcctgaccctgaagtacccgatagaacatggcatcatcaccaactgggacgacatggaaaaggtatgggaggtttgctgcagcttgggccctcaggatgcataatccctgtgttctctgatacagaacaccacactactgctggggaaataactggctcacattgctcaactgtacttttacttgttaatgttcattctgggttattacccattgaaaaaaaaatccttgtagccataaaaaatgatgagttcatgtcctttgtagggacatggatgaagctggaaaccatcatcctcagcaaactgtcgcaaggacaaaaaaccaaacaccgcatgttctcactcataggtgggaattgaacaacgagaacacatggacacaggaaggggaacatcacacaccggggactgttgtggggtggggggagggggaggaatagcattaggagatatacctaatgtaaatgacgagttaatgggtgcagcacaccaacatggcacatgtatacatatgtaacaaacctgcacgttgtgcacatgtaccctaaaacttaaagtataataataataaaatttaaaaaaaaaagaaaaaaaaatcctaaaatgtttctttaaaaaaaaatcccttgccaggcanggttgctcacacgtgtaatcccaacactttgggaggccaaggtgggaggatcgcttggcccaggagtttgagaccaggctgggtaacatagtaagatcctgtctctacaaaaaataaatgaaattagccaggcatggtggcacacacctcagtcccagctacttgaaagattgaggtgggaggatcacttgagcctgggatatggaggctgcagtgggccaagatcctactccagcctaggtgacagagtgagatcctatctcaaaaaaaagaagaaaaaaatcctgcagggcacagtgactcacacctgtaatctcagcactggatcacttgaggccaggagtttgagaccagcctgagcaacatagcaaaaccctgtttctactg

SEQ ID NO: 423288 - DNA, 837 bp, Homo sapiens
accacccagtgtggagcagcccagccaagcactgtcaggaatcctgtgaagcagctccagctatgtgtgaagaagaggacagcactgccttggtgtgtgacaatggctctgggctctgtaaggccggctttgctggggacgatgctcccagggctgttttcccatccattgtgggacgtcccagacatcaggtgaggaaaattatgattggaacataacaggacacagattaggttcctctgtgttcatgtttatccccagattgtctatctctttctgcccagaagttatgtaaccttgttacaaatagacctctaatgattaaggtccaggagtaaatgccaatttcacatataatgtagacagattatctgatgggcatctatcagatacaaagtctgcccctttttcatgtcctttttgtctaaatatagtcattatcatcatcatcatcatcatcaaatcatttcatcaccatcagaaatgcttatacattatcctgatgtataccaaagctactgtttggaaagaaactaaaataaaagtccaggtcacttaaccatacagggctgatgttagatgaaagcaagcatcgataccaaatgcaattttacataatattagctgtcaacaaaatatatttggacagccgcatggtaattttacacattatgtgtaaacaaagtattggtggcatcacatggtaaaaactcagtaatttcacctcagaaattcttcttcacatcagaaatgtagtttgtgcattgaggctatctgattgatgtttatgcctctctgcttgggatatattcatgagaataaataatagaaacctct

SEQ ID NO: 423289 - DNA, 1504 bp, Homo sapiens
ctcggccgattcggcacgaggtgtggagcagcccagccaagcactgtcaggaatcctgtgaagcagctccagctatgtgtgaagaagaggacagcactgccttggtgtgtgacaatggctctgggctctgtaaggccggctttgctggggacgatgctcccagggctgttttcccatccattgtgggacgtcccagacatcagggggtgatggtgggaatgggacaaaaagacagctacgtgggtgacgaagcacagagcaaaagaggaatcctgaccctgaagtacccgatagaacatggcatcatcaccaactgggacgacatggaaaagatctggcaccactctttctacaatgagcttcgtgttgcccctgaagagcatcccaccctgctcacggaggcacccctgaaccccaaggccaaccgggagaaaatgactcaaattatgtttgagactttcaatgtcccagccatgtatgtggctatccaggcggtgctgtctctctatgcctctggacgcacaactggcatcgtgctggactctggagatggtgtcacccacaatgtccccatctatgagggctatgccttgccccatgccatcatgcgtctggatctggctggccgagatctcactgactacctcatgaagatcctgactgagcgtggctattccttcgttactactgctgagcgtgagattgtccgggacatcaaggagaaactgtgttatgtagctctggactttgaaaatgagatggccactgccgcatcctcatcctcccttgagaagagttacgagttgcctgatgggcaagtgatcaccatcggaaatgaacgtttccgctgcccagagaccctgttccagccatccttcatcgggatggagtctgctggcatccatgaaaccacctacaacagcatcatgaagtgtgatattgacatcaggaaggacctctatgctaacaatgtcctatcagggggcaccactatgtaccctggcattgccgaccgaatgcagaaggagatcacggccctagcacccagcaccatgaagatcaagatcattgcccctccggagcgcaaatactctgtctggatcggtggctccatcctggcctctctgtccaccttccagcagatgtggatcagcaaacaggaatacgatgaagccgggccttccattgtccaccgcaaatgcttctaaaacactttcctgctcctctctgtctctagcacacaactgtgaatgtcctgtggaattatgccttcagttcttttccaaatcattcctagccaaagctctgactcgttacctatgtgttttttaataaatctgaaataggctactggtaaaaaaagaatatataataaaaaagttttgcccatagtgagccgattacattgtcgacggcgccgcaatttagtagtagagtagtaatcacccggaatcccgacggtacctgaagcgtacaagttcccttagtggtcgtttagactggg

SEQ ID NO: 423290 - DNA, 1492 bp, Homo sapiens
accacccagtgtggagcagcccagccaagcactgtcaggaatcctgtgaagcagctccagctatgtgtgaagaagaggacagcactgccttggtgtgtgacaatggctctgggctctgtaaggccggctttgctggggacgatgctcccagggctgttttcccatccattgtgggacgtcccagacatcagggggtgatggtgggaatgggacaaaaagacagctacgtgggtgacgaagcacagagcaaaagaggaatcctgaccctgaagtacccgatagaacatggcatcatcaccaactgggacgacatggaaaagatctggcaccactctttctacaatgagcttcgtgttgcccctgaagagcatcccaccctgctcacggaggcacccctgaaccccaaggccaaccgggagaaaatgactcaaattatgtttgagactttcaatgtcccagccatgtatgtggctatccaggcggtgctgtctctctatgcctctggacgcacaactggcatcgtgctggactctggagatggtgtcacccacaatgtccccatctatgagggctatgccttgccccatgccatcatgcgtctggatctggctggccgagatctcactgactacctcatgaagatcctgactgagcgtggctattccttcgttactactgctgagcgtgagattgtccgggacatcaaggagaaactgtgttatgtagctctggactttgaaaatgagatggccactgccgcatcctcatcctcccttgagaagagttacgagttgcctgatgggcaagtgatcaccatcggaaatgaacgtttccgctgcccagagaccctgttccagccatccttcatcgggatggagtctgctggcatccatgaaaccacctacaacagcatcatgaagtgtgatattgacatcaggaaggacctctatgctaacaatgtcctatcagggggcaccactatgtaccctggcattgccgaccgaatgcagaaggagatcacggccctagcacccagcaccatgaagatcaagatcattgcccctccggagcgcaaatactctgtctggatcggtggctccatcctggcctctctgtccaccttccagcagatgtggatcagcaaacaggaatacgatgaagccgggccttccattgtccaccgcaaatgcttctaaaacactttcctgctcctctctgtctctagcacacaactgtgaatgtcctgtggaattatgccttcagttcttttccaaatcattcctagccaaagctctgactcgttacctatgtgttttttaataaatctgaaataggctactggtaaaaaaagaatatataataaaaaagttttgcccatagtgagccgattacattgtcgacggcgccgcaatttagtagtagagtagtaatcacccggaatcccgacggtacctgaagcgtacaagttcccttagtggtcgtttagactggg

SEQ ID NO: 423291 - DNA, 3065 bp, Homo sapiens
attcggcacaggattctttcagaaaagcaaagttttcttcgggctttaaacacgcagcctctggtaaaggtgctattggtacaaaagttcaacaagcatagctccaagctttgacaattttcttacactttactaatactgctgtccaaaaactatgagattttcaaagcagccaacattgcagtggtgcaatggttaataacaagagagagaagagtgtggcctgaggttgtataaatgttttctcaatcttgaatcattaattttctccaaggaagtttctaaagaatcccaaatagtgcacactatttctgaaaggaacaggatttttttttctaatcataaaatggacccagacatctcagcctcttggtgtaatctggatatcagatgcaatcagcgaacagcctgagttttggaattagatctgagttcaatcccatatctcccatttactagctgtgtgatcttggctgaattactgaagctctctgaacctcatttcgccatctgtaaaatggggatgtggttatcttccccactacatggctctcgtgagaatccgcggagatcacatttgtaaacacttctctcgctatgcctggcactttgttggggcccaataaaataaaaatccatggactctcagaggctccggtactcaaatgagcctcctggatccacgtctctttgattagccatctgcaagctggcatttctgagcgagggacttttcaaaacaggctgctcaagtttcttggccaataataggcgccgggttctgtgcggtgggaacgagtaccaccaaccccagcaggagaccaagcagaaatcaccatgggagtgcaagctaagaaagggcaaaagaagaaagagaagggcagaaaaacaaaacaaaatgaaaccactcaggcagcgacttacagtcttaaagagagaattcccggaagggagacaaggcagtttctttttctgtgtgacaataaaaaacggtaaacaagcctccagaagctcattcagcccccatataactttttcgagaaagaaaaggtgccgttcttccgagccctccggcttaaccactgcttcggtgctgacttatttcctacgtctgagaactgccagaaaatgagcaatatctgttctgaaggctgcaggctctctccccgcccccgcggggcggcgcgcactcacccacccgcgccggagcggacctttggcttggcttgtcagggcttgtccaggagttccgctcctctctccaaccggggtccccctccagcgaccctaaagcttcccagacttccgcttcaattcctgtccgccccccacgcccacctcaacgtggagcgcagtggtctccgaggagcgccggagctgccccgcctgcccagcggggtcagcacttcgcatcaaggcccaagaaaagcaagtcctccagcgttctgagcacccgggcctgagggaaggtcctaacagcccccgggagccagtctccaacgcctcccgcagcagcccgccgctcccaggtgcccgcgtgcgccgctgccgccgcaatcccgcacgcgtcccgcgcccgccccactttgcctatccccgggactaagacgggaatcctgtgaagcagctccagctatgtgtgaagaagaggacagcactgccttggtgtgtgacaatggctctgggctctgtaaggccggctttgctggggacgatgctcccagggctgttttcccatccattgtgggacgtcccagacatcagggggtgatggtgggaatgggacaaaaagacagctacgtgggtgacgaagcacagagcaaaagaggaatcctgaccctgaagtacccgatagaacatggcatcatcaccaactgggacgacatggaaaagatctggcaccactctttctacaatgagcttcgtgttgcccctgaagagcatcccaccctgctcacggaggcacccctgaaccccaaggccaaccgggagaaaatgactcaaattatgtttgagactttcaatgtcccagccatgtatgtggctatccaggcggtgctgtctctctatgcctctggacgcacaactggcatcgtgctggactctggagatggtgtcacccacaatgtccccatctatgagggctatgccttgccccatgccatcatgcgtctggatctggctggccgagatctcactgactacctcatgaagatcctgactgagcgtggctattccttcgttactactgctgagcgtgagattgtccgggacatcaaggagaaactgtgttatgtagctctggactttgaaaatgagatggccactgccgcatcctcatcctcccttgagaagagttacgagttgcctgatgggcaagtgatcaccatcggaaatgaacgtttccgctgcccagagaccctgttccagccatccttcatcgggatggagtctgctggcatccatgaaaccacctacaacagcatcatgaagtgtgatattgacatcaggaaggacctctatgctaacaatgtcctatcagggggcaccactatgtaccctggcattgccgaccgaatgcagaaggagatcacggccctagcacccagcaccatgaagatcaagatcattgcccctccggagcgcaaatactctgtctggatcggtggctccatcctggcctctctgtccaccttccagcagatgtggatcagcaaacaggaatacgatgaagccgggccttccattgtccaccgcaaatgcttctaaaacactttcctgctcctctctgtctctagcacacaactgtgaatgtcctgtggaattatgccttcagttcttttccaaatcattcctagccaaagctctgactcgttacctatgtgttttttaataaatctgaaataggctactggtaaaaaaagaatatataataaaaaagttttgcccatagtgagccgattacattgtcgacggcgccgcaatttagtagtagagtagtaatcacccggaatcccgacggtacctgaagcgtacaagttcccttagtggtcgtttagactggg

SEQ ID NO: 423292 - DNA, 3011 bp, Homo sapiens
attcggcacaggattctttcagaaaagcaaagttttcttcgggctttaaacacgcagcctctggtaaaggtgctattggtacaaaagttcaacaagcatagctccaagctttgacaattttcttacactttactaatactgctgtccaaaaactatgagattttcaaagcagccaacattgcagtggtgcaatggttaataacaagagagagaagagtgtggcctgaggttgtataaatgttttctcaatcttgaatcattaattttctccaaggaagtttctaaagaatcccaaatagtgcacactatttctgaaaggaacaggatttttttttctaatcataaaatggacccagacatctcagcctcttggtgtaatctggatatcagatgcaatcagcgaacagcctgagttttggaattagatctgagttcaatcccatatctcccatttactagctgtgtgatcttggctgaattactgaagctctctgaacctcatttcgccatctgtaaaatggggatgtggttatcttccccactacatggctctcgtgagaatccgcggagatcacatttgtaaacacttctctcgctatgcctggcactttgttggggcccaataaaataaaaatccatggactctcagaggctccggtactcaaatgagcctcctggatccacgtctctttgattagccatctgcaagctggcatttctgagcgagggacttttcaaaacaggctgctcaagtttcttggccaataataggcgccgggttctgtgcggtgggaacgagtaccaccaaccccagcaggagaccaagcagaaatcaccatgggagtgcaagctaagaaagggcaaaagaagaaagagaagggcagaaaaacaaaacaaaatgaaaccactcaggcagcgacttacagtcttaaagagagaattcccggaagggagacaaggcagtttctttttctgtgtgacaataaaaaacggtaaacaagcctccagaagctcattcagcccccatataactttttcgagaaagaaaaggtgccgttcttccgagccctccggcttaaccactgcttcggtgctgacttatttcctacgtctgagaactgccagaaaatgagcaatatctgttctgaaggctgcaggctctctccccgcccccgcggggcggcgcgcactcacccacccgcgccggagcggacctttggcttggcttgtcagggcttgtccaggagttccgctcctctctccaaccggggtccccctccagcgaccctaaagcttcccagacttccgcttcaattcctgtccgccccccacgcccacctcaacgtggagcgcagtggtctccgaggagcgccggagctgccccgcctgcccagcggggtcagcacttcgcatcaaggcccaagacccccgggagccagtctccaacgcctcccgcagcagcccgccgctcccaggtgcccgcgtgcgccgctgccgccgcaatcccgcacgcgtcccgcgcccgccccactttgcctatccccgggactaagacgggaatcctgtgaagcagctccagctatgtgtgaagaagaggacagcactgccttggtgtgtgacaatggctctgggctctgtaaggccggctttgctggggacgatgctcccagggctgttttcccatccattgtgggacgtcccagacatcagggggtgatggtgggaatgggacaaaaagacagctacgtgggtgacgaagcacagagcaaaagaggaatcctgaccctgaagtacccgatagaacatggcatcatcaccaactgggacgacatggaaaagatctggcaccactctttctacaatgagcttcgtgttgcccctgaagagcatcccaccctgctcacggaggcacccctgaaccccaaggccaaccgggagaaaatgactcaaattatgtttgagactttcaatgtcccagccatgtatgtggctatccaggcggtgctgtctctctatgcctctggacgcacaactggcatcgtgctggactctggagatggtgtcacccacaatgtccccatctatgagggctatgccttgccccatgccatcatgcgtctggatctggctggccgagatctcactgactacctcatgaagatcctgactgagcgtggctattccttcgttactactgctgagcgtgagattgtccgggacatcaaggagaaactgtgttatgtagctctggactttgaaaatgagatggccactgccgcatcctcatcctcccttgagaagagttacgagttgcctgatgggcaagtgatcaccatcggaaatgaacgtttccgctgcccagagaccctgttccagccatccttcatcgggatggagtctgctggcatccatgaaaccacctacaacagcatcatgaagtgtgatattgacatcaggaaggacctctatgctaacaatgtcctatcagggggcaccactatgtaccctggcattgccgaccgaatgcagaaggagatcacggccctagcacccagcaccatgaagatcaagatcattgcccctccggagcgcaaatactctgtctggatcggtggctccatcctggcctctctgtccaccttccagcagatgtggatcagcaaacaggaatacgatgaagccgggccttccattgtccaccgcaaatgcttctaaaacactttcctgctcctctctgtctctagcacacaactgtgaatgtcctgtggaattatgccttcagttcttttccaaatcattcctagccaaagctctgactcgttacctatgtgttttttaataaatctgaaataggctactggtaaaaaaagaatatataataaaaaagttttgcccatagtgagccgattacattgtcgacggcgccgcaatttagtagtagagtagtaatcacccggaatcccgacggtacctgaagcgtacaagttcccttagtggtcgtttagactggg

SEQ ID NO: 423293 - DNA, 1797 bp, Homo sapiens
tatagtaccgtggcgaatttgggaacagaatccagttaatgacatcttggaggaacttagaaacaggaagtgactcaggattgggaagcaccagaaatagagctgctgacatgacatggtgacaagcattctttgtcaattgactttttctcccgccccctggatcctaaggaaacggcacagcatttccttgccctgcccttgacgtgctatgcctactctaagctagataggggcttctgaaagaaaaacctaaggaagccccctgctcatgcctggaggaaagaactgccgttgttcttcgacgattcgtcgaagaacaacggcaaccaagcactgtcaggaatcctgtgaagcagctccagctatgtgtgaagaagaggacagcactgccttggtgtgtgacaatggctctgggctctgtaaggccggctttgctggggacgatgctcccagggctgttttcccatccattgtgggacgtcccagacatcagggggtgatggtgggaatgggacaaaaagacagctacgtgggtgacgaagcacagagcaaaagaggaatcctgaccctgaagtacccgatagaacatggcatcatcaccaactgggacgacatggaaaagatctggcaccactctttctacaatgagcttcgtgttgcccctgaagagcatcccaccctgctcacggaggcacccctgaaccccaaggccaaccgggagaaaatgactcaaattatgtttgagactttcaatgtcccagccatgtatgtggctatccaggcggtgctgtctctctatgcctctggacgcacaactggcatcgtgctggactctggagatggtgtcacccacaatgtccccatctatgagggctatgccttgccccatgccatcatgcgtctggatctggctggccgagatctcactgactacctcatgaagatcctgactgagcgtggctattccttcgttactactgctgagcgtgagattgtccgggacatcaaggagaaactgtgttatgtagctctggactttgaaaatgagatggccactgccgcatcctcatcctcccttgagaagagttacgagttgcctgatgggcaagtgatcaccatcggaaatgaacgtttccgctgcccagagaccctgttccagccatccttcatcgggatggagtctgctggcatccatgaaaccacctacaacagcatcatgaagtgtgatattgacatcaggaaggacctctatgctaacaatgtcctatcagggggcaccactatgtaccctggcattgccgaccgaatgcagaaggagatcacggccctagcacccagcaccatgaagatcaagatcattgcccctccggagcgcaaatactctgtctggatcggtggctccatcctggcctctctgtccaccttccagcagatgtggatcagcaaacaggaatacgatgaagccgggccttccattgtccaccgcaaatgcttctaaaacactttcctgctcctctctgtctctagcacacaactgtgaatgtcctgtggaattatgccttcagttcttttccaaatcattcctagccaaagctctgactcgttacctatgtgttttttaataaatctgaaataggctactggtaaaaaaagaatatataataaaaaagttttgcccatagtgagccgattacattgtcgacggcgccgcaatttagtagtagagtagtaatcacccggaatcccgacggtacctgaagcgtacaagttcccttagtggtcgtttagactggg

SEQ ID NO: 423294 - DNA, 1750 bp, Homo sapiens
tcctttaaacgtacttttaaactcatcacctaccaaaagaatatgagcattattttctaactattataagcaaaagcatgcatctacaaataaccacttgaggctgatttctaatggataagttcataccaatcaactgttaaggacatttgcctaaattagtcagctgcatttaaaaaaactcatcaaggaacataggagataaaaatacaaagtaaagttgactttcccccaacatctcctgttatttggaggcaattcaggtctttttccaatcaactgcagaattttgcttaagagcatagtggcaatgagactcaatatgtttattgttgctgataatcagaagaggaacttcccatctcaatgacttaaccttttgtggcttggctgtaattgattcacaagttttgggagatgctgactcataatgtgttgaacctttttagggggtgatggtgggaatgggacaaaaagacagctacgtgggtgacgaagcacagagcaaaagaggaatcctgaccctgaagtacccgatagaacatggcatcatcaccaactgggacgacatggaaaagatctggcaccactctttctacaatgagcttcgtgttgcccctgaagagcatcccaccctgctcacggaggcacccctgaaccccaaggccaaccgggagaaaatgactcaaattatgtttgagactttcaatgtcccagccatgtatgtggctatccaggcggtgctgtctctctatgcctctggacgcacaactggcatcgtgctggactctggagatggtgtcacccacaatgtccccatctatgagggctatgccttgccccatgccatcatgcgtctggatctggctggccgagatctcactgactacctcatgaagatcctgactgagcgtggctattccttcgttactactgctgagcgtgagattgtccgggacatcaaggagaaactgtgttatgtagctctggactttgaaaatgagatggccactgccgcatcctcatcctcccttgagaagagttacgagttgcctgatgggcaagtgatcaccatcggaaatgaacgtttccgctgcccagagaccctgttccagccatccttcatcgggatggagtctgctggcatccatgaaaccacctacaacagcatcatgaagtgtgatattgacatcaggaaggacctctatgctaacaatgtcctatcagggggcaccactatgtaccctggcattgccgaccgaatgcagaaggagatcacggccctagcacccagcaccatgaagatcaagatcattgcccctccggagcgcaaatactctgtctggatcggtggctccatcctggcctctctgtccaccttccagcagatgtggatcagcaaacaggaatacgatgaagccgggccttccattgtccaccgcaaatgcttctaaaacactttcctgctcctctctgtctctagcacacaactgtgaatgtcctgtggaattatgccttcagttcttttccaaatcattcctagccaaagctctgactcgttacctatgtgttttttaataaatctgaaataggctactggtaaaaaaagaatatataataaaaaagttttgcccatagtgagccgattacattgtcgacggcgccgcaatttagtagtagagtagtaatcacccggaatcccgacggtacctgaagcgtacaagttcccttagtggtcgtttagactggg

SEQ ID NO: 423295 - DNA, 1891 bp, Homo sapiens
ttttaaatgcagctgactaatttaggcaaatgtcttaacagttgattggtatgaacttatccattagaaatcaagcctcaagtggttatttgtagatgcaatgcttttgcttataatagttagaaaataatgctcatattcttttgggtaggtgatgactttaaaagtacagtttaaaggatttataagacacaaaatgccatttaacaaatatgtaaaattgtatacattctttcaacaaataattattgagtgccacatatgtgccatgcaatttgctatagtgatggacaagacagacatgatctctgccctaaaaaagctcatcaaggaacataggagataaaaatacaaagtaaagttgactttcccccaacatctcctgttatttggaggcaattcaggtctttttccaatcaactgcagaattttgcttaagagcatagtggcaatgagactcaatatgtttattgttgctgataatcagaagaggaacttcccatctcaatgacttaaccttttgtggcttggctgtaattgattcacaagttttgggagatgctgactcataatgtgttgaacctttttagggggtgatggtgggaatgggacaaaaagacagctacgtgggtgacgaagcacagagcaaaagaggaatcctgaccctgaagtacccgatagaacatggcatcatcaccaactgggacgacatggaaaagatctggcaccactctttctacaatgagcttcgtgttgcccctgaagagcatcccaccctgctcacggaggcacccctgaaccccaaggccaaccgggagaaaatgactcaaattatgtttgagactttcaatgtcccagccatgtatgtggctatccaggcggtgctgtctctctatgcctctggacgcacaactggcatcgtgctggactctggagatggtgtcacccacaatgtccccatctatgagggctatgccttgccccatgccatcatgcgtctggatctggctggccgagatctcactgactacctcatgaagatcctgactgagcgtggctattccttcgttactactgctgagcgtgagattgtccgggacatcaaggagaaactgtgttatgtagctctggactttgaaaatgagatggccactgccgcatcctcatcctcccttgagaagagttacgagttgcctgatgggcaagtgatcaccatcggaaatgaacgtttccgctgcccagagaccctgttccagccatccttcatcgggatggagtctgctggcatccatgaaaccacctacaacagcatcatgaagtgtgatattgacatcaggaaggacctctatgctaacaatgtcctatcagggggcaccactatgtaccctggcattgccgaccgaatgcagaaggagatcacggccctagcacccagcaccatgaagatcaagatcattgcccctccggagcgcaaatactctgtctggatcggtggctccatcctggcctctctgtccaccttccagcagatgtggatcagcaaacaggaatacgatgaagccgggccttccattgtccaccgcaaatgcttctaaaacactttcctgctcctctctgtctctagcacacaactgtgaatgtcctgtggaattatgccttcagttcttttccaaatcattcctagccaaagctctgactcgttacctatgtgttttttaataaatctgaaataggctactggtaaaaaaagaatatataataaaaaagttttgcccatagtgagccgattacattgtcgacggcgccgcaatttagtagtagagtagtaatcacccggaatcccgacggtacctgaagcgtacaagttcccttagtggtcgtttagactggg

SEQ ID NO: 423296 - DNA, 1390 bp, Homo sapiens
tgggtcggcgctcagtatggccggagtcgctgtcgacttgcgctctccgtgtcggttacccattgctcgtggcacttgcgagaggtcaggatcttctagagtcaatgtgacaacatgacagctacgtgggtgacgaagcacagagcaaaagaggaatcctgaccctgaagtacccgatagaacatggcatcatcaccaactgggacgacatggaaaagatctggcaccactctttctacaatgagcttcgtgttgcccctgaagagcatcccaccctgctcacggaggcacccctgaaccccaaggccaaccgggagaaaatgactcaaattatgtttgagactttcaatgtcccagccatgtatgtggctatccaggcggtgctgtctctctatgcctctggacgcacaactggcatcgtgctggactctggagatggtgtcacccacaatgtccccatctatgagggctatgccttgccccatgccatcatgcgtctggatctggctggccgagatctcactgactacctcatgaagatcctgactgagcgtggctattccttcgttactactgctgagcgtgagattgtccgggacatcaaggagaaactgtgttatgtagctctggactttgaaaatgagatggccactgccgcatcctcatcctcccttgagaagagttacgagttgcctgatgggcaagtgatcaccatcggaaatgaacgtttccgctgcccagagaccctgttccagccatccttcatcgggatggagtctgctggcatccatgaaaccacctacaacagcatcatgaagtgtgatattgacatcaggaaggacctctatgctaacaatgtcctatcagggggcaccactatgtaccctggcattgccgaccgaatgcagaaggagatcacggccctagcacccagcaccatgaagatcaagatcattgcccctccggagcgcaaatactctgtctggatcggtggctccatcctggcctctctgtccaccttccagcagatgtggatcagcaaacaggaatacgatgaagccgggccttccattgtccaccgcaaatgcttctaaaacactttcctgctcctctctgtctctagcacacaactgtgaatgtcctgtggaattatgccttcagttcttttccaaatcattcctagccaaagctctgactcgttacctatgtgttttttaataaatctgaaataggctactggtaaaaaaagaatatataataaaaaagttttgcccatagtgagccgattacattgtcgacggcgccgcaatttagtagtagagtagtaatcacccggaatcccgacggtacctgaagcgtacaagttcccttagtggtcgtttagactggg

SEQ ID NO: 423297 - DNA, 1748 bp, Homo sapiens
tatagtaccgtggcgaatttgggaacagaatccagttaatgacatcttggaggaacttagaaacaggaagtgactcaggattgggaagcaccagaaatagagctgctgacatgacatggtgacaagcattctttgtcaattgactttttctcccgccccctggatcctaaggaaacggcacagcatttccttgccctgcccttgacgtgctatgcctactctaagctagataggggcttctgaaagaaaaacctaaggaagccccctgctcatgcctggaggaaagaactgccgttgttcttcgacgattcgtcgaagaacaacggcaaccaagcactgtcaggaatcctgtgaagcagctccagctatgtgtgaagaagaggacagcactgccttggtgtgtgacaatggctctgggctctgtaaggccggctttgctggggacgatgctcccagggctgttttcccatccattgtgggacgtcccagacatcagggggtgatggtgggaatgggacaaaaagacagctacgtgggtgacgaagcacagagcaaaagaggaatcctgaccctgaagtacccgatagaacatggcatcatcaccaactgggacgacatggaaaagatcccaccctgctcacggaggcacccctgaaccccaaggccaaccgggagaaaatgactcaaattatgtttgagactttcaatgtcccagccatgtatgtggctatccaggcggtgctgtctctctatgcctctggacgcacaactggcatcgtgctggactctggagatggtgtcacccacaatgtccccatctatgagggctatgccttgccccatgccatcatgcgtctggatctggctggccgagatctcactgactacctcatgaagatcctgactgagcgtggctattccttcgttactactgctgagcgtgagattgtccgggacatcaaggagaaactgtgttatgtagctctggactttgaaaatgagatggccactgccgcatcctcatcctcccttgagaagagttacgagttgcctgatgggcaagtgatcaccatcggaaatgaacgtttccgctgcccagagaccctgttccagccatccttcatcgggatggagtctgctggcatccatgaaaccacctacaacagcatcatgaagtgtgatattgacatcaggaaggacctctatgctaacaatgtcctatcagggggcaccactatgtaccctggcattgccgaccgaatgcagaaggagatcacggccctagcacccagcaccatgaagatcaagatcattgcccctccggagcgcaaatactctgtctggatcggtggctccatcctggcctctctgtccaccttccagcagatgtggatcagcaaacaggaatacgatgaagccgggccttccattgtccaccgcaaatgcttctaaaacactttcctgctcctctctgtctctagcacacaactgtgaatgtcctgtggaattatgccttcagttcttttccaaatcattcctagccaaagctctgactcgttacctatgtgttttttaataaatctgaaataggctactggtaaaaaaagaatatataataaaaaagttttgcccatagtgagccgattacattgtcgacggcgccgcaatttagtagtagagtagtaatcacccggaatcccgacggtacctgaagcgtacaagttcccttagtggtcgtttagactggg

SEQ ID NO: 423298 - DNA, 1444 bp, Homo sapiens
accacccagtgtggagcagcccagccaagcactgtcaggaatcctgtgaagcagctccagctatgtgtgaagaagaggacagcactgccttggtgtgtgacaatggctctgggctctgtaaggccggctttgctggggacgatgctcccagggctgttttcccatccattgtgggacgtcccagacatcagggggtgatggtgggaatgggacaaaaagacagctacgtgggtgacgaagcacagagcaaaagaggaatcctgaccctgaagtacccgatagaacatggcatcatcaccaactgggacgacatggaaaagatctggcaccactctttctacaatgagcttcgtgttgcccctgaagagcatcccaccctgctcacggaggcacccctgaaccccaaggccaaccgggagaaaatgactcaagcggtgctgtctctctatgcctctggacgcacaactggcatcgtgctggactctggagatggtgtcacccacaatgtccccatctatgagggctatgccttgccccatgccatcatgcgtctggatctggctggccgagatctcactgactacctcatgaagatcctgactgagcgtggctattccttcgttactactgctgagcgtgagattgtccgggacatcaaggagaaactgtgttatgtagctctggactttgaaaatgagatggccactgccgcatcctcatcctcccttgagaagagttacgagttgcctgatgggcaagtgatcaccatcggaaatgaacgtttccgctgcccagagaccctgttccagccatccttcatcgggatggagtctgctggcatccatgaaaccacctacaacagcatcatgaagtgtgatattgacatcaggaaggacctctatgctaacaatgtcctatcagggggcaccactatgtaccctggcattgccgaccgaatgcagaaggagatcacggccctagcacccagcaccatgaagatcaagatcattgcccctccggagcgcaaatactctgtctggatcggtggctccatcctggcctctctgtccaccttccagcagatgtggatcagcaaacaggaatacgatgaagccgggccttccattgtccaccgcaaatgcttctaaaacactttcctgctcctctctgtctctagcacacaactgtgaatgtcctgtggaattatgccttcagttcttttccaaatcattcctagccaaagctctgactcgttacctatgtgttttttaataaatctgaaataggctactggtaaaaaaagaatatataataaaaaagttttgcccatagtgagccgattacattgtcgacggcgccgcaatttagtagtagagtagtaatcacccggaatcccgacggtacctgaagcgtacaagttcccttagtggtcgtttagactggg

SEQ ID NO: 423299 - DNA, 2773 bp, Homo sapiens
attcggcacaggattctttcagaaaagcaaagttttcttcgggctttaaacacgcagcctctggtaaaggtgctattggtacaaaagttcaacaagcatagctccaagctttgacaattttcttacactttactaatactgctgtccaaaaactatgagattttcaaagcagccaacattgcagtggtgcaatggttaataacaagagagagaagagtgtggcctgaggttgtataaatgttttctcaatcttgaatcattaattttctccaaggaagtttctaaagaatcccaaatagtgcacactatttctgaaaggaacaggatttttttttctaatcataaaatggacccagacatctcagcctcttggtgtaatctggatatcagatgcaatcagcgaacagcctgagttttggaattagatctgagttcaatcccatatctcccatttactagctgtgtgatcttggctgaattactgaagctctctgaacctcatttcgccatctgtaaaatggggatgtggttatcttccccactacatggctctcgtgagaatccgcggagatcacatttgtaaacacttctctcgctatgcctggcactttgttggggcccaataaaataaaaatccatggactctcagaggctccggtactcaaatgagcctcctggatccacgtctctttgattagccatctgcaagctggcatttctgagcgagggacttttcaaaacaggctgctcaagtttcttggccaataataggcgccgggttctgtgcggtgggaacgagtaccaccaaccccagcaggagaccaagcagaaatcaccatgggagtgcaagctaagaaagggcaaaagaagaaagagaagggcagaaaaacaaaacaaaatgaaaccactcaggcagcgacttacagtcttaaagagagaattcccggaagggagacaaggcagtttctttttctgtgtgacaataaaaaacggtaaacaagcctccagaagctcattcagcccccatataactttttcgagaaagaaaaggtgccgttcttccgagccctccggcttaaccactgcttcggtgctgacttatttcctacgtctgagaactgccagaaaatgagcaatatctgttctgaaggctgcaggctctctccccgcccccgcggggcggcgcgcactcacccacccgcgccggagcggacctttggcttggcttgtcagggcttgtccaggagttccgctcctctctccaaccggggtccccctccagcgaccctaaagcttcccagacttccgcttcaattcctgtccgccccccacgcccacctcaacgtggagcgcagtggtctccgaggagcgccggagctgccccgcctgcccagcggggtcagcacttcgcatcaaggcccaagaaaagcaagtcctccagcgttctgagcacccgggcctgagggaaggtcctaacagcccccgggagccagtctccaacgcctcccgcagcagcccgccgctcccaggtgcccgcgtgcgccgctgccgccgcaatcccgcacgcgtcccgcgcccgccccactttgcctatccccgggactaagacgggaatcctgtgaagcagctccagctatgtgtgaagaagaggacagcactgccttggtgtgtgacaatggctctgggctctgtaaggccggctttgctggggacgatgctcccagggctgttttcccatccattgtgggacgtcccagacatcagggggtgatggtgggaatgggacaaaaagacagctacgtgggtgacgaagcacagagcaaaagaggaatcctgaccctgaagatgagggctatgccttgccccatgccatcatgcgtctggatctggctggccgagatctcactgactacctcatgaagatcctgactgagcgtggctattccttcgttactactgctgagcgtgagattgtccgggacatcaaggagaaactgtgttatgtagctctggactttgaaaatgagatggccactgccgcatcctcatcctcccttgagaagagttacgagttgcctgatgggcaagtgatcaccatcggaaatgaacgtttccgctgcccagagaccctgttccagccatccttcatcgggatggagtctgctggcatccatgaaaccacctacaacagcatcatgaagtgtgatattgacatcaggaaggacctctatgctaacaatgtcctatcagggggcaccactatgtaccctggcattgccgaccgaatgcagaaggagatcacggccctagcacccagcaccatgaagatcaagatcattgcccctccggagcgcaaatactctgtctggatcggtggctccatcctggcctctctgtccaccttccagcagatgtggatcagcaaacaggaatacgatgaagccgggccttccattgtccaccgcaaatgcttctaaaacactttcctgctcctctctgtctctagcacacaactgtgaatgtcctgtggaattatgccttcagttcttttccaaatcattcctagccaaagctctgactcgttacctatgtgttttttaataaatctgaaataggctactggtaaaaaaagaatatataataaaaaagttttgcccatagtgagccgattacattgtcgacggcgccgcaatttagtagtagagtagtaatcacccggaatcccgacggtacctgaagcgtacaagttcccttagtggtcgtttagactggg

SEQ ID NO: 423300 - DNA, 1029 bp, Homo sapiens
cttcacaggattcctaggaatcctgtctctctatgcctctggacgcacaactggcatcgtgctggactctggagatggtgtcacccacaatgtccccatctatgagggctatgccttgccccatgccatcatgcgtctggatctggctggccgagatctcactgactacctcatgaagatcctgactgagcgtggctattccttcgttactactgctgagcgtgagattgtccgggacatcaaggagaaactgtgttatgtagctctggactttgaaaatgagatggccactgccgcatcctcatcctcccttgagaagagttacgagttgcctgatgggcaagtgatcaccatcggaaatgaacgtttccgctgcccagagaccctgttccagccatccttcatcgggatggagtctgctggcatccatgaaaccacctacaacagcatcatgaagtgtgatattgacatcaggaaggacctctatgctaacaatgtcctatcagggggcaccactatgtaccctggcattgccgaccgaatgcagaaggagatcacggccctagcacccagcaccatgaagatcaagatcattgcccctccggagcgcaaatactctgtctggatcggtggctccatcctggcctctctgtccaccttccagcagatgtggatcagcaaacaggaatacgatgaagccgggccttccattgtccaccgcaaatgcttctaaaacactttcctgctcctctctgtctctagcacacaactgtgaatgtcctgtggaattatgccttcagttcttttccaaatcattcctagccaaagctctgactcgttacctatgtgttttttaataaatctgaaataggctactggtaaaaaaagaatatataataaaaaagttttgcccatagtgagccgattacattgtcgacggcgccgcaatttagtagtagagtagtaatcacccggaatcccgacggtacctgaagcgtacaagttcccttagtggtcgtttagactggg

SEQ ID NO: 423301 - DNA, 1004 bp, Homo sapiens
  misc_feature (4)..(4): n is a, c, g, or t
  misc_feature (11)..(11): n is a, c, g, or t
gctntctatgnctctggacgcacaactggcatcgtgctggactctggagatggtgtcacccacaatgtccccatctatgagggctatgccttgccccatgccatcatgcgtctggatctggctggccgagatctcactgactacctcatgaagatcctgactgagcgtggctattccttcgttactactgctgagcgtgagattgtccgggacatcaaggagaaactgtgttatgtagctctggactttgaaaatgagatggccactgccgcatcctcatcctcccttgagaagagttacgagttgcctgatgggcaagtgatcaccatcggaaatgaacgtttccgctgcccagagaccctgttccagccatccttcatcgggatggagtctgctggcatccatgaaaccacctacaacagcatcatgaagtgtgatattgacatcaggaaggacctctatgctaacaatgtcctatcagggggcaccactatgtaccctggcattgccgaccgaatgcagaaggagatcacggccctagcacccagcaccatgaagatcaagatcattgcccctccggagcgcaaatactctgtctggatcggtggctccatcctggcctctctgtccaccttccagcagatgtggatcagcaaacaggaatacgatgaagccgggccttccattgtccaccgcaaatgcttctaaaacactttcctgctcctctctgtctctagcacacaactgtgaatgtcctgtggaattatgccttcagttcttttccaaatcattcctagccaaagctctgactcgttacctatgtgttttttaataaatctgaaataggctactggtaaaaaaagaatatataataaaaaagttttgcccatagtgagccgattacattgtcgacggcgccgcaatttagtagtagagtagtaatcacccggaatcccgacggtacctgaagcgtacaagttcccttagtggtcgtttagactggg

SEQ ID NO: 423302 - DNA, 1200 bp, Homo sapiens
accacccagtgtggagcagcccagccaagcactgtcaggaatcctgtgaagcagctccagctatgtgtgaagaagaggacagcactgccttggtgtgtgacaatggctctgggctctgtaaggccggctttgctggggacgatgctcccagggctgttttcccatccattgtgggacgtcccagacatcagggggtgatggtgggaatgggacaaaaagacagctacgtgggtgacgaagcacagagcaaaagaggaatcctgaccctgaagatgagggctatgccttgccccatgccatcatgcgtctggatctggctggccgagatctcactgactacctcatgaagatcctgactgagcgtggctattccttcgttactactgctgagcgtgagattgtccgggacatcaaggagaaactgtgttatgtagctctggactttgaaaatgagatggccactgccgcatcctcatcctcccttgagaagagttacgagttgcctgatgggcaagtgatcaccatcggaaatgaacgtttccgctgcccagagaccctgttccagccatccttcatcgggatggagtctgctggcatccatgaaaccacctacaacagcatcatgaagtgtgatattgacatcaggaaggacctctatgctaacaatgtcctatcagggggcaccactatgtaccctggcattgccgaccgaatgcagaaggagatcacggccctagcacccagcaccatgaagatcaagatcattgcccctccggagcgcaaatactctgtctggatcggtggctccatcctggcctctctgtccaccttccagcagatgtggatcagcaaacaggaatacgatgaagccgggccttccattgtccaccgcaaatgcttctaaaacactttcctgctcctctctgtctctagcacacaactgtgaatgtcctgtggaattatgccttcagttcttttccaaatcattcctagccaaagctctgactcgttacctatgtgttttttaataaatctgaaataggctactggtaaaaaaagaatatataataaaaaagttttgcccatagtgagccgattacattgtcgacggcgccgcaatttagtagtagagtagtaatcacccggaatcccgacggtacctgaagcgtacaagttcccttagtggtcgtttagactggg

SEQ ID NO: 423303 - DNA, 872 bp, Homo sapiens
ggtcggtacccagatcttctcccatcaggactgagcgtggtattccttcgttactacgctgagcgtgagattgtccgggacatcaaggagaaactgtgttatgtagctctggactttgaaaatgagatggccactgccgcatcctcatcctcccttgagaagagttacgagttgcctgatgggcaagtgatcaccatcggaaatgaacgtttccgctgcccagagaccctgttccagccatccttcatcgggatggagtctgctggcatccatgaaaccacctacaacagcatcatgaagtgtgatattgacatcaggaaggacctctatgctaacaatgtcctatcagggggcaccactatgtaccctggcattgccgaccgaatgcagaaggagatcacggccctagcacccagcaccatgaagatcaagatcattgcccctccggagcgcaaatactctgtctggatcggtggctccatcctggcctctctgtccaccttccagcagatgtggatcagcaaacaggaatacgatgaagccgggccttccattgtccaccgcaaatgcttctaaaacactttcctgctcctctctgtctctagcacacaactgtgaatgtcctgtggaattatgccttcagttcttttccaaatcattcctagccaaagctctgactcgttacctatgtgttttttaataaatctgaaataggctactggtaaaaaaagaatatataataaaaaagttttgcccatagtgagccgattacattgtcgacggcgccgcaatttagtagtagagtagtaatcacccggaatcccgacggtacctgaagcgtacaagttcccttagtggtcgtttagactggg

SEQ ID NO: 423304 - DNA, 1581 bp, Homo sapiens
accacccagtgtggagcagcccagccaagcactgtcaggaatcctgtgaagcagctccagctatgtgtgaagaagaggacagcactgccttggtgtgtgacaatggctctgggctctgtaaggccggctttgctggggacgatgctcccagggctgttttcccatccattgtgggacgtcccagacatcagggggtgatggtgggaatgggacaaaaagacagctacgtgggtgacgaagcacagagcaaaagaggaatcctgaccctgaagtacccgatagaacatggcatcatcaccaactgggacgacatggaaaagatctggcaccactctttctacaatgagcttcgtgttgcccctgaagagcatcccaccctgctcacggaggcacccctgaaccccaaggccaaccgggagaaaatgactcaaattatgtttgagactttcaatgtcccagccatgtatgtggctatccaggcggtgctgtctctctatgcctctggacgcacaactggcatcgtgctggactctggagatggtgtcacccacaatgtccccatctatgagggctatgccttgccccatgccatcatgcgtctggatctggctggccgagatctcactgactacctcatgaagatcctgactgagcgtggctattccttcgttactactgctgagcgtgagattgtccgggacatcaaggagaaactgtgttatgtagctctggactttgaaaatgagatggccactgccgcatcctcatcctcccttgagaagagttacgagttgcctgatgggcaagtgatcaccatcggaaatgaacgtttccgctgcccagagaccctgttccagccatccttcatcggatggagtctgctggcatccatgaaaccacctacaacagcatcatgaaggatggctgcccagagaccctgttccagccatccttcatcgggatggagtctgctggcatccatgaaaccacctacaacagcatcatgaagtgtgatattgacatcaggaaggacctctatgctaacaatgtcctatcagggggcaccactatgtaccctggcattgccgaccgaatgcagaaggagatcacggccctagcacccagcaccatgaagatcaagatcattgcccctccggagcgcaaatactctgtctggatcggtggctccatcctggcctctctgtccaccttccagcagatgtggatcagcaaacaggaatacgatgaagccgggccttccattgtccaccgcaaatgcttctaaaacactttcctgctcctctctgtctctagcacacaactgtgaatgtcctgtggaattatgccttcagttcttttccaaatcattcctagccaaagctctgactcgttacctatgtgttttttaataaatctgaaataggctactggtaaaaaaagaatatataataaaaaagttttgcccatagtgagccgattacattgtcgacggcgccgcaatttagtagtagagtagtaatcacccggaatcccgacggtacctgaagcgtacaagttcccttagtggtcgtttagactggg

SEQ ID NO: 423305 - DNA, 1010 bp, Homo sapiens
  misc_feature (7)..(7): n is a, c, g, or t
  misc_feature (62)..(62): n is a, c, g, or t
  misc_feature (105)..(105): n is a, c, g, or t
  misc_feature (128)..(128): n is a, c, g, or t
  misc_feature (136)..(136): n is a, c, g, or t
  misc_feature (153)..(153): n is a, c, g, or t
  misc_feature (173)..(173): n is a, c, g, or t
  misc_feature (177)..(177): n is a, c, g, or t
  misc_feature (188)..(188): n is a, c, g, or t
  misc_feature (194)..(194): n is a, c, g, or t
  misc_feature (199)..(199): n is a, c, g, or t
  misc_feature (202)..(202): n is a, c, g, or t
  misc_feature (232)..(232): n is a, c, g, or t
tcacccnaacaaatgtcccccaatcttatggagggcttatgcctttgccccccaatgcccantcaatgcagtcttgggatcgtggcttgggccggaggatcgtcnacttgacttacactcaatcgaangatctctngacatggagctgtggcntaattcacttctgttaactnactngcttgaagcgntgaagnattgntcncgggcacaatcaacagggagaagaacctgntgtgttatgtagctctggactttgaaaatgagatggccactgccgcatcctcatcctcccttgagaagagttacgagttgcctgatgggcaagtgatcaccatcggaaatgaacgtttccgctgcccagagaccctgttccagccatccttcatcgggatggagtctgctggcatccatgaaaccacctacaacagcatcatgaagtgtgatattgacatcaggaaggacctctatgctaacaatgtcctatcagggggcaccactatgtaccctggcattgccgaccgaatgcagaaggagatcacggccctagcacccagcaccatgaagatcaagatcattgcccctccggagcgcaaatactctgtctggatcggtggctccatcctggcctctctgtccaccttccagcagatgtggatcagcaaacaggaatacgatgaagccgggccttccattgtccaccgcaaatgcttctaaaacactttcctgctcctctctgtctctagcacacaactgtgaatgtcctgtggaattatgccttcagttcttttccaaatcattcctagccaaagctctgactcgttacctatgtgttttttaataaatctgaaataggctactggtaaaaaaagaatatataataaaaaagttttgcccatagtgagccgattacattgtcgacggcgccgcaatttagtagtagagtagtaatcacccggaatcccgacggtacctgaagcgtacaagttcccttagtggtcgtttagactggg

SEQ ID NO: 423306 - DNA, 1157 bp, Homo sapiens
accacccagtgtggagcagcccagccaagcactgtcaggaatcctgtgaagcagctccagctatgtgtgaagaagaggacagcactgccttggtgtgtgacaatggctctgggctctgtaaggccggctttgctggggacgatgctcccagggctgttttcccatccattgtgggacgtcccagacatcagggggtgatggtgggaatgggacaaaaagacagctacgtgggtgacgaagcacagagcaaaagaggaatcctgaccctgaagtacccgatagaacatggcatcatcaccaactgggacgacatggaaaagatctggcaccactctttctacaatgagcttcgtgttgcccctgaagagcatcccaccctgctcacggaggcacccctgaaccccaaggccaaccgggagaaaatgactcaaattatgtttgagactttcaatgtcccagccatgtatgtggctatccaggcggtgctgtctctctatgcctctggacgcacaactggcatcgtgctggactctggagatggtgtcacccacaatgtccccatctatgagggctatgccttgccccatgccatcatgcgtctggatctggctggccgagatctcactgactacctcatgaagatcctgactgagcgtggctattccttcgttactactgctgagcgtgagattgtccgggacatcaaggagaaactgtgttatgtagctctggactttgaaaatgagatggccactgccgcatcctcatcctcccttgagaagagttacgagttgcctgatgggcaagtgatcaccatcggaaatgaacgtttccgctgcccagagaccctgttccagccatccttcatcgggatggagtctgctggcatccatgaaaccacctacaacagcatcatgaagtgtgatattgacatcaggaaggacctctatgctaacaatgtcctatcagggggcaccactatgtaccctggcattgccgaccgaatgcagaaggagatcacggccctagcacccagcaccatgaagatcaagatcattgcccctccggagcgcaaatactctgtctggatcggtggctccatcctaccgtgaagtacccgataaacatgcacgcgacatcgccagggatcctctaga

SEQ ID NO: 423307 - DNA, 1120 bp, Homo sapiens
accacccagtgtggagcagcccagccaagcactgtcaggaatcctgtgaagcagctccagctatgtgtgaagaagaggacagcactgccttggtgtgtgacaatggctctgggctctgtaaggccggctttgctggggacgatgctcccagggctgttttcccatccattgtgggacgtcccagacatcagggggtgatggtgggaatgggacaaaaagacagctacgtgggtgacgaagcacagagcaaaagaggaatcctgaccctgaagtacccgatagaacatggcatcatcaccaactgggacgacatggaaaagatctggcaccactctttctacaatgagcttcgtgttgcccctgaagagcatcccaccctgctcacggaggcacccctgaaccccaaggccaaccgggagaaaatgactcaaattatgtttgagactttcaatgtcccagccatgtatgtggctatccaggcggtgctgtctctctatgcctctggacgcacaactggcatcgtgctggactctggagatggtgtcacccacaatgtccccatctatgagggctatgccttgccccatgccatcatgcgtctggatctggctggccgagatctcactgactacctcatgaagatcctgactgagcgtggctattccttcgttactactgctgagcgtgagattgtccgggacatcaaggagaaactgtgttatgtagctctggactttgaaaatgagatggccactgccgcatcctcatcctcccttgagaagagttacgagttgcctgatgggcaagtgatcaccatcggaaatgaacgtttccgctgcccagagaccctgttccagccatccttcatcgggatggagtctgctggcatccatgaaaccacctacaacagcatcatgaagtgtgatattgacatcaggaaggacctctatgctaacaatgtcctatcagggggcaccactatgtaccctggcattgccgaccgaatgcagaaggagatcacggccctagcacccagcaccatgaagatcaagccaggtcacaatgacaacaaagaagctgctaaaaatctagcagcatgccttaggctgagatgccataa

SEQ ID NO: 423308 - DNA, 1257 bp, Homo sapiens
accacccagtgtggagcagcccagccaagcactgtcaggaatcctgtgaagcagctccagctatgtgtgaagaagaggacagcactgccttggtgtgtgacaatggctctgggctctgtaaggccggctttgctggggacgatgctcccagggctgttttcccatccattgtgggacgtcccagacatcagggggtgatggtgggaatgggacaaaaagacagctacgtgggtgacgaagcacagagcaaaagaggaatcctgaccctgaagtacccgatagaacatggcatcatcaccaactgggacgacatggaaaagatctggcaccactctttctacaatgagcttcgtgttgcccctgaagagcatcccaccctgctcacggaggcacccctgaaccccaaggccaaccgggagaaaatgactcaaattatgtttgagactttcaatgtcccagccatgtatgtggctatccaggcggtgctgtctctctatgcctctggacgcacaactggcatcgtgctggactctggagatggtgtcacccacaatgtccccatctatgagggctatgccttgccccatgccatcatgcgtctggatctggctggccgagatctcactgactacctcatgaagatcctgactgagcgtggctattccttcgttactactgctgagcgtgagattgtccgggacatcaaggagaaactgtgttatgtagctctggactttgaaaatgagatggccactgccgcatcctcatcctcccttgagaagagttacgagttgcctgatgggcaagtgatcaccatcggaaatgaacgtttccgctgcccagagaccctgttccagccatccttcatcgggcctctctgtccaccttccagcagatgtggatcagcaaacaggaatacgatgaagccgggccttccattgtccaccgcaaatgcttctaaaacactttcctgctcctctctgtctctagcacacaactgtgaatgtcctgtggaattatgccttcagttcttttccaaatcattcctagccaaagctctgactcgttacctatgtgttttttaataaatctgaaataggctactggtaaaaaaagaatatataataaaaaagttttgcccatagtgagccgattacattgtcgacggcgccgcaatttagtagtagagtagtaatcacccggaatcccgacggtacctgaagcgtacaagttcccttagtggtcgtttagactggg

SEQ ID NO: 423309 - DNA, 817 bp, Homo sapiens
tttttttttttaccagtagcctatttcagatttattaaaaaacacataggtaacgagtcagagctttggctaggaatgatttggaaaagaactgaaggcataattccacaggacattcacagttgtgtgctagagactgagaggagcaggaaagtcttttagaagcatttgcggtggacaatggaaggcccggctggatggagtctgctggcatccatgaaaccacctacaacagcatcatgaagtgtgatattgacatcaggaaggacctctatgctaacaatgtcctatcagggggcaccactatgtaccctggcattgccgaccgaatgcagaaggagatcacggccctagcacccagcaccatgaagatcaagatcattgcccctccggagcgcaaatactctgtctggatcggtggctccatcctggcctctctgtccaccttccagcagatgtggatcagcaaacaggaatacgatgaagccgggccttccattgtccaccgcaaatgcttctaaaacactttcctgctcctctctgtctctagcacacaactgtgaatgtcctgtggaattatgccttcagttcttttccaaatcattcctagccaaagctctgactcgttacctatgtgttttttaataaatctgaaataggctactggtaaaaaaagaatatataataaaaaagttttgcccatagtgagccgattacattgtcgacggcgccgcaatttagtagtagagtagtaatcacccggaatcccgacggtacctgaagcgtacaagttcccttagtggtcgtttagactggg

SEQ ID NO: 423310 - DNA, 880 bp, Homo sapiens
accacccagtgtggagcagcccagccaagcactgtcaggaatcctgtgaagcagctccagctatgtgtgaagaagaggacagcactgccttggtgtgtgacaatggctctgggctctgtaaggccggctttgctggggacgatgctcccagggctgttttcccatccattgtgggacgtcccagacatcagggggtgatggtgggaatgggacaaaaagacagctacgtgggtgacgaagcacagagcaaaagaggaatcctgaccctgaagtacccgatagaacatggcatcatcaccaactgggacgacatggaaaagatcaggaaggacctctatgctaacaatgtcctatcagggggcaccactatgtaccctggcattgccgaccgaatgcagaaggagatcacggccctagcacccagcaccatgaagatcaagatcattgcccctccggagcgcaaatactctgtctggatcggtggctccatcctggcctctctgtccaccttccagcagatgtggatcagcaaacaggaatacgatgaagccgggccttccattgtccaccgcaaatgcttctaaaacactttcctgctcctctctgtctctagcacacaactgtgaatgtcctgtggaattatgccttcagttcttttccaaatcattcctagccaaagctctgactcgttacctatgtgttttttaataaatctgaaataggctactggtaaaaaaagaatatataataaaaaagttttgcccatagtgagccgattacattgtcgacggcgccgcaatttagtagtagagtagtaatcacccggaatcccgacggtacctgaagcgtacaagttcccttagtggtcgtttagactggg

SEQ ID NO: 423311 - DNA, 681 bp, Homo sapiens
acttcaggatgctgttttaggtggtttcctggatcctagcagactccatccgtatgaggatggctggatacagggtatctgggcagcggaaacgttcatttccgatggtgatcacttgcccatcaggaaggacctctatgctaacaatgtcctatcagggggcaccactatgtaccctggcattgccgaccgaatgcagaaggagatcacggccctagcacccagcaccatgaagatcaagatcattgcccctccggagcgcaaatactctgtctggatcggtggctccatcctggcctctctgtccaccttccagcagatgtggatcagcaaacaggaatacgatgaagccgggccttccattgtccaccgcaaatgcttctaaaacactttcctgctcctctctgtctctagcacacaactgtgaatgtcctgtggaattatgccttcagttcttttccaaatcattcctagccaaagctctgactcgttacctatgtgttttttaataaatctgaaataggctactggtaaaaaaagaatatataataaaaaagttttgcccatagtgagccgattacattgtcgacggcgccgcaatttagtagtagagtagtaatcacccggaatcccgacggtacctgaagcgtacaagttcccttagtggtcgtttagactggg

SEQ ID NO: 423312 - DNA, 2588 bp, Homo sapiens
attcggcacaggattctttcagaaaagcaaagttttcttcgggctttaaacacgcagcctctggtaaaggtgctattggtacaaaagttcaacaagcatagctccaagctttgacaattttcttacactttactaatactgctgtccaaaaactatgagattttcaaagcagccaacattgcagtggtgcaatggttaataacaagagagagaagagtgtggcctgaggttgtataaatgttttctcaatcttgaatcattaattttctccaaggaagtttctaaagaatcccaaatagtgcacactatttctgaaaggaacaggatttttttttctaatcataaaatggacccagacatctcagcctcttggtgtaatctggatatcagatgcaatcagcgaacagcctgagttttggaattagatctgagttcaatcccatatctcccatttactagctgtgtgatcttggctgaattactgaagctctctgaacctcatttcgccatctgtaaaatggggatgtggttatcttccccactacatggctctcgtgagaatccgcggagatcacatttgtaaacacttctctcgctatgcctggcactttgttggggcccaataaaataaaaatccatggactctcagaggctccggtactcaaatgagcctcctggatccacgtctctttgattagccatctgcaagctggcatttctgagcgagggacttttcaaaacaggctgctcaagtttcttggccaataataggcgccgggttctgtgcggtgggaacgagtaccaccaaccccagcaggagaccaagcagaaatcaccatgggagtgcaagctaagaaagggcaaaagaagaaagagaagggcagaaaaacaaaacaaaatgaaaccactcaggcagcgacttacagtcttaaagagagaattcccggaagggagacaaggcagtttctttttctgtgtgacaataaaaaacggtaaacaagcctccagaagctcattcagcccccatataactttttcgagaaagaaaaggtgccgttcttccgagccctccggcttaaccactgcttcggtgctgacttatttcctacgtctgagaactgccagaaaatgagcaatatctgttctgaaggctgcaggctctctccccgcccccgcggggcggcgcgcactcacccacccgcgccggagcggacctttggcttggcttgtcagggcttgtccaggagttccgctcctctctccaaccggggtccccctccagcgaccctaaagcttcccagacttccgcttcaattcctgtccgccccccacgcccacctcaacgtggagcgcagtggtctccgaggagcgccggagctgccccgcctgcccagcggggtcagcacttcgcatcaaggcccaagaaaagcaagtcctccagcgttctgagcacccgggcctgagggaaggtcctaacagcccccgggagccagtctccaacgcctcccgcagcagcccgccgctcccaggtgcccgcgtgcgccgctgccgccgcaatcccgcacgcgtcccgcgcccgccccactttgcctatccccgggactaagacgggaatcctgtgaagcagctccagctatgtgtgaagaagaggacagcactgccttggtgtgtgacaatggctctgggctctgtaaggccggctttgctggggacgatgctcccagggctgttttcccatccattgtgggacgtcccagacatcagggggtgatggtgggaatgggacaaaaagacagctacgtgggtgacgaagcacagagcaaaagaggaatcctgaccctgaagtacccgatagaacatggcatcatcaccaactgggacgacatggaaaagatctggcaccactctttctacaatgagcttcgtgttgcccctgaagagcatcccaccctgctcacggaggcacccctgaaccccaaggccaaccgggagaaaatgactcaaattatgtttgagactttcaatgtcccagccatgtatgtggctatccaggcggtgctgtctctctatgcctctggacgcacaactggcatcgtgctggactctggagatggtgtcacccacaatgtccccatctatgagggctatgccttgccccatgccatcatgcgtctggatgtctggatcggtggctccatcctggcctctctgtccaccttccagcagatgtggatcagcaaacaggaatacgatgaagccgggccttccattgtccaccgcaaatgcttctaaaacactttcctgctcctctctgtctctagcacacaactgtgaatgtcctgtggaattatgccttcagttcttttccaaatcattcctagccaaagctctgactcgttacctatgtgttttttaataaatctgaaataggctactggtaaaaaaagaatatataataaaaaagttttgcccatagtgagccgattacattgtcgacggcgccgcaatttagtagtagagtagtaatcacccggaatcccgacggtacctgaagcgtacaagttcccttagtggtcgtttagactggg

SEQ ID NO: 423313 - DNA, 1235 bp, Homo sapiens
ttttaaatgcagctgactaatttaggcaaatgtcttaacagttgattggtatgaacttatccattagaaatcaagcctcaagtggttatttgtagatgcaatgcttttgcttataatagttagaaaataatgctcatattcttttgggtaggtgatgactttaaaagtacagtttaaaggatttataagacacaaaatgccatttaacaaatatgtaaaattgtatacattctttcaacaaataattattgagtgccacatatgtgccatgcaatttgctatagtgatggacaagacagacatgatctctgccctaaaaaagctcatcaaggaacataggagataaaaatacaaagtaaagttgactttcccccaacatctcctgttatttggaggcaattcaggtctttttccaatcaactgcagaattttgcttaagagcatagtggcaatgagactcaatatgtttattgttgctgataatcagaagaggaacttcccatctcaatgacttaaccttttgtggcttggctgtaattgattcacaagttttgggagatgctgactcataatgtgttgaacctttttagggggtgatggtgggaatgggacaaaaagacagctacgtgggtgacgaagcacagagcaaaagaggaatcctgaccctgaagtacccgatagaacatggcatcatcaccaactgggacgacatggaaaagcactatgtaccctggcattgccgaccgaatgcagaaggagatcacggccctagcacccagcaccatgaagatcaagatcattgcccctccggagcgcaaatactctgtctggatcggtggctccatcctggcctctctgtccaccttccagcagatgtggatcagcaaacaggaatacgatgaagccgggccttccattgtccaccgcaaatgcttctaaaacactttcctgctcctctctgtctctagcacacaactgtgaatgtcctgtggaattatgccttcagttcttttccaaatcattcctagccaaagctctgactcgttacctatgtgttttttaataaatctgaaataggctactggtaaaaaaagaatatataataaaaaagttttgcccatagtgagccgattacattgtcgacggcgccgcaatttagtagtagagtagtaatcacccggaatcccgacggtacctgaagcgtacaagttcccttagtggtcgtttagactggg

SEQ ID NO: 423314 - DNA, 1017 bp, Homo sapiens
  misc_feature (1)..(1): n is a, c, g, or t
  misc_feature (11)..(11): n is a, c, g, or t
  misc_feature (16)..(16): n is a, c, g, or t
nttcatgcggnactgnctctcttaatctaccaccgctacacaatcctgtgaagcagctccagctatgtgtgaagaagaggacagcactgccttggtgtgtgacaatggctctgggctctgtaaggccggctttgctggggacgatgctcccagggctgttttcccatccattgtgggacgtcccagacatcagggggtgatggtgggaatgggacaaaaagacagctacgtgggtgacgaagcacagagcaaaagaggaatcctgaccctgaagtacccgatagaacatggcatcatcaccaactgggacgacatggaaaagatctggcaccactctttctacaatgagcttcgtgttgcccctgaagagcatcccaccctgctcacggaggcacccctgaaccccaaggccaaccgggagaaaatgactcaaattatgtttgagactttcaatgtcccagccatgtatgtggctatccaggcggtgctgtctctctatgcctctggacgcacaactggcatcgtgctggactctggagatggtgtcacccacaatgtccccatctatgagggctatgccttgccccatgccatcatgcgtctggatgtctggatcggtggctccatcctggcctctctgtccaccttccagcagatgtggatcagcaaacaggaatacgatgaagccgggccttccattgtccaccgcaaatgcttctaaaacactttcctgctcctctctgtctctagcacacaactgtgaatgtcctgtggaattatgccttcagttcttttccaaatcattcctagccaaagctctgactcgttacctatgtgttttttaataaatctgaaataggctactggtaaaaaaagaatatataataaaaaagttttgcccatagtgagccgattacattgtcgacggcgccgcaatttagtagtagagtagtaatcacccggaatcccgacggtacctgaagcgtacaagttcccttagtggtcgtttagactggg

SEQ ID NO: 423315 - DNA, 1586 bp, Homo sapiens
aagagctcacttatcaccaaggagatgtcctaagccattcatgagagatccacccacgtgatccaaacacctcctaccaggccccacctccaacacgggggattacatctcaacatgagatttggaggagatatccaaactatactaaattctttacaacttttctgaaaatctaaaattgttccaaaataaaaaggttatttttaaaaccaaaccaaaacataaaaccacctgggagaacccaggtttgaatatcagatctgacactgatataaccggtgttacctgggccagttacttaaactttctcagcctctgtttcctcatatgtaatatgggagtaatttaagacttattcttcaagatgtttatgagaatcaaatgagataatacatgtaaaatgcttagcatagtgcctggcatataattacatgctcagtaaatatcagtactttgtattaagaagtaaatgctcagaagataaagattaaactggttagccagttttcactgttctctgtgcctaaaccattcatttatttaagaaacatgagcatgccttgcaggttaggcctgtgcactgggaaaggccaaccagtgcagcttaagaggcacctattgcaagggaatgtccccagcaggggaccctgagttccccaatgttaaacagagcatctgggtgaaaagtggtagttcacttcaccacgtggaaacacatttgtatactaagtcctagcacaattaaaacttctcctttgaataggctagggtttgtttctacagaaagtgtatcgtgttgaattctgaggcagagttcatggaaatcagaggcattgccagggttcttaagtgggggccatggctggatttggagccaactttcagtttgctcaataatgtggtcgaagagttacaggtgagaaaaacgaatgtgcttactgaagaatttctaaatccatggctccctctggcggtcctgccaagaacatgacacaattaggacacaattggcatctaacagacaagcctgtgtccctgctgaacaagaaactaggccatggtagaacatccaggctctgtcctaccgcactaacgactgcactaatgatgacattaatgaccattctttttcatcttgactgacagatcattgcccctccggagcgcaaatactctgtctggatcggtggctccatcctggcctctctgtccaccttccagcagatgtggatcagcaaacaggaatacgatgaagccgggccttccattgtccaccgcaaatgcttctaaaacactttcctgctcctctctgtctctagcacacaactgtgaatgtcctgtggaattatgccttcagttcttttccaaatcattcctagccaaagctctgactcgttacctatgtgttttttaataaatctgaaataggctactggtaaaaaaagaatatataataaaaaagttttgcccatagtgagccgattacattgtcgacggcgccgcaatttagtagtagagtagtaatcacccggaatcccgacggtacctgaagcgtacaagttcccttagtggtcgtttagactggg

SEQ ID NO: 423316 - DNA, 2410 bp, Homo sapiens
attcggcacaggattctttcagaaaagcaaagttttcttcgggctttaaacacgcagcctctggtaaaggtgctattggtacaaaagttcaacaagcatagctccaagctttgacaattttcttacactttactaatactgctgtccaaaaactatgagattttcaaagcagccaacattgcagtggtgcaatggttaataacaagagagagaagagtgtggcctgaggttgtataaatgttttctcaatcttgaatcattaattttctccaaggaagtttctaaagaatcccaaatagtgcacactatttctgaaaggaacaggatttttttttctaatcataaaatggacccagacatctcagcctcttggtgtaatctggatatcagatgcaatcagcgaacagcctgagttttggaattagatctgagttcaatcccatatctcccatttactagctgtgtgatcttggctgaattactgaagctctctgaacctcatttcgccatctgtaaaatggggatgtggttatcttccccactacatggctctcgtgagaatccgcggagatcacatttgtaaacacttctctcgctatgcctggcactttgttggggcccaataaaataaaaatccatggactctcagaggctccggtactcaaatgagcctcctggatccacgtctctttgattagccatctgcaagctggcatttctgagcgagggacttttcaaaacaggctgctcaagtttcttggccaataataggcgccgggttctgtgcggtgggaacgagtaccaccaaccccagcaggagaccaagcagaaatcaccatgggagtgcaagctaagaaagggcaaaagaagaaagagaagggcagaaaaacaaaacaaaatgaaaccactcaggcagcgacttacagtcttaaagagagaattcccggaagggagacaaggcagtttctttttctgtgtgacaataaaaaacggtaaacaagcctccagaagctcattcagcccccatataactttttcgagaaagaaaaggtgccgttcttccgagccctccggcttaaccactgcttcggtgctgacttatttcctacgtctgagaactgccagaaaatgagcaatatctgttctgaaggctgcaggctctctccccgcccccgcggggcggcgcgcactcacccacccgcgccggagcggacctttggcttggcttgtcagggcttgtccaggagttccgctcctctctccaaccggggtccccctccagcgaccctaaagcttcccagacttccgcttcaattcctgtccgccccccacgcccacctcaacgtggagcgcagtggtctccgaggagcgccggagctgccccgcctgcccagcggggtcagcacttcgcatcaaggcccaagaaaagcaagtcctccagcgttctgagcacccgggcctgagggaaggtcctaacagcccccgggagccagtctccaacgcctcccgcagcagcccgccgctcccaggtgcccgcgtgcgccgctgccgccgcaatcccgcacgcgtcccgcgcccgccccactttgcctatccccgggactaagacgggaatcctgtgaagcagctccagctatgtgtgaagaagaggacagcactgccttggtgtgtgacaatggctctgggctctgtaaggccggctttgctggggacgatgctcccagggctgttttcccatccattgtgggacgtcccagacatcaggtgaggaaaattatgattggaacataacaggacacagattaggttcctctgtgttcatgtttatccccagattgtctatctctttctgcccagaagttatgtaaccttgttacaaatagacctctaatgattaaggtccaggagtaaatgccaatttcacatataatgtagacagattatctgatgggcatctatcagatacaaagtctgcccctttttcatgtcctttttgtctaaatatagtcattatcatcatcatcatcatcatcaaatcatttcatcaccatcagaaatgcttatacattatcctgatgtataccaaagctactgtttggaaagaaactaaaataaaagtccaggtcacttaaccatacagggctgatgttagatgaaagcaagcatcgataccaaatgcaattttacataatattagctgtcaacaaaatatatttggacagccgcatggtaattttacacattatgtgtaaacaaagtattggtggcatcacatggtaaaaactcagtaatttcacctcagaaattcttcttcacatcagaaatgtagtttgtgcattgaggctatctgattgatgtttatgcctctctgcttgggatatattcatgagaataaataatagaaacctct

SEQ ID NO: 423317 - DNA, 773 bp, Homo sapiens
atcgggatggagtctgctggcatccatgaaaccacctacaacagcatcatgaagtgtgatattgacatcaggaaggacctctatgctaacaatgtcctatcagggggcaccactatgtaccctggctggccgagatctcactgactacctcatgaagatcctgactgagcgtggctattccttcgttactactgctgagcgtgagattgtccgggacatcaaggagaaactgtgttatgtagctctggactttgaaaatgagatggccactgccgcatcctcatcctcccttgagaagagttacgagttgcctgatgggcaagtgatcaccatcggaaatgaacgtttccgctgcccagagaccctgttccagccatccttcatcgggcctctctgtccaccttccagcagatgtggatcagcaaacaggaatacgatgaagccgggccttccattgtccaccgcaaatgcttctaaaacactttcctgctcctctctgtctctagcacacaactgtgaatgtcctgtggaattatgccttcagttcttttccaaatcattcctagccaaagctctgactcgttacctatgtgttttttaataaatctgaaataggctactggtaaaaaaagaatatataataaaaaagttttgcccatagtgagccgattacattgtcgacggcgccgcaatttagtagtagagtagtaatcacccggaatcccgacggtacctgaagcgtacaagttcccttagtggtcgtttagactggg

SEQ ID NO: 423318 - DNA, 550 bp, Homo sapiens
cagtgtgttgctcagtaacttccaggaccatcctcactatccaaggagatgatgggatgaagttttgcaaatggcaaggcctggctctaatgcacagagcaaagcacatctttctttgctgtgtgaagttgcaaaatgattacactatttccttgaggagaacagttatagacacccagtgttatgcattagtcagtgttgtataattgatctttttttaatccccttccattgtccaccgcaaatgcttctaaaacactttcctgctcctctctgtctctagcacacaactgtgaatgtcctgtggaattatgccttcagttcttttccaaatcattcctagccaaagctctgactcgttacctatgtgttttttaataaatctgaaataggctactggtaaaaaaagaatatataataaaaaagttttgcccatagtgagccgattacattgtcgacggcgccgcaatttagtagtagagtagtaatcacccggaatcccgacggtacctgaagcgtacaagttcccttagtggtcgtttagactggg

SEQ ID NO: 423319 - DNA, 434 bp, Homo sapiens
  misc_feature (3)..(3): n is a, c, g, or t
  misc_feature (15)..(16): n is a, c, g, or t
  misc_feature (115)..(115): n is a, c, g, or t
  misc_feature (117)..(122): n is a, c, g, or t
ctnaaacccagccannttatatctgtttaggtaagtaacaggagtgaggtggtgtatttacaagttggcttgtccagatatactataacttagtgtctgtatttaatattgacancnnnnnnatatatataattctaaaacactttcctgctcctctctgtctctagcacacaactgtgaatgtcctgtggaattatgccttcagttcttttccaaatcattcctagccaaagctctgactcgttacctatgtgttttttaataaatctgaaataggctactggtaaaaaaagaatatataataaaaaagttttgcccatagtgagccgattacattgtcgacggcgccgcaatttagtagtagagtagtaatcacccggaatcccgacggtacctgaagcgtacaagttcccttagtggtcgtttagactggg

SEQ ID NO: 423320 - DNA, 168 bp, Homo sapiens
gctatattagataagggtcagaggatagcactaggacacagaggagggcccccaaacccagccttggaggtgggagttgtcaggtaagtgccacaaatgcccaattacagctgaggctgcttcctccctgttttctatagaatcctgtgaagcagctccagctatgtg

SEQ ID NO: 423321 - DNA, 399 bp, Homo sapiens
aaacctgtccagagggcaagatgccccgagccccggggaaggatgaggacacacctgatgtccaggtgtatgggggtgggggcggggactcacacacctgggagacataactgactgtggaagggtcaccgatatcctgggagagagaggctggtgtcagagaacttgatcctttagggtctggccgccatccatctcacagcaccactccttctggccctggagatgaggtggctcggggcattgctggagaaaagtttgacatcgtcaagaaatggggcatcaacacctataaggtaggatttaagcacctctcccttccccaaaactccttatgggtacctttttcccttttcctcgtgatcgtaatatcccatctgtggctgagagtaggagcct

SEQ ID NO: 423322 - DNA, 2600 bp, Homo sapiens
  misc_feature (22)..(22): n is a, c, g, or t
ggtgccttttgtcaagtttgtncatgtagcaggctggtccggtccgggattcccgggtttccctgacctgctgctaggatcgcgacgggaactggagcccgaggtccccgcgcggcccgggcctggcgccctgaggggaagagcggcccggcccgagccatgacggacgggatcctagggaaggcagccacaatggagatccctatccacgggaacggcgaagccaggcagcttcctgaagatgatgggctggagcaggacctccagcaggtgatggtgtcaggacccaacctcaatgaaaccagcattgtgtctggtggctatgggggctctggtgatggactcatccccacagggtctggccgccatccatctcacagcaccactccttctggccctggagatgaggtggctcggggcattgctggagaaaagtttgacatcgtcaagaaatggggcatcaacacctataagtgcacaaagcaactgttatcagaacgatttggtcgaggctcacggactgtggacctggagctagagctgcagattgagttgctgcgtgagacgaagcgcaagtatgagagtgtcctgcagctgggccgggcactgacagcccacctctacagcctgctgcagacccagcatgcactgggtgatgcctttgctgacctcagccagaagtccccagagcttcaggaggaatttggctacaatgcagagacacagaaactactatgcaagaatggggaaacgctgctaggagccgtgaacttctttgtctctagcatcaacacattggtcaccaagaccatggaagacacgctcatgactgtgaaacagtatgaggctgccaggctggaatatgatgcctaccgaacagacttagaggagctgagtctaggcccccgggatgcagggacacgtggtcgacttgagagtgcccaggccactttccaggcccatcgggacaagtatgagaagctgcggggagatgtggccatcaagctcaagttcctggaagaaaacaagatcaaggtgatgcacaagcagctgctgctcttccacaatgctgtgtccgcctactttgctgggaaccagaaacagctggagcagaccctgcagcagttcaacatcaagctgcggcctccaggagctgagaaaccctcctggctagaggagcagtgagctgctcccagcccaacttggctatcaagaaagacattgggaagggcagccccagggtgtgggagattggacatggtacatcctttgtcacttgccctctggcttgggctcctttttctggctggggcctgacaccagttttgcccacattgctatggtgggaagagggcctggaggcccagaagttgctgccctgtctatcttcctggccacagggcttcattcccagatcttttccttccacttcacagccaacggctatgacaaaaccactccctggccaatggcatcactcttcaggctggggtgtgctccctgaccaatgacagagcctgaaaatgccctgtcagccaatggcagctcttctcggactcccctgggccaatgatgttgcgtctaataccctttgtctctcctctatgcgtgcccattgcagagaaggggactgggaccaaaggggtggggataatggggagccccattgctggccttgcatctgaataggcctaccctcacccacccacccagtttaattgtgcttagagcccaagaagattgggatctagcactaggaataaacctttcataaaagcaggcccagcgaggtcaatttgtcggggactctaggagggtggcctgggtggagacaagctcagtctaatcaaacaccagaaccctatcaagtcaaaagagctggggccaggcagctgaagtcacaggtttcagagatggtttgaaggcccagtcttctctcccagcctcagttggagccaaagctttgtcctttagccagcaccaagatagctatggatcttaagagcaccagatccagagggggttgggtttgctgaccttcatcatgcattcattcatacagcaaatatttactgagtgctttcatttgccagggactgcgttaggccctggggaaacatcagtgaataaaacacggtccctgcccacagtgcttagggcctactgagggaaagaagtaaccaggcaactacaaaacagtgataagtattaggatacagaagtacagagggcgctgtgggagcacaaaggaggggcatctggcatggactggggtggaaatggggatgtcagtttgaaagctgagacctggccaggtgcggtggctcactcctgtaatcccagcactttgggaggccgaggcgggcggatcaccaggtcaggagatcaagaccatcctggctaacacggtgaaaacccatctctactaaaaatgcaagaaaattagcccggcacggtggctggcgcctgtagtcctgtagtcccagctactcgggaggctgaggcaggagaatggtgtgaacccgggaggcggagcttgcagtggagccaagattgcgccactgcactccagcctgggcaacagagcgggactccatctc

SEQ ID NO: 423323 - DNA, 2640 bp, Homo sapiens
  misc_feature (22)..(22): n is a, c, g, or t
ggtgccttttgtcaagtttgtncatgtagcaggctggtccggtccgggattcccgggtttccctgacctgctgctaggatcgcgacgggaactggagcccgaggtccccgcgcggcccgggcctggcgccctgaggggaagagcggcccggcccgagggtgctggggtggagagttttactccaatacctttcctagccatgacggacgggatcctagggaaggcagccacaatggagatccctatccacgggaacggcgaagccaggcagcttcctgaagatgatgggctggagcaggacctccagcaggtgatggtgtcaggacccaacctcaatgaaaccagcattgtgtctggtggctatgggggctctggtgatggactcatccccacagggtctggccgccatccatctcacagcaccactccttctggccctggagatgaggtggctcggggcattgctggagaaaagtttgacatcgtcaagaaatggggcatcaacacctataagtgcacaaagcaactgttatcagaacgatttggtcgaggctcacggactgtggacctggagctagagctgcagattgagttgctgcgtgagacgaagcgcaagtatgagagtgtcctgcagctgggccgggcactgacagcccacctctacagcctgctgcagacccagcatgcactgggtgatgcctttgctgacctcagccagaagtccccagagcttcaggaggaatttggctacaatgcagagacacagaaactactatgcaagaatggggaaacgctgctaggagccgtgaacttctttgtctctagcatcaacacattggtcaccaagaccatggaagacacgctcatgactgtgaaacagtatgaggctgccaggctggaatatgatgcctaccgaacagacttagaggagctgagtctaggcccccgggatgcagggacacgtggtcgacttgagagtgcccaggccactttccaggcccatcgggacaagtatgagaagctgcggggagatgtggccatcaagctcaagttcctggaagaaaacaagatcaaggtgatgcacaagcagctgctgctcttccacaatgctgtgtccgcctactttgctgggaaccagaaacagctggagcagaccctgcagcagttcaacatcaagctgcggcctccaggagctgagaaaccctcctggctagaggagcagtgagctgctcccagcccaacttggctatcaagaaagacattgggaagggcagccccagggtgtgggagattggacatggtacatcctttgtcacttgccctctggcttgggctcctttttctggctggggcctgacaccagttttgcccacattgctatggtgggaagagggcctggaggcccagaagttgctgccctgtctatcttcctggccacagggcttcattcccagatcttttccttccacttcacagccaacggctatgacaaaaccactccctggccaatggcatcactcttcaggctggggtgtgctccctgaccaatgacagagcctgaaaatgccctgtcagccaatggcagctcttctcggactcccctgggccaatgatgttgcgtctaataccctttgtctctcctctatgcgtgcccattgcagagaaggggactgggaccaaaggggtggggataatggggagccccattgctggccttgcatctgaataggcctaccctcacccacccacccagtttaattgtgcttagagcccaagaagattgggatctagcactaggaataaacctttcataaaagcaggcccagcgaggtcaatttgtcggggactctaggagggtggcctgggtggagacaagctcagtctaatcaaacaccagaaccctatcaagtcaaaagagctggggccaggcagctgaagtcacaggtttcagagatggtttgaaggcccagtcttctctcccagcctcagttggagccaaagctttgtcctttagccagcaccaagatagctatggatcttaagagcaccagatccagagggggttgggtttgctgaccttcatcatgcattcattcatacagcaaatatttactgagtgctttcatttgccagggactgcgttaggccctggggaaacatcagtgaataaaacacggtccctgcccacagtgcttagggcctactgagggaaagaagtaaccaggcaactacaaaacagtgataagtattaggatacagaagtacagagggcgctgtgggagcacaaaggaggggcatctggcatggactggggtggaaatggggatgtcagtttgaaagctgagacctggccaggtgcggtggctcactcctgtaatcccagcactttgggaggccgaggcgggcggatcaccaggtcaggagatcaagaccatcctggctaacacggtgaaaacccatctctactaaaaatgcaagaaaattagcccggcacggtggctggcgcctgtagtcctgtagtcccagctactcgggaggctgaggcaggagaatggtgtgaacccgggaggcggagcttgcagtggagccaagattgcgccactgcactccagcctgggcaacagagcgggactccatctc

SEQ ID NO: 423324 - DNA, 3089 bp, Homo sapiens
  misc_feature (22)..(22): n is a, c, g, or t
ggtgccttttgtcaagtttgtncatgtagcaggctggtccggtccgggattcccgggtttccctgacctgctgctaggatcgcgacgggaactggagcccgaggtccccgcgcggcccgggcctggcgccctgaggggaagagcggcccggcccgagggtgctggggtggagagttttactccaatacctttcctagccatgacggacgggatcctagggaaggcagccacaatggagatccctatccacgggaacggcgaagccaggcagcttcctgaagatgatgggctggagcaggacctccagcaggtgatggtgtcaggacccaacctcaatgaaaccagcattgtgtctggtggctatgggggctctggtgatggactcatccccacagggtctggccgccatccatctcacagcaccactccttctggccctggagatgaggtggctcggggcattgctggagaaaagtttgacatcgtcaagaaatggggcatcaacacctataagtgcacaaagcaactgttatcagaacgatttggtcgaggctcacggactgtggacctggagctagagctgcagattgagttgctgcgtgagacgaagcgcaagtatgagagtgtcctgcagctgggccgggcactgacagcccacctctacagcctgctgcagacccagcatgcactgggtgatgcctttgctgacctcagccagaagtccccagagcttcaggaggaatttggctacaatgcagagacacagaaactactatgcaagaatggggaaacgctgctaggagccgtgaacttctttgtctctagcatcaacacattggtcaccaagaccatggaagacacgctcatgactgtgaaacagtatgaggctgccaggctggaatatgatgcctaccgaacagacttagaggagctgagtctaggcccccgggatgcagggacacgtggtcgacttgagagtgcccaggccactttccaggcccatcgggacaagtatgagaagctgcggggagatgtggccatcaagctcaagttcctggaagaaaacaaggtgccaaccccacccccttgaccctagcccacctttccatctgtaacactaaccttcccctcagaccctccccattattgaatgaggaaatgcagcctagctggggagtagagtgttcaccccctcaacccctgggcctttccagatcaccctccctccaattcctggccctttcctgttggaggatttggctgctggtcccaggaacataactgggaaaaatcaccccctgagctggggtacaaaaaccctaggcccacaaatccagtgaggtttcttccatcatactgacccttctcctttgactccctgggtagagttcagcccctaccccaaaagcaccatcagagcagagtccttgtgcccctggtctgtgcctgggctcaggctcatagaccctcaagaagggcgcctgagtccagccttagctgaccctgctggacccccagatcaaggtgatgcacaagcagctgctgctcttccacaatgctgtgtccgcctactttgctgggaaccagaaacagctggagcagaccctgcagcagttcaacatcaagctgcggcctccaggagctgagaaaccctcctggctagaggagcagtgagctgctcccagcccaacttggctatcaagaaagacattgggaagggcagccccagggtgtgggagattggacatggtacatcctttgtcacttgccctctggcttgggctcctttttctggctggggcctgacaccagttttgcccacattgctatggtgggaagagggcctggaggcccagaagttgctgccctgtctatcttcctggccacagggcttcattcccagatcttttccttccacttcacagccaacggctatgacaaaaccactccctggccaatggcatcactcttcaggctggggtgtgctccctgaccaatgacagagcctgaaaatgccctgtcagccaatggcagctcttctcggactcccctgggccaatgatgttgcgtctaataccctttgtctctcctctatgcgtgcccattgcagagaaggggactgggaccaaaggggtggggataatggggagccccattgctggccttgcatctgaataggcctaccctcacccacccacccagtttaattgtgcttagagcccaagaagattgggatctagcactaggaataaacctttcataaaagcaggcccagcgaggtcaatttgtcggggactctaggagggtggcctgggtggagacaagctcagtctaatcaaacaccagaaccctatcaagtcaaaagagctggggccaggcagctgaagtcacaggtttcagagatggtttgaaggcccagtcttctctcccagcctcagttggagccaaagctttgtcctttagccagcaccaagatagctatggatcttaagagcaccagatccagagggggttgggtttgctgaccttcatcatgcattcattcatacagcaaatatttactgagtgctttcatttgccagggactgcgttaggccctggggaaacatcagtgaataaaacacggtccctgcccacagtgcttagggcctactgagggaaagaagtaaccaggcaactacaaaacagtgataagtattaggatacagaagtacagagggcgctgtgggagcacaaaggaggggcatctggcatggactggggtggaaatggggatgtcagtttgaaagctgagacctggccaggtgcggtggctcactcctgtaatcccagcactttgggaggccgaggcgggcggatcaccaggtcaggagatcaagaccatcctggctaacacggtgaaaacccatctctactaaaaatgcaagaaaattagcccggcacggtggctggcgcctgtagtcctgtagtcccagctactcgggaggctgaggcaggagaatggtgtgaacccgggaggcggagcttgcagtggagccaagattgcgccactgcactccagcctgggcaacagagcgggactccatctc

SEQ ID NO: 423325 - DNA, 1833 bp, Homo sapiens
  misc_feature (22)..(22): n is a, c, g, or t
ggtgccttttgtcaagtttgtncatgtagcaggctggtccggtccgggattcccgggtttccctgacctgctgctaggatcgcgacgggaactggagcccgaggtccccgcgcggcccgggcctggcgccctgaggggaagagcggcccggcccgagccatgacggacgggatcctagggaaggcagccacaatggagatccctatccacgggaacggcgaagccaggcagcttcctgaagatgatgggctggagcaggacctccagcaggtgatggtgtcaggacccaacctcaatgaaaccagcattgtgtctggtggctatgggggctctggtgatggactcatccccacagggtctggccgccatccatctcacagcaccactccttctggccctggagatgaggtggctcggggcattgctggagaaaagtttgacatcgtcaagaaatggggcatcaacacctataagtgcacaaagcaactgttatcagaacgatttggtcgaggctcacggactgtggacctggagctagagctgcagattgagttgctgcgtgagacgaagcgcaagtatgagagtgtcctgcagctgggccgggcactgacagcccacctctacagcctgctgcagacccagcatgcactgggtgatgcctttgctgacctcagccagaagtccccagagcttcaggaggaatttggctacaatgcagagacacagaaactactatgcaagaatggggaaacgctgctaggagccgtgaacttctttgtctctagcatcaacacattggtcaccaagaccatggaagacacgctcatgactgtgaaacagtatgaggctgccaggctggaatatgatgcctaccgaacagacttagaggagctgagtctaggcccccgggatgcagggacacgtggtcgacttgagagtgcccaggccactttccaggcccatcgggacaagtatgagaagctgcggggagatgtggccatcaagctcaagttcctggaagaaaacaagatcaaggtgatgcacaagcagctgctgctcttccacaatgctgtgtccgcctactttgctgggaaccagaaacagctggagcagaccctgcagcagttcaacatcaagctgcggcctccaggagctgagaaaccctcctggctagaggagcagtgagctgctcccagcccaacttggctatcaagaaagacattgggaagggcagccccagggtgtgggagattggacatggtacatcctttgtcacttgccctctggcttgggctcctttttctggctggggcctgacaccagttttgcccacattgctatggtgggaagagggcctggaggcccagaagttgctgccctgtctatcttcctggccacagggcttcattcccagatcttttccttccacttcacagccaacggctatgacaaaaccactccctggccaatggcatcactcttcaggctggggtgtgctccctgaccaatgacagagcctgaaaatgccctgtcagccaatggcagctcttctcggactcccctgggccaatgatgttgcgtctaataccctttgtctctcctctatgcgtgcccattgcagagaaggggactgggaccaaaggggtggggataatggggagccccattgctggccttgcatctgaataggcctaccctcacccacccacccagtttaattgtgcttagagcccaagaagattgggatctagcactaggaataaacctttcataaataattattaaaaaaatcctcttagtgggggacccggttcccaatttgcctattattgt

SEQ ID NO: 423326 - DNA, 2499 bp, Homo sapiens
  misc_feature (22)..(22): n is a, c, g, or t
ggtgccttttgtcaagtttgtncatgtagcaggctggtccggtccgggattcccgggtttccctgacctgctgctaggatcgcgacgggaactggagcccgaggtccccgcgcggcccgggcctggcgccctgaggggaagagcggcccggcccgaggacctccagcaggtgatggtgtcaggacccaacctcaatgaaaccagcattgtgtctggtggctatgggggctctggtgatggactcatccccacagggtctggccgccatccatctcacagcaccactccttctggccctggagatgaggtggctcggggcattgctggagaaaagtttgacatcgtcaagaaatggggcatcaacacctataagtgcacaaagcaactgttatcagaacgatttggtcgaggctcacggactgtggacctggagctagagctgcagattgagttgctgcgtgagacgaagcgcaagtatgagagtgtcctgcagctgggccgggcactgacagcccacctctacagcctgctgcagacccagcatgcactgggtgatgcctttgctgacctcagccagaagtccccagagcttcaggaggaatttggctacaatgcagagacacagaaactactatgcaagaatggggaaacgctgctaggagccgtgaacttctttgtctctagcatcaacacattggtcaccaagaccatggaagacacgctcatgactgtgaaacagtatgaggctgccaggctggaatatgatgcctaccgaacagacttagaggagctgagtctaggcccccgggatgcagggacacgtggtcgacttgagagtgcccaggccactttccaggcccatcgggacaagtatgagaagctgcggggagatgtggccatcaagctcaagttcctggaagaaaacaagatcaaggtgatgcacaagcagctgctgctcttccacaatgctgtgtccgcctactttgctgggaaccagaaacagctggagcagaccctgcagcagttcaacatcaagctgcggcctccaggagctgagaaaccctcctggctagaggagcagtgagctgctcccagcccaacttggctatcaagaaagacattgggaagggcagccccagggtgtgggagattggacatggtacatcctttgtcacttgccctctggcttgggctcctttttctggctggggcctgacaccagttttgcccacattgctatggtgggaagagggcctggaggcccagaagttgctgccctgtctatcttcctggccacagggcttcattcccagatcttttccttccacttcacagccaacggctatgacaaaaccactccctggccaatggcatcactcttcaggctggggtgtgctccctgaccaatgacagagcctgaaaatgccctgtcagccaatggcagctcttctcggactcccctgggccaatgatgttgcgtctaataccctttgtctctcctctatgcgtgcccattgcagagaaggggactgggaccaaaggggtggggataatggggagccccattgctggccttgcatctgaataggcctaccctcacccacccacccagtttaattgtgcttagagcccaagaagattgggatctagcactaggaataaacctttcataaaagcaggcccagcgaggtcaatttgtcggggactctaggagggtggcctgggtggagacaagctcagtctaatcaaacaccagaaccctatcaagtcaaaagagctggggccaggcagctgaagtcacaggtttcagagatggtttgaaggcccagtcttctctcccagcctcagttggagccaaagctttgtcctttagccagcaccaagatagctatggatcttaagagcaccagatccagagggggttgggtttgctgaccttcatcatgcattcattcatacagcaaatatttactgagtgctttcatttgccagggactgcgttaggccctggggaaacatcagtgaataaaacacggtccctgcccacagtgcttagggcctactgagggaaagaagtaaccaggcaactacaaaacagtgataagtattaggatacagaagtacagagggcgctgtgggagcacaaaggaggggcatctggcatggactggggtggaaatggggatgtcagtttgaaagctgagacctggccaggtgcggtggctcactcctgtaatcccagcactttgggaggccgaggcgggcggatcaccaggtcaggagatcaagaccatcctggctaacacggtgaaaacccatctctactaaaaatgcaagaaaattagcccggcacggtggctggcgcctgtagtcctgtagtcccagctactcgggaggctgaggcaggagaatggtgtgaacccgggaggcggagcttgcagtggagccaagattgcgccactgcactccagcctgggcaacagagcgggactccatctc

SEQ ID NO: 423327 - DNA, 2714 bp, Homo sapiens
  misc_feature (22)..(22): n is a, c, g, or t
ggtgccttttgtcaagtttgtncatgtagcaggctggtccggtccgggattcccgggtttccctgacctgctgctaggatcgcgacgggaactggagcccgaggtccccgcgcggcccgggcctggcgccctgaggggaagagcggcccggcccgagggtgctggggtggagagttttactccaatacctttcctagccatgacggacgggatcctagggaaggcagccacaatggagatccctatccacgggaacggcgaagccaggcagcttcctgaagatgatgggctggagcaggacctccagcaggtgatggtgtcaggacccaacctcaatgaaaccagcattgtgtctggtggctatgggggctctggtgatggactcatccccacagggtctggccgccatccatctcacagcaccactccttctggccctggagatgaggtggctcggggcattgctggagaaaagtttgacatcgtcaagaaatggggcatcaacacctataagtgcacaaagcaactgttatcagaacgatttggtcgaggctcacggactgtggacctggagctagagctgcagattgagttgctgcgtgagacgaagcgcaagtatgagagtgtcctgcagctgggccgggcactgacagcccacctctacagcctgctgcagacccagcatgcactgggtgatgcctttgctgacctcagccagaagtccccagagcttcagcccacagggagaaccccttcagggtgggcccagccctacccccagcagcactcacctgtggaggcagcctaagggaggaatttggctacaatgcagagacacagaaactactatgcaagaatggggaaacgctgctaggagccgtgaacttctttgtctctagcatcaacacattggtcaccaagaccatggaagacacgctcatgactgtgaaacagtatgaggctgccaggctggaatatgatgcctaccgaacagacttagaggagctgagtctaggcccccgggatgcagggacacgtggtcgacttgagagtgcccaggccactttccaggcccatcgggacaagtatgagaagctgcggggagatgtggccatcaagctcaagttcctggaagaaaacaagatcaaggtgatgcacaagcagctgctgctcttccacaatgctgtgtccgcctactttgctgggaaccagaaacagctggagcagaccctgcagcagttcaacatcaagctgcggcctccaggagctgagaaaccctcctggctagaggagcagtgagctgctcccagcccaacttggctatcaagaaagacattgggaagggcagccccagggtgtgggagattggacatggtacatcctttgtcacttgccctctggcttgggctcctttttctggctggggcctgacaccagttttgcccacattgctatggtgggaagagggcctggaggcccagaagttgctgccctgtctatcttcctggccacagggcttcattcccagatcttttccttccacttcacagccaacggctatgacaaaaccactccctggccaatggcatcactcttcaggctggggtgtgctccctgaccaatgacagagcctgaaaatgccctgtcagccaatggcagctcttctcggactcccctgggccaatgatgttgcgtctaataccctttgtctctcctctatgcgtgcccattgcagagaaggggactgggaccaaaggggtggggataatggggagccccattgctggccttgcatctgaataggcctaccctcacccacccacccagtttaattgtgcttagagcccaagaagattgggatctagcactaggaataaacctttcataaaagcaggcccagcgaggtcaatttgtcggggactctaggagggtggcctgggtggagacaagctcagtctaatcaaacaccagaaccctatcaagtcaaaagagctggggccaggcagctgaagtcacaggtttcagagatggtttgaaggcccagtcttctctcccagcctcagttggagccaaagctttgtcctttagccagcaccaagatagctatggatcttaagagcaccagatccagagggggttgggtttgctgaccttcatcatgcattcattcatacagcaaatatttactgagtgctttcatttgccagggactgcgttaggccctggggaaacatcagtgaataaaacacggtccctgcccacagtgcttagggcctactgagggaaagaagtaaccaggcaactacaaaacagtgataagtattaggatacagaagtacagagggcgctgtgggagcacaaaggaggggcatctggcatggactggggtggaaatggggatgtcagtttgaaagctgagacctggccaggtgcggtggctcactcctgtaatcccagcactttgggaggccgaggcgggcggatcaccaggtcaggagatcaagaccatcctggctaacacggtgaaaacccatctctactaaaaatgcaagaaaattagcccggcacggtggctggcgcctgtagtcctgtagtcccagctactcgggaggctgaggcaggagaatggtgtgaacccgggaggcggagcttgcagtggagccaagattgcgccactgcactccagcctgggcaacagagcgggactccatctc

SEQ ID NO: 423328 - DNA, 2836 bp, Homo sapiens
  misc_feature (22)..(22): n is a, c, g, or t
ggtgccttttgtcaagtttgtncatgtagcaggctggtccggtccgggattcccgggtttccctgacctgctgctaggatcgcgacgggaactggagcccgaggtccccgcgcggcccgggcctggcgccctgaggggaagagcggcccggcccgagggtgctggggtggagagttttactccaatacctttcctagccatgacggacgggatcctagggaaggcagccacaatggagatccctatccacgggaacggcgaagccaggcagcttcctgaagatgatgggctggagcaggacctccagcaggtgatggtgtcaggacccaacctcaatgaaaccagcattgtgtctggtggctatgggggctctggtgatggactcatccccacaggaggccatatgtatatcaggatttggttctcaccgcgcaaagtccgagttcctcctagtaagcaggagcatccagttgtctctagcatctccttcagggaagtcaatttcatgtgctcgaagagaagtatgggtggggccacagaggtgtctggtgtatctgagagaggctggtgtcagagaacttgatcctttagggtctggccgccatccatctcacagcaccactccttctggccctggagatgaggtggctcggggcattgctggagaaaagtttgacatcgtcaagaaatggggcatcaacacctataagtgcacaaagcaactgttatcagaacgatttggtcgaggctcacggactgtggacctggagctagagctgcagattgagttgctgcgtgagacgaagcgcaagtatgagagtgtcctgcagctgggccgggcactgacagcccacctctacagcctgctgcagacccagcatgcactgggtgatgcctttgctgacctcagccagaagtccccagagcttcaggaggaatttggctacaatgcagagacacagaaactactatgcaagaatggggaaacgctgctaggagccgtgaacttctttgtctctagcatcaacacattggtcaccaagaccatggaagacacgctcatgactgtgaaacagtatgaggctgccaggctggaatatgatgcctaccgaacagacttagaggagctgagtctaggcccccgggatgcagggacacgtggtcgacttgagagtgcccaggccactttccaggcccatcgggacaagtatgagaagctgcggggagatgtggccatcaagctcaagttcctggaagaaaacaagatcaaggtgatgcacaagcagctgctgctcttccacaatgctgtgtccgcctactttgctgggaaccagaaacagctggagcagaccctgcagcagttcaacatcaagctgcggcctccaggagctgagaaaccctcctggctagaggagcagtgagctgctcccagcccaacttggctatcaagaaagacattgggaagggcagccccagggtgtgggagattggacatggtacatcctttgtcacttgccctctggcttgggctcctttttctggctggggcctgacaccagttttgcccacattgctatggtgggaagagggcctggaggcccagaagttgctgccctgtctatcttcctggccacagggcttcattcccagatcttttccttccacttcacagccaacggctatgacaaaaccactccctggccaatggcatcactcttcaggctggggtgtgctccctgaccaatgacagagcctgaaaatgccctgtcagccaatggcagctcttctcggactcccctgggccaatgatgttgcgtctaataccctttgtctctcctctatgcgtgcccattgcagagaaggggactgggaccaaaggggtggggataatggggagccccattgctggccttgcatctgaataggcctaccctcacccacccacccagtttaattgtgcttagagcccaagaagattgggatctagcactaggaataaacctttcataaaagcaggcccagcgaggtcaatttgtcggggactctaggagggtggcctgggtggagacaagctcagtctaatcaaacaccagaaccctatcaagtcaaaagagctggggccaggcagctgaagtcacaggtttcagagatggtttgaaggcccagtcttctctcccagcctcagttggagccaaagctttgtcctttagccagcaccaagatagctatggatcttaagagcaccagatccagagggggttgggtttgctgaccttcatcatgcattcattcatacagcaaatatttactgagtgctttcatttgccagggactgcgttaggccctggggaaacatcagtgaataaaacacggtccctgcccacagtgcttagggcctactgagggaaagaagtaaccaggcaactacaaaacagtgataagtattaggatacagaagtacagagggcgctgtgggagcacaaaggaggggcatctggcatggactggggtggaaatggggatgtcagtttgaaagctgagacctggccaggtgcggtggctcactcctgtaatcccagcactttgggaggccgaggcgggcggatcaccaggtcaggagatcaagaccatcctggctaacacggtgaaaacccatctctactaaaaatgcaagaaaattagcccggcacggtggctggcgcctgtagtcctgtagtcccagctactcgggaggctgaggcaggagaatggtgtgaacccgggaggcggagcttgcagtggagccaagattgcgccactgcactccagcctgggcaacagagcgggactccatctc

SEQ ID NO: 423329 - DNA, 3353 bp, Homo sapiens
  misc_feature (22)..(22): n is a, c, g, or t
ggtgccttttgtcaagtttgtncatgtagcaggctggtccggtccgggattcccgggtttccctgacctgctgctaggatcgcgacgggaactggagcccgaggtccccgcgcggcccgggcctggcgccctgaggggaagagcggcccggcccgagggtgctggggtggagagttttactccaatacctttcctagccatgacggacgggatcctagggaaggcagccacaatggagatccctatccacgggaacggcgaagccaggcagcttcctgaagatgatgggctggagcaggacctccagcaggtgatggtgtcaggacccaacctcaatgaaaccagcattgtgtctggtggctatgggggctctggtgatggactcatccccacaggtatgaatgttcagaaacaggaatcttgggtggaggaggggacaggaatggtttggggaagcataggatatgtctaggaaagcttgaattatgtctggagatcttgggaacttctgcttgtaggaacctcatggactctcctcagcccaaaagcaactcccagcgttgtccatccatttcccttttgccacttagcccctgaaatggctcatttgtcctttccctgccaccacctgagtcaagttaagacctgcttcacaggaatgccccccctctacagcttgaggctgagttggaactttgtgaagcttctcagaatttttagattctaaagtttagaggaacaaacagccctgaatctcacactaagattccacatgggaatgcaaccaggtttcttgttatcatgacccaccatccttgactcctgctgcccccaaactcagtgtattttcttctgtttcctctgcccctgtacaccaacaactccctgcaaacccctcctctaacccccaaggaggccatatgtatatcaggatttggttctcaccgcgcaaagtccgagttcctcctagtaagcaggagcatccagttgtctctagcatctccttcagggaagtcaatttcatgtgctcgaagagaagtatgggtggggccacagaggtgtctggtgtatctgagagaggctggtgtcagagaacttgatcctttagggtctggccgccatccatctcacagcaccactccttctggccctggagatgaggtggctcggggcattgctggagaaaagtttgacatcgtcaagaaatggggcatcaacacctataagtgcacaaagcaactgttatcagaacgatttggtcgaggctcacggactgtggacctggagctagagctgcagattgagttgctgcgtgagacgaagcgcaagtatgagagtgtcctgcagctgggccgggcactgacagcccacctctacagcctgctgcagacccagcatgcactgggtgatgcctttgctgacctcagccagaagtccccagagcttcaggaggaatttggctacaatgcagagacacagaaactactatgcaagaatggggaaacgctgctaggagccgtgaacttctttgtctctagcatcaacacattggtcaccaagaccatggaagacacgctcatgactgtgaaacagtatgaggctgccaggctggaatatgatgcctaccgaacagacttagaggagctgagtctaggcccccgggatgcagggacacgtggtcgacttgagagtgcccaggccactttccaggcccatcgggacaagtatgagaagctgcggggagatgtggccatcaagctcaagttcctggaagaaaacaagatcaaggtgatgcacaagcagctgctgctcttccacaatgctgtgtccgcctactttgctgggaaccagaaacagctggagcagaccctgcagcagttcaacatcaagctgcggcctccaggagctgagaaaccctcctggctagaggagcagtgagctgctcccagcccaacttggctatcaagaaagacattgggaagggcagccccagggtgtgggagattggacatggtacatcctttgtcacttgccctctggcttgggctcctttttctggctggggcctgacaccagttttgcccacattgctatggtgggaagagggcctggaggcccagaagttgctgccctgtctatcttcctggccacagggcttcattcccagatcttttccttccacttcacagccaacggctatgacaaaaccactccctggccaatggcatcactcttcaggctggggtgtgctccctgaccaatgacagagcctgaaaatgccctgtcagccaatggcagctcttctcggactcccctgggccaatgatgttgcgtctaataccctttgtctctcctctatgcgtgcccattgcagagaaggggactgggaccaaaggggtggggataatggggagccccattgctggccttgcatctgaataggcctaccctcacccacccacccagtttaattgtgcttagagcccaagaagattgggatctagcactaggaataaacctttcataaaagcaggcccagcgaggtcaatttgtcggggactctaggagggtggcctgggtggagacaagctcagtctaatcaaacaccagaaccctatcaagtcaaaagagctggggccaggcagctgaagtcacaggtttcagagatggtttgaaggcccagtcttctctcccagcctcagttggagccaaagctttgtcctttagccagcaccaagatagctatggatcttaagagcaccagatccagagggggttgggtttgctgaccttcatcatgcattcattcatacagcaaatatttactgagtgctttcatttgccagggactgcgttaggccctggggaaacatcagtgaataaaacacggtccctgcccacagtgcttagggcctactgagggaaagaagtaaccaggcaactacaaaacagtgataagtattaggatacagaagtacagagggcgctgtgggagcacaaaggaggggcatctggcatggactggggtggaaatggggatgtcagtttgaaagctgagacctggccaggtgcggtggctcactcctgtaatcccagcactttgggaggccgaggcgggcggatcaccaggtcaggagatcaagaccatcctggctaacacggtgaaaacccatctctactaaaaatgcaagaaaattagcccggcacggtggctggcgcctgtagtcctgtagtcccagctactcgggaggctgaggcaggagaatggtgtgaacccgggaggcggagcttgcagtggagccaagattgcgccactgcactccagcctgggcaacagagcgggactccatctc

SEQ ID NO: 423330 - DNA, 3276 bp, Homo sapiens
agaggacgtcatttccgccgagtccctgacctgctgctaggatcgcgacgggaactggagcccgaggtccccgcgcggcccgggcctggcgccctgaggggaagagcggcccggcccgagccatgacggacgggatcctagggaaggcagccacaatggagatccctatccacgggaacggcgaagccaggcagcttcctgaagatgatgggctggagcaggacctccagcaggtgatggtgtcaggacccaacctcaatgaaaccagcattgtgtctggtggctatgggggctctggtgatggactcatccccacaggtatgaatgttcagaaacaggaatcttgggtggaggaggggacaggaatggtttggggaagcataggatatgtctaggaaagcttgaattatgtctggagatcttgggaacttctgcttgtaggaacctcatggactctcctcagcccaaaagcaactcccagcgttgtccatccatttcccttttgccacttagcccctgaaatggctcatttgtcctttccctgccaccacctgagtcaagttaagacctgcttcacaggaatgccccccctctacagcttgaggctgagttggaactttgtgaagcttctcagaatttttagattctaaagtttagaggaacaaacagccctgaatctcacactaagattccacatgggaatgcaaccaggtttcttgttatcatgacccaccatccttgactcctgctgcccccaaactcagtgtattttcttctgtttcctctgcccctgtacaccaacaactccctgcaaacccctcctctaacccccaaggaggccatatgtatatcaggatttggttctcaccgcgcaaagtccgagttcctcctagtaagcaggagcatccagttgtctctagcatctccttcagggaagtcaatttcatgtgctcgaagagaagtatgggtggggccacagaggtgtctggtgtatctgagagaggctggtgtcagagaacttgatcctttagggtctggccgccatccatctcacagcaccactccttctggccctggagatgaggtggctcggggcattgctggagaaaagtttgacatcgtcaagaaatggggcatcaacacctataagtgcacaaagcaactgttatcagaacgatttggtcgaggctcacggactgtggacctggagctagagctgcagattgagttgctgcgtgagacgaagcgcaagtatgagagtgtcctgcagctgggccgggcactgacagcccacctctacagcctgctgcagacccagcatgcactgggtgatgcctttgctgacctcagccagaagtccccagagcttcaggaggaatttggctacaatgcagagacacagaaactactatgcaagaatggggaaacgctgctaggagccgtgaacttctttgtctctagcatcaacacattggtcaccaagaccatggaagacacgctcatgactgtgaaacagtatgaggctgccaggctggaatatgatgcctaccgaacagacttagaggagctgagtctaggcccccgggatgcagggacacgtggtcgacttgagagtgcccaggccactttccaggcccatcgggacaagtatgagaagctgcggggagatgtggccatcaagctcaagttcctggaagaaaacaagatcaaggtgatgcacaagcagctgctgctcttccacaatgctgtgtccgcctactttgctgggaaccagaaacagctggagcagaccctgcagcagttcaacatcaagctgcggcctccaggagctgagaaaccctcctggctagaggagcagtgagctgctcccagcccaacttggctatcaagaaagacattgggaagggcagccccagggtgtgggagattggacatggtacatcctttgtcacttgccctctggcttgggctcctttttctggctggggcctgacaccagttttgcccacattgctatggtgggaagagggcctggaggcccagaagttgctgccctgtctatcttcctggccacagggcttcattcccagatcttttccttccacttcacagccaacggctatgacaaaaccactccctggccaatggcatcactcttcaggctggggtgtgctccctgaccaatgacagagcctgaaaatgccctgtcagccaatggcagctcttctcggactcccctgggccaatgatgttgcgtctaataccctttgtctctcctctatgcgtgcccattgcagagaaggggactgggaccaaaggggtggggataatggggagccccattgctggccttgcatctgaataggcctaccctcacccacccacccagtttaattgtgcttagagcccaagaagattgggatctagcactaggaataaacctttcataaaagcaggcccagcgaggtcaatttgtcggggactctaggagggtggcctgggtggagacaagctcagtctaatcaaacaccagaaccctatcaagtcaaaagagctggggccaggcagctgaagtcacaggtttcagagatggtttgaaggcccagtcttctctcccagcctcagttggagccaaagctttgtcctttagccagcaccaagatagctatggatcttaagagcaccagatccagagggggttgggtttgctgaccttcatcatgcattcattcatacagcaaatatttactgagtgctttcatttgccagggactgcgttaggccctggggaaacatcagtgaataaaacacggtccctgcccacagtgcttagggcctactgagggaaagaagtaaccaggcaactacaaaacagtgataagtattaggatacagaagtacagagggcgctgtgggagcacaaaggaggggcatctggcatggactggggtggaaatggggatgtcagtttgaaagctgagacctggccaggtgcggtggctcactcctgtaatcccagcactttgggaggccgaggcgggcggatcaccaggtcaggagatcaagaccatcctggctaacacggtgaaaacccatctctactaaaaatgcaagaaaattagcccggcacggtggctggcgcctgtagtcctgtagtcccagctactcgggaggctgaggcaggagaatggtgtgaacccgggaggcggagcttgcagtggagccaagattgcgccactgcactccagcctgggcaacagagcgggactccatctc

SEQ ID NO: 423331 - DNA, 2575 bp, Homo sapiens
  misc_feature (22)..(22): n is a, c, g, or t
ggtgccttttgtcaagtttgtncatgtagcaggctggtccggtccgggattcccgggtttccctgacctgctgctaggatcgcgacgggaactggagcccgaggtccccgcgcggcccgggcctggcgccctgaggggaagagcggcccggcccgagccatgacggacgggatcctagggaaggcagccacaatggagatccctatccacgggaacggcgaagccaggcagcttcctgaagatgatgggctggagcaggacctccagcaggtgatggtgtcaggacccaacctcaatgaaaccagcattgtgtctggtggctatgggggctctggtgatggactcatccccacagcaccactccttctggccctggagatgaggtggctcggggcattgctggagaaaagtttgacatcgtcaagaaatggggcatcaacacctataagtgcacaaagcaactgttatcagaacgatttggtcgaggctcacggactgtggacctggagctagagctgcagattgagttgctgcgtgagacgaagcgcaagtatgagagtgtcctgcagctgggccgggcactgacagcccacctctacagcctgctgcagacccagcatgcactgggtgatgcctttgctgacctcagccagaagtccccagagcttcaggaggaatttggctacaatgcagagacacagaaactactatgcaagaatggggaaacgctgctaggagccgtgaacttctttgtctctagcatcaacacattggtcaccaagaccatggaagacacgctcatgactgtgaaacagtatgaggctgccaggctggaatatgatgcctaccgaacagacttagaggagctgagtctaggcccccgggatgcagggacacgtggtcgacttgagagtgcccaggccactttccaggcccatcgggacaagtatgagaagctgcggggagatgtggccatcaagctcaagttcctggaagaaaacaagatcaaggtgatgcacaagcagctgctgctcttccacaatgctgtgtccgcctactttgctgggaaccagaaacagctggagcagaccctgcagcagttcaacatcaagctgcggcctccaggagctgagaaaccctcctggctagaggagcagtgagctgctcccagcccaacttggctatcaagaaagacattgggaagggcagccccagggtgtgggagattggacatggtacatcctttgtcacttgccctctggcttgggctcctttttctggctggggcctgacaccagttttgcccacattgctatggtgggaagagggcctggaggcccagaagttgctgccctgtctatcttcctggccacagggcttcattcccagatcttttccttccacttcacagccaacggctatgacaaaaccactccctggccaatggcatcactcttcaggctggggtgtgctccctgaccaatgacagagcctgaaaatgccctgtcagccaatggcagctcttctcggactcccctgggccaatgatgttgcgtctaataccctttgtctctcctctatgcgtgcccattgcagagaaggggactgggaccaaaggggtggggataatggggagccccattgctggccttgcatctgaataggcctaccctcacccacccacccagtttaattgtgcttagagcccaagaagattgggatctagcactaggaataaacctttcataaaagcaggcccagcgaggtcaatttgtcggggactctaggagggtggcctgggtggagacaagctcagtctaatcaaacaccagaaccctatcaagtcaaaagagctggggccaggcagctgaagtcacaggtttcagagatggtttgaaggcccagtcttctctcccagcctcagttggagccaaagctttgtcctttagccagcaccaagatagctatggatcttaagagcaccagatccagagggggttgggtttgctgaccttcatcatgcattcattcatacagcaaatatttactgagtgctttcatttgccagggactgcgttaggccctggggaaacatcagtgaataaaacacggtccctgcccacagtgcttagggcctactgagggaaagaagtaaccaggcaactacaaaacagtgataagtattaggatacagaagtacagagggcgctgtgggagcacaaaggaggggcatctggcatggactggggtggaaatggggatgtcagtttgaaagctgagacctggccaggtgcggtggctcactcctgtaatcccagcactttgggaggccgaggcgggcggatcaccaggtcaggagatcaagaccatcctggctaacacggtgaaaacccatctctactaaaaatgcaagaaaattagcccggcacggtggctggcgcctgtagtcctgtagtcccagctactcgggaggctgaggcaggagaatggtgtgaacccgggaggcggagcttgcagtggagccaagattgcgccactgcactccagcctgggcaacagagcgggactccatctc

SEQ ID NO: 423332 - DNA, 2552 bp, Homo sapiens
  misc_feature (22)..(22): n is a, c, g, or t
ggtgccttttgtcaagtttgtncatgtagcaggctggtccggtccgggattcccgggtttccctgacctgctgctaggatcgcgacgggaactggagcccgaggtccccgcgcggcccgggcctggcgccctgaggggaagagcggcccggcccgagccatgacggacgggatcctagggaaggcagccacaatggagatccctatccacgggaacggcgaagccaggcagcttcctgaagatgatgggctggagcaggacctccagcaggtgatggtgtcaggacccaacctcaatgaaaccagcattgtgtctggtggctatgggggctctggtgatggactcatccccacagatgaggtggctcggggcattgctggagaaaagtttgacatcgtcaagaaatggggcatcaacacctataagtgcacaaagcaactgttatcagaacgatttggtcgaggctcacggactgtggacctggagctagagctgcagattgagttgctgcgtgagacgaagcgcaagtatgagagtgtcctgcagctgggccgggcactgacagcccacctctacagcctgctgcagacccagcatgcactgggtgatgcctttgctgacctcagccagaagtccccagagcttcaggaggaatttggctacaatgcagagacacagaaactactatgcaagaatggggaaacgctgctaggagccgtgaacttctttgtctctagcatcaacacattggtcaccaagaccatggaagacacgctcatgactgtgaaacagtatgaggctgccaggctggaatatgatgcctaccgaacagacttagaggagctgagtctaggcccccgggatgcagggacacgtggtcgacttgagagtgcccaggccactttccaggcccatcgggacaagtatgagaagctgcggggagatgtggccatcaagctcaagttcctggaagaaaacaagatcaaggtgatgcacaagcagctgctgctcttccacaatgctgtgtccgcctactttgctgggaaccagaaacagctggagcagaccctgcagcagttcaacatcaagctgcggcctccaggagctgagaaaccctcctggctagaggagcagtgagctgctcccagcccaacttggctatcaagaaagacattgggaagggcagccccagggtgtgggagattggacatggtacatcctttgtcacttgccctctggcttgggctcctttttctggctggggcctgacaccagttttgcccacattgctatggtgggaagagggcctggaggcccagaagttgctgccctgtctatcttcctggccacagggcttcattcccagatcttttccttccacttcacagccaacggctatgacaaaaccactccctggccaatggcatcactcttcaggctggggtgtgctccctgaccaatgacagagcctgaaaatgccctgtcagccaatggcagctcttctcggactcccctgggccaatgatgttgcgtctaataccctttgtctctcctctatgcgtgcccattgcagagaaggggactgggaccaaaggggtggggataatggggagccccattgctggccttgcatctgaataggcctaccctcacccacccacccagtttaattgtgcttagagcccaagaagattgggatctagcactaggaataaacctttcataaaagcaggcccagcgaggtcaatttgtcggggactctaggagggtggcctgggtggagacaagctcagtctaatcaaacaccagaaccctatcaagtcaaaagagctggggccaggcagctgaagtcacaggtttcagagatggtttgaaggcccagtcttctctcccagcctcagttggagccaaagctttgtcctttagccagcaccaagatagctatggatcttaagagcaccagatccagagggggttgggtttgctgaccttcatcatgcattcattcatacagcaaatatttactgagtgctttcatttgccagggactgcgttaggccctggggaaacatcagtgaataaaacacggtccctgcccacagtgcttagggcctactgagggaaagaagtaaccaggcaactacaaaacagtgataagtattaggatacagaagtacagagggcgctgtgggagcacaaaggaggggcatctggcatggactggggtggaaatggggatgtcagtttgaaagctgagacctggccaggtgcggtggctcactcctgtaatcccagcactttgggaggccgaggcgggcggatcaccaggtcaggagatcaagaccatcctggctaacacggtgaaaacccatctctactaaaaatgcaagaaaattagcccggcacggtggctggcgcctgtagtcctgtagtcccagctactcgggaggctgaggcaggagaatggtgtgaacccgggaggcggagcttgcagtggagccaagattgcgccactgcactccagcctgggcaacagagcgggactccatctc

SEQ ID NO: 423333 - DNA, 1009 bp, Homo sapiens
  misc_feature (22)..(22): n is a, c, g, or t
ggtgccttttgtcaagtttgtncatgtagcaggctggtccggtccgggattcccgggtttccctgacctgctgctaggatcgcgacgggaactggagcccgaggtccccgcgcggcccgggcctggcgccctgaggggaagagcggcccggcccgagggtgctggggtggagagttttactccaatacctttcctagccatgacggacgggatcctagggaaggcagccacaatggagatccctatccacgggaacggcgaagccaggcagcttcctgaagatgatgggctggagcaggacctccagcaggtgatggtgtcaggacccaacctcaatgaaaccagcattgtgtctggtggctatgggggctctggtgatggactcatccccacagggtctggccgccatccatctcacagcaccactccttctggccctggagatgaggtggctcggggcattgctggagaaaagtttgacatcgtcaagaaatggggcatcaacacctataagtgcacaaagcaactgttatcagaacgatttggtcgaggctcacggactgtggacctggagctagagctgcagattgagttgctgcgtgagacgaagcgcaagtatgagagtgtcctgcagctgggccgggcactgacagcccacctctacagcctgctgcagacccagcatgcactgggtgatgcctttgctgacctcagccagaagtccccagagcttcaggaggaatttggctacaatgcagagacacagaaactactatgcaagaatggggaaacgctgctaggagccgtgaacttctttgtctctagcatcaacacattggtcaccaagaccatgcacacagcgtttaccactctgcgaccgtatgaacgcccccctgccatagcgatgcatgcccgcacgacactctagaagatgactccatggtttccgctacgcaccgtccatcctcgatccaaaccttcgggtgaacggtaccgagctcgatcgaca

SEQ ID NO: 423334 - DNA, 1728 bp, Homo sapiens
  misc_feature (22)..(22): n is a, c, g, or t
ggtgccttttgtcaagtttgtncatgtagcaggctggtccggtccgggattcccgggtttccctgacctgctgctaggatcgcgacgggaactggagcccgaggtccccgcgcggcccgggcctggcgccctgaggggaagagcggcccggcccgagggtgctggggtggagagttttactccaatacctttcctagccatgacggacgggatcctagggaaggcagccacaatggagatccctatccacgggaacggcgaagccaggcagcttcctgaagatgatgggctggagcaggacctccagcaggtgatggtgtcaggacccaacctcaatgaaaccagcattgtgtctggtggctatgggggctctggtgatggactcatccccacaggtatgaatgttcagaaacaggaatcttgggtggaggaggggacaggaatggtttggggaagcataggatatgtctaggaaagcttgaattatgtctggagatcttgggaacttctgcttgtaggaacctcatggactctcctcagcccaaaagcaactcccagcgttgtccatccatttcccttttgccacttagcccctgaaatggctcatttgtcctttccctgccaccacctgagtcaagttaagacctgcttcacaggaatgccccccctctacagcttgaggctgagttggaactttgtgaagcttctcagaatttttagattctaaagtttagaggaacaaacagccctgaatctcacactaagattccacatggggataatggggagccccattgctggccttgcatctgaataggcctaccctcacccacccacccagtttaattgtgcttagagcccaagaagattgggatctagcactaggaataaacctttcataaaagcaggcccagcgaggtcaatttgtcggggactctaggagggtggcctgggtggagacaagctcagtctaatcaaacaccagaaccctatcaagtcaaaagagctggggccaggcagctgaagtcacaggtttcagagatggtttgaaggcccagtcttctctcccagcctcagttggagccaaagctttgtcctttagccagcaccaagatagctatggatcttaagagcaccagatccagagggggttgggtttgctgaccttcatcatgcattcattcatacagcaaatatttactgagtgctttcatttgccagggactgcgttaggccctggggaaacatcagtgaataaaacacggtccctgcccacagtgcttagggcctactgagggaaagaagtaaccaggcaactacaaaacagtgataagtattaggatacagaagtacagagggcgctgtgggagcacaaaggaggggcatctggcatggactggggtggaaatggggatgtcagtttgaaagctgagacctggccaggtgcggtggctcactcctgtaatcccagcactttgggaggccgaggcgggcggatcaccaggtcaggagatcaagaccatcctggctaacacggtgaaaacccatctctactaaaaatgcaagaaaattagcccggcacggtggctggcgcctgtagtcctgtagtcccagctactcgggaggctgaggcaggagaatggtgtgaacccgggaggcggagcttgcagtggagccaagattgcgccactgcactccagcctgggcaacagagcgggactccatctc

SEQ ID NO: 423335 - DNA, 813 bp, Homo sapiens
  misc_feature (22)..(22): n is a, c, g, or t
ggtgccttttgtcaagtttgtncatgtagcaggctggtccggtccgggattcccgggtttccctgacctgctgctaggatcgcgacgggaactggagcccgaggtccccgcgcggcccgggcctggcgccctgaggggaagagcggcccggcccgagggtgctggggtggagagttttactccaatacctttcctagccatgacggacgggatcctagggaaggcagccacaatggagatccctatccacgggaacggcgaagccaggcagcttcctgaagatgatgggctggagcaggacctccagcaggtgatggtgtcaggacccaacctcaatgaaaccagcattgtgtctggtggctatgggggctctggtgatggactcatccccacaggaggccatatgtatatcaggatttggttctcaccgcgcaaagtccgagttcctcctagtaagcaggagcatccagttgtctctagcatctccttcagggaagtcaatttcatgtgctcgaagagaagtatgggtggggccacagaggtgtctggtgtatctgagagaggctggtgtcagagaacttgatcctttagggtctggccgccatccatctcacagcaccactccttctggccctggagatgaggtggctcggggcattgctggagaaaagtttgacatcgtcaagaaatggggcatcaacacctataaggtaggatttaagcacctctcccttccccaaaactccttatgggtacctttttcccttttcctcgtgatcgtaatatcccatctgtggctgagagtaggagcct

SEQ ID NO: 423336 - DNA, 2601 bp, Homo sapiens
ccctctggcggcccgccgtcccagacgcgggaagagcttggccggtttcgagtcgctgacctgcagcttccctgtggtttcccgaggcctccttgcttcccgctctgcgaggagcctttcatccgaaggcgggacgatgccggataatcggcagccgaggaaccggcagccgaggatccgctccgggaacgagcctcgttccgcgcccgccatggaaccggatggtcgcggtgcctgggcccacagtcgcgccgcgctcgaccgcctggagaagctgctgcgctgctcgcgttgtactaacattctgagagagcctgtgtgtttaggaggatgtgagcacatcttctgtagtaattgtgtaagtgactgcattggaactggatgtccagtgtgttacaccccggcctggatacaagacttgaagataaatagacaactggacagcatgattcaactttgtagtaagcttcgaaatttgctacatgacaatgagctgtcagatttgaaagaagataaacctaggaaaagtttgtttaatgatgcaggaaacaagaagaattcaattaaaatgtggtttagccctcgaagtaagaaagtcagatatgttgtgagtaaagcttcagtgcaaacccagcctgcaataaaaaaagatgcaagtgctcagcaagactcatatgaatttgtttccccaagtcctcctgcagatgtttctgagagggctaaaaaggcttctgcaagatctggaaaaaagcaaaaaaagaaaactttagctgaaatcaaccaaaaatggaatttagaggcagaaaaagaagatggtgaatttgactccaaagaggaatctaagcaaaagctggtatccttctgtagccaaccatctgttatctccagtcctcagataaatggtgaaatagacttactagcaagtggctccttgacagaatctgaatgttttggaagtttaactgaagtctctttaccattggctgagcaaatagagtctccagacactaagagcaggaatgaagtagtgactcctgagaaggtctgcaaaaattatcttacatctaagaaatctttgccattagaaaataatggaaaacgtggccatcacaatagactttccagtcccatttctaagagatgtagaaccagcattctgagcaccagtggagattttgttaagcaaaccgtgccctcagaaaatataccattgcctgaatgttcttcaccaccttcatgcaaacgtaaagttggtggtacatcagggaggaaaaacagtaacatgtccgatgaattcattagtctttcaccaggtacaccaccttctacattaagtagttcaagttacaggcaagtgatgtctagtccctcagcaatgaagctgttgcccaatatggctgtgaaaagaaatcatagaggagagactttgctccatattgcttctattaagggcgacataccttctgttgaataccttttacaaaatggaagtgatccaaatgttaaagaccatgctggatggacaccattgcatgaagcttgcaatcatgggcacctgaaggtagtggaattattgctccagcataaggcattggtgaacaccaccgggtatcaaaatgactcaccacttcacgatgcagccaagaatgggcacgtggatatagtcaagctgttactttcctatggagcctccagaaatgctgttaatatatttggtctgcggcctgtcgattatacagatgatgaaagtatgaaatcgctattgctgctaccagagaagaatgaatcatcctcagctagccactgctcagtaatgaacactgggcagcgtagggatggacctcttgtacttataggcagtgggctgtcttcagaacaacagaaaatgctcagtgagcttgcagtaattcttaaggctaaaaaatatactgagtttgacagtacagtaactcatgttgttgttcctggtgatgcagttcaaagtaccttgaagtgtatgcttgggattctcaatggatgctggattctaaaatttgaatgggtaaaagcatgtctacgaagaaaagtatgtgaacaggaagaaaagtatgaaattcctgaaggtccacgcagaagcaggctcaacagagaacagctgttgccaaagctgtttgatggatgctacttctatttgtggggaaccttcaaacaccatccaaaggacaaccttattaagctcgtcactgcaggtgggggccagatcctcagtagaaagcccaagccagacagtgacgtgactcagaccatcaatacagtcgcataccatgcgagacccgattctgatcagcgcttctgcacacagtatatcatctatgaagatttgtgtaattatcacccagagagggttcggcagggcaaagtctggaaggctccttcgagctggtttatagactgtgtgatgtcctttgagttgcttcctcttgacagctgaatattataccagatgaacatttcaaattgaatttgcacggtttgtgagagcccagtcattgtactgtttttaatgttcacatttttacaaataggtagagtcattcatatttgtctttgaatcaaaaaaaa

SEQ ID NO: 423337 - DNA, 2395 bp, Homo sapiens
ccctctggcggcccgccgtcccagacgcgggaagagcttggccggtttcgagtcgctgacctgcagcttccctgtggtttcccgaggcctccttgcttcccgctctgcgaggagcctttcatccgaaggcgggacgatgccggataatcggcagccgaggaaccggcagccgaggatccgctccgggaacgagcctcgttccgcgcccgccatggaaccggatggtcgcggtgcctgggcccacagtcgcgccgcgctcgaccgcctggagaagctgctgcgctgctcgcgttgatttgaaagaagataaacctaggaaaagtttgtttaatgatgcaggaaacaagaagaattcaattaaaatgtggtttagccctcgaagtaagaaagtcagatatgttgtgagtaaagcttcagtgcaaacccagcctgcaataaaaaaagatgcaagtgctcagcaagactcatatgaatttgtttccccaagtcctcctgcagatgtttctgagagggctaaaaaggcttctgcaagatctggaaaaaagcaaaaaaagaaaactttagctgaaatcaaccaaaaatggaatttagaggcagaaaaagaagatggtgaatttgactccaaagaggaatctaagcaaaagctggtatccttctgtagccaaccatctgttatctccagtcctcagataaatggtgaaatagacttactagcaagtggctccttgacagaatctgaatgttttggaagtttaactgaagtctctttaccattggctgagcaaatagagtctccagacactaagagcaggaatgaagtagtgactcctgagaaggtctgcaaaaattatcttacatctaagaaatctttgccattagaaaataatggaaaacgtggccatcacaatagactttccagtcccatttctaagagatgtagaaccagcattctgagcaccagtggagattttgttaagcaaaccgtgccctcagaaaatataccattgcctgaatgttcttcaccaccttcatgcaaacgtaaagttggtggtacatcagggaggaaaaacagtaacatgtccgatgaattcattagtctttcaccaggtacaccaccttctacattaagtagttcaagttacaggcaagtgatgtctagtccctcagcaatgaagctgttgcccaatatggctgtgaaaagaaatcatagaggagagactttgctccatattgcttctattaagggcgacataccttctgttgaataccttttacaaaatggaagtgatccaaatgttaaagaccatgctggatggacaccattgcatgaagcttgcaatcatgggcacctgaaggtagtggaattattgctccagcataaggcattggtgaacaccaccgggtatcaaaatgactcaccacttcacgatgcagccaagaatgggcacgtggatatagtcaagctgttactttcctatggagcctccagaaatgctgttaatatatttggtctgcggcctgtcgattatacagatgatgaaagtatgaaatcgctattgctgctaccagagaagaatgaatcatcctcagctagccactgctcagtaatgaacactgggcagcgtagggatggacctcttgtacttataggcagtgggctgtcttcagaacaacagaaaatgctcagtgagcttgcagtaattcttaaggctaaaaaatatactgagtttgacagtacagtaactcatgttgttgttcctggtgatgcagttcaaagtaccttgaagtgtatgcttgggattctcaatggatgctggattctaaaatttgaatgggtaaaagcatgtctacgaagaaaagtatgtgaacaggaagaaaagtatgaaattcctgaaggtccacgcagaagcaggctcaacagagaacagctgttgccaaagctgtttgatggatgctacttctatttgtggggaaccttcaaacaccatccaaaggacaaccttattaagctcgtcactgcaggtgggggccagatcctcagtagaaagcccaagccagacagtgacgtgactcagaccatcaatacagtcgcataccatgcgagacccgattctgatcagcgcttctgcacacagtatatcatctatgaagatttgtgtaattatcacccagagagggttcggcagggcaaagtctggaaggctccttcgagctggtttatagactgtgtgatgtcctttgagttgcttcctcttgacagctgaatattataccagatgaacatttcaaattgaatttgcacggtttgtgagagcccagtcattgtactgtttttaatgttcacatttttacaaataggtagagtcattcatatttgtctttgaatcaaaaaaaa

SEQ ID NO: 423338 - DNA, 666 bp, Homo sapiens
aaaaatatatacctcattataaaatccaccgaattaaacaaatttaaataaattttaggggtaaaagcatgtctacgaagaaaagtatgtgaacaggaagaaaagtatgaaattcctgaaggtccacgcagaagcaggctcaacagagaacagctgcacttgattctgaaagatgatcacgatgagcagtaaaatccagaagttgccaaagctgtttgatggatgctacttctatttgtggggaaccttcaaacaccatccaaaggacaaccttattaagctcgtcactgcaggtgggggccagatcctcagtagaaagcccaagccagacagtgacgtgactcagaccatcaatacagtcgcataccatgcgagacccgattctgatcagcgcttctgcacacagtatatcatctatgaagatttgtgtaattatcacccagagagggttcggcagggcaaagtctggaaggctccttcgagctggtttatagactgtgtgatgtcctttgagttgcttcctcttgacagctgaatattataccagatgaacatttcaaattgaatttgcacggtttgtgagagcccagtcattgtactgtttttaatgttcacatttttacaaataggtagagtcattcatatttgtctttgaatcaaaaaaaa

SEQ ID NO: 423339 - DNA, 2647 bp, Homo sapiens
ccctctggcggcccgccgtcccagacgcgggaagagcttggccggtttcgagtcgctgacctgcagcttccctgtggtttcccgaggcctccttgcttcccgctctgcgaggagcctttcatccgaaggcgggacgatgccggataatcggcagccgaggaaccggcagccgaggatccgctccgggaacgagcctcgttccgcgcccgccatggaaccggatggtcgcggtgcctgggcccacagtcgcgccgcgctcgaccgcctggagaagctgctgcgctgctcgcgttgtactaacattctgagagagcctgtgtgtttaggaggatgtgagcacatcttctgtagtaattgtgtaagtgactgcattggaactggatgtccagtgtgttacaccccggcctggatacaagacttgaagataaatagacaactggacagcatgattcaactttgtagtaagcttcgaaatttgctacatgacaatgagctgtcagatttgaaagaagataaacctaggaaaagtttgtttaatgatgcaggaaacaagaagaattcaattaaaatgtggtttagccctcgaagtaagaaagtcagatatgttgtgagtaaagcttcagtgcaaacccagcctgcaataaaaaaagatgcaagtgctcagcaagactcatatgaatttgtttccccaagtcctcctgcagatgtttctgagagggctaaaaaggcttctgcaagatctggaaaaaagcaaaaaaagaaaactttagctgaaatcaaccaaaaatggaatttagaggcagaaaaagaagatggtgaatttgactccaaagaggaatctaagcaaaagctggtatccttctgtagccaaccatctgttatctccagtcctcagataaatggtgaaatagacttactagcaagtggctccttgacagaatctgaatgttttggaagtttaactgaagtctctttaccattggctgagcaaatagagtctccagacactaagagcaggaatgaagtagtgactcctgagaaggtctgcaaaaattatcttacatctaagaaatctttgccattagaaaataatggaaaacgtggccatcacaatagactttccagtcccatttctaagagatgtagaaccagcattctgagcaccagtggagattttgttaagcaaaccgtgccctcagaaaatataccattgcctgaatgttcttcaccaccttcatgcaaacgtaaagttggtggtacatcagggaggaaaaacagtaacatgtccgatgaattcattagtctttcaccaggtacaccaccttctacattaagtagttcaagttacaggcaagtgatgtctagtccctcagcaatgaagctgttgcccaatatggctgtgaaaagaaatcatagaggagagactttgctccatattgcttctattaagggcgacataccttctgttgaataccttttacaaaatggaagtgatccaaatgttaaagaccatgctggatggacaccattgcatgaagcttgcaatcatgggcacctgaaggtagtggaattattgctccagcataaggcattggtgaacaccaccgggtatcaaaatgactcaccacttcacgatgcagccaagaatgggcacgtggatatagtcaagctgttactttcctatggagcctccagaaatgctgttaatatatttggtctgcggcctgtcgattatacagatgatgaaagtatgaaatcgctattgctgctaccagagaagaatgaatcatcctcagctagccactgctcagtaatgaacactgggcagcgtagggatggacctcttgtacttataggcagtgggctgtcttcagaacaacagaaaatgctcagtgagcttgcagtaattcttaaggctaaaaaatatactgagtttgacagtacagtaactcatgttgttgttcctggtgatgcagttcaaagtaccttgaagtgtatgcttgggattctcaatggatgctggattctaaaatttgaatgggtaaaagcatgtctacgaagaaaagtatgtgaacaggaagaaaagtatgaaattcctgaaggtccacgcagaagcaggctcaacagagaacagctgcacttgattctgaaagatgatcacgatgagcagtaaaatccagaagttgccaaagctgtttgatggatgctacttctatttgtggggaaccttcaaacaccatccaaaggacaaccttattaagctcgtcactgcaggtgggggccagatcctcagtagaaagcccaagccagacagtgacgtgactcagaccatcaatacagtcgcataccatgcgagacccgattctgatcagcgcttctgcacacagtatatcatctatgaagatttgtgtaattatcacccagagagggttcggcagggcaaagtctggaaggctccttcgagctggtttatagactgtgtgatgtcctttgagttgcttcctcttgacagctgaatattataccagatgaacatttcaaattgaatttgcacggtttgtgagagcccagtcattgtactgtttttaatgttcacatttttacaaataggtagagtcattcatatttgtctttgaatcaaaaaaaa

SEQ ID NO: 423340 - DNA, 1305 bp, Homo sapiens
agctgcgggggcgcagtcgccgggccgcgggcggcgggacggacgaggccggggccccgggtggcacccggcaggcgggcaggcgggcgccatggagctgctctcggcgctgagcctgggcgaactggcgctcagcttctcgcgggtgccgctcttccccgtcttcgacctcagttacttcatcgtctccatcctctacctcaagtatgagccaggagcagtcgaactgtcccggcgccaccccatcgcgtcctggctgtgcgccatgctgcattgcttcgggagctacatcctggctgatctgctccttggggagccactgatcgattacttcagcaacaactccagcatcctgctggcctcagctgtctggtacttgattttcttctgccccctggacctcttctacaagtgtgtctgcttcctgcctgtgaaactcatcttcgtggccatgaaggaggtggtgcgagtccgcaagatcgcggtgggcatccatcacgcccatcaccactaccaccacgggtggttcgtcatgattgcaactgggtgggtcaaaggtaaataggatgatgacaatgaaaaatcatcccagtggagaacttttggttcagtggtactaccaggcaccccagctaggaaagccattgctccaggcacaggggcataaagactgcagtaggtgttcaaacctccctacaggtatcagccgatacctttagggtaaatgggaagattcttctagaaatgttactgtcaggggtacctaagacagtgatgatgatgacaaaagccagcattgccagagcaggttttctcacttgcagcactactgacatgtggggctggatcattctttgtggtgggggctgccttgtgcactataggatgttgaacagcacccctggcctccacccacgagatgccagtagcacacttgtccccagctgtgacaaagaaattgtctccagacattgctaaacgcctcctagagggcaaaatggctgcaggtgagaaccccttcttctctagagctctagctataggagttcttaacttttgtggaccatggcccttttgccagtgaagcctacagaccctttcgtgtgcagaaaatagagctagacatggtggctcatgcctgtagttctagctactcaggaggctgaggtgggaggatcacttcagcctaggagttcaacattacagtgagctatgattgtgccactgcactccagctgggcaacagagcaagagtctgtctctaaaaaattaaaattaaaaaataaagtaataatgaaaatgtta

SEQ ID NO: 423341 - DNA, 2650 bp, Homo sapiens
agctgcgggggcgcagtcgccgggccgcgggcggcgggacggacgaggccggggccccgggtggcacccggcaggcgggcaggcgggcgccatggagctgctctcggcgctgagcctgggcgaactggcgctcagcttctcgcgggtgccgctcttccccgtcttcgacctcagttacttcatcgtctccatcctctacctcaagtatgagccaggagcagtcgaactgtcccggcgccaccccatcgcgtcctggctgtgcgccatgctgcattgcttcgggagctacatcctggctgatctgctccttggggagccactgatcgattacttcagcaacaactccagcatcctgctggcctcagctgtctggtacttgattttcttctgccccctggacctcttctacaagtgtgtctgcttcctgcctgtgaaactcatcttcgtggccatgaaggaggtggtgcgagtccgcaagatcgcggtgggcatccatcacgcccatcaccactaccaccacgggtggttcgtcatgattgcaactgggtgggtcaaaggttctggtgtcgccctcatgtccaactttgagcagctgctccgaggggtctggaagccagagaccaacgagatcctgcacatgtctttccccaccaaggccagcctgtatggagccatcctcttcaccctccagcagacccgctggctcccagtgtccaaagccagcctcatcttcatcttcaccttgttcatggtgtcctgtaaggtgtttctgacagccacccactcacacagctccccctttgatgccctggagggctacatctgccccgtgctgtttggttcggcctgcgggggtgaccatcaccacgacaaccatggtgggtcccacagcggtggtgggccaggagctcagcattcggccatgcccgccaagtccaaggaggagttgagcgagggctccaggaagaagaaggccaagaaggcggattagggggtggcccaaggggcaccggggagaggacccggacccaggaccctctgagctgggaggcttcctgcgctcagatctatcctttcctggccttgacttccccatctgcaaatcagggtcattggctcaccctccagggctgacgtgggggttgagatatggggatgaggatgaagaacttttgtagaaatcggggttccctctttctctctgccaggaccccatagagtcacagcttttggaggggttcacagaatcctggcagcagctccagtcaagaatgtcactggttggcatgatattcttagttctatttttccttctttaaaattgcatcttgaccaggcacagtggctcatgcctataatcctagcactttgggaggccgaggcgggcagatcacctgaggtcaggagttcaagaccagcttggccaacatggtgaaaccccatctctaccaaaaatacaaaaattagccagacgtggtggtgcacgcctttaatcccagctactcgggaggctgaggcaggagaatcacatgaatccaggaggtggaggttgcagtgagctgagatcttcccactgcactccagcctggccaataagacctgtctccagcaagaccctgtctcaaaaaaaaaaaaaatggcatatggactcctgaagaacttcaagccatgttgagatccattcatttgatggacattttctaagtacctgtgagccaggtgctgccatttcaaagtctcttcttaccacgctcctcagtggctagacattttcacgtggccagaaagtcccgactcttgctgggcgtccctggacaagttgccttcctcctctgagcttggcgctccccatctgtatagtggagacccttggcccccctctgtacggaagggccgatgcgaagctgcagttaaaaaaggctcacatgctcctagcctcgtgcagtcaggaggggagaccaggacagttggaaattatgattgcaaatggctttgcattttagatcattcgtgtgtgtggatcagagaaacgcacaagttccctggcacaaaggaagccctcagtagacacgtctagggcaggcttgagagatcagatggcgtgaaaggcttgtgatctgttcgtctcaggctccccctaaaccaaagaaatggaaacagctggttggggttccacgatccagctctatcaaggggctctgagtgtgcacagttgggacctggatgtatcaggtctccctcaggctggagtccactggcactcattcagccattgaacaaacatacagatgcttacctgctctgtggtcagccttgtgctgctgctgggcgggccaggagcctgcttcagtgtgagcgaggtggatgatattatagctgaagggtccctcctggtcaccctcatctcagcctaggtcaccaggatgtctgagaggggtgggtgcatgggacgggcgtggccagtctcaggtgaggtttgggcccagacctcgttggagtcccagacgttgccaggctgttggaaaattgccttgttcctgtgatgcctgggagttaggtgggtcctggggaggtttcatcctcttgcttgtccacctcagctcggtgtggaggggcagccaataaatcattgtgaatgaaaaaaaaaaac

SEQ ID NO: 423342 - DNA, 1568 bp, Homo sapiens
agctgcgggggcgcagtcgccgggccgcgggcggcgggacggacgaggccggggccccgggtggcacccggcaggcgggcaggcgggcgccatggagctgctctcggcgctgagcctgggcgaactggcgctcagcttctcgcgggtgccgctcttccccgtcttcgacctcagttacttcatcgtctccatcctctacctcaagtatgagccaggagcagtcgaactgtcccggcgccaccccatcgcgtcctggctgtgcgccatgctgcattgcttcgggagctacatcctggctgatctgctccttggggagccactgatcgattacttcagcaacaactccagcatcctgctggcctcagctgtctggtacttgattttcttctgccccctggacctcttctacaagtgtgtctgcttcctgcctgtgaaactcatcttcgtggccatgaaggaggtggaggttgcagtgagctgagatcttcccactgcactccagcctggccaataagacctgtctccagcaagaccctgtctcaaaaaaaaaaaaaatggcatatggactcctgaagaacttcaagccatgttgagatccattcatttgatggacattttctaagtacctgtgagccaggtgctgccatttcaaagtctcttcttaccacgctcctcagtggctagacattttcacgtggccagaaagtcccgactcttgctgggcgtccctggacaagttgccttcctcctctgagcttggcgctccccatctgtatagtggagacccttggcccccctctgtacggaagggccgatgcgaagctgcagttaaaaaaggctcacatgctcctagcctcgtgcagtcaggaggggagaccaggacagttggaaattatgattgcaaatggctttgcattttagatcattcgtgtgtgtggatcagagaaacgcacaagttccctggcacaaaggaagccctcagtagacacgtctagggcaggcttgagagatcagatggcgtgaaaggcttgtgatctgttcgtctcaggctccccctaaaccaaagaaatggaaacagctggttggggttccacgatccagctctatcaaggggctctgagtgtgcacagttgggacctggatgtatcaggtctccctcaggctggagtccactggcactcattcagccattgaacaaacatacagatgcttacctgctctgtggtcagccttgtgctgctgctgggcgggccaggagcctgcttcagtgtgagcgaggtggatgatattatagctgaagggtccctcctggtcaccctcatctcagcctaggtcaccaggatgtctgagaggggtgggtgcatgggacgggcgtggccagtctcaggtgaggtttgggcccagacctcgttggagtcccagacgttgccaggctgttggaaaattgccttgttcctgtgatgcctgggagttaggtgggtcctggggaggtttcatcctcttgcttgtccacctcagctcggtgtggaggggcagccaataaatcattgtgaatgaaaaaaaaaaac

SEQ ID NO: 423343 - DNA, 877 bp, Homo sapiens
agctgcgggggcgcagtcgccgggccgcgggcggcgggacggacgaggccggggccccgggtggcacccggcaggcgggcaggcgggcgccatggagctgctctcggcgctgagcctgggcgaactggcgctcagcttctcgcgggtgccgctcttccccgtcttcgacctcagttacttcatcgtctccatcctctacctcaagtatgagccaggagcagtcgaactgtcccggcgccaccccatcgcgtcctggctgtgcgccatgctgcattgcttcgggagctacatcctggctgatctgctccttggggagccactgatcgattacttcagcaacaactccagcatcctgctggcctcagctgtctggtacttgattttcttctgccccctggacctcttctacaagtgtgtctgcttcctgcctgtgaaactcatcttcgtggccatgaaggaggtggtgcgagtccgcaagatcgcggtgggcatccatcacgcccatcaccactaccaccacgggtggttcgtcatgattgcaactgggtgggtcaaaggttctggtgtcgccctcatgtccaactttgagcagctgctccgaggggtctggaagccagagaccaacgagatcctgcacatgtctttccccaccaaggccagcctgtatggagccatcctcttcaccctccatctcaggtgaggtttgggcccagacctcgttggagtcccagacgttgccaggctgttggaaaattgccttgttcctgtgatgcctgggagttaggtgggtcctggggaggtttcatcctcttgcttgtccacctcagctcggtgtggaggggcagccaataaatcattgtgaatgaaaaaaaaaaac

SEQ ID NO: 423344 - DNA, 838 bp, Homo sapiens
ggacgcgtgggtccggacgcgtgggtcgcggacgcgtgggtcgaccagcgtcggggtggttcgtcatgattgcaactgggtgggtcaaaggtaaataggatgatgacaatgaaaaatcatcccagtggagaacttttggttcagtggtactaccaggcaccccagctaggaaagccattgctccaggcacaggggcataaagactgcagtaggtgttcaaacctccctacaggtatcagccgatacctttagggtaaatgggaagattcttctagaaatgttactgtcaggggtacctaagacagtgatgatgatgacaaaagccagcattgccagagcaggttttctcacttgcagcactactgacatgtggggctggatcattctttgtggtgggggctgccttgtgcactataggatgttgaacagcacccctggcctccacccacgagatgccagtagcacacttgtccccagctgtgacaaagaaattgtctccagacattgctaaacgcctcctagagggcaaaatggctgcaggtgagaaccccttcttctctagagctctagctataggagttcttaacttttgtggaccatggcccttttgccagtgaagcctacagaccctttcgtgtgcagaaaatagagctagacatggtggctcatgcctgtagttctagctactcaggaggctgaggtgggaggatcacttcagcctaggagttcaacattacagtgagctatgattgtgccactgcactccagctgggcaacagagcaagagtctgtctctaaaaaattaaaattaaaaaataaagtaataatgaaaatgtta

SEQ ID NO: 423345 - DNA, 1713 bp, Homo sapiens
caaagtctcttcttaccacgctcctcagtggctagacattttcacgtggccagaaagtcccgactcttgctgggcgtccctggacaagttgccttgaccctctgagctgggaggcttcctgcgctcagatctatcctttcctggccttgacttccccatctgcaaatcagggtcattggctcaccctccagggctgacgtgggggttgagatatggggatgaggatgaagaacttttgtagaaatcggggttccctctttctctctgccaggaccccatagagtcacagcttttggaggggttcacagaatcctggcagcagctccagtcaagaatgtcactggttggcatgatattcttagttctatttttccttctttaaaattgcatcttgaccaggcacagtggctcatgcctataatcctagcactttgggaggccgaggcgggcagatcacctgaggtcaggagttcaagaccagcttggccaacatggtgaaaccccatctctaccaaaaatacaaaaattagccagacgtggtggtgcacgcctttaatcccagctactcgggaggctgaggcaggagaatcacatgaatccaggaggtggaggttgcagtgagctgagatcttcccactgcactccagcctggccaataagacctgtctccagcaagaccctgtctcaaaaaaaaaaaaaatggcatatggactcctgaagaacttcaagccatgttgagatccattcatttgatggacattttctaagtacctgtgagccaggtgctgccatttcaaagtctcttcttaccacgctcctcagtggctagacattttcacgtggccagaaagtcccgactcttgctgggcgtccctggacaagttgccttcctcctctgagcttggcgctccccatctgtatagtggagacccttggcccccctctgtacggaagggccgatgcgaagctgcagttaaaaaaggctcacatgctcctagcctcgtgcagtcaggaggggagaccaggacagttggaaattatgattgcaaatggctttgcattttagatcattcgtgtgtgtggatcagagaaacgcacaagttccctggcacaaaggaagccctcagtagacacgtctagggcaggcttgagagatcagatggcgtgaaaggcttgtgatctgttcgtctcaggctccccctaaaccaaagaaatggaaacagctggttggggttccacgatccagctctatcaaggggctctgagtgtgcacagttgggacctggatgtatcaggtctccctcaggctggagtccactggcactcattcagccattgaacaaacatacagatgcttacctgctctgtggtcagccttgtgctgctgctgggcgggccaggagcctgcttcagtgtgagcgaggtggatgatattatagctgaagggtccctcctggtcaccctcatctcagcctaggtcaccaggatgtctgagaggggtgggtgcatgggacgggcgtggccagtctcaggtgaggtttgggcccagacctcgttggagtcccagacgttgccaggctgttggaaaattgccttgttcctgtgatgcctgggagttaggtgggtcctggggaggtttcatcctcttgcttgtccacctcagctcggtgtggaggggcagccaataaatcattgtgaatgaaaaaaaaaaac

SEQ ID NO: 423346 - DNA, 446 bp, Homo sapiens
cacagtctgcccatcccctggcactcactgttctctccccaaaaggtacttgattttcttctgccccctggacctcttctacaagtgtgtctgcttcctgcctgtgaaactcatcttcgtggccatgaaggaggtggtgcgagtccgcaagatcgcggtgggcatccatcacgcccatcaccactaccaccacgggtggttcgtcatgattgcaactgggtgggtcaaaggtaaataggatgatgacaatgaaaaatcatcccagtggagaacttttggttcagtggtactaccaggcaccccagctaggaaagccattgctccaggcacaggggcataaagactgcagtaggtgttcaaacctccctacaggtatcagccgatacctttagggtaaatgggaagattcttctagaaatgttactgtcaggggtacctaagacagt

SEQ ID NO: 423347 - DNA, 1393 bp, Homo sapiens
  misc_feature (1250)..(1250): n is a, c, g, or t
  misc_feature (1256)..(1257): n is a, c, g, or t
  misc_feature (1262)..(1262): n is a, c, g, or t
  misc_feature (1271)..(1271): n is a, c, g, or t
  misc_feature (1280)..(1280): n is a, c, g, or t
  misc_feature (1310)..(1310): n is a, c, g, or t
  misc_feature (1315)..(1315): n is a, c, g, or t
  misc_feature (1319)..(1319): n is a, c, g, or t
  misc_feature (1326)..(1326): n is a, c, g, or t
  misc_feature (1342)..(1342): n is a, c, g, or t
  misc_feature (1348)..(1348): n is a, c, g, or t
  misc_feature (1363)..(1363): n is a, c, g, or t
  misc_feature (1372)..(1372): n is a, c, g, or t
  misc_feature (1380)..(1380): n is a, c, g, or t
  misc_feature (1385)..(1385): n is a, c, g, or t
  misc_feature (1388)..(1388): n is a, c, g, or t
  misc_feature (1390)..(1390): n is a, c, g, or t
gagcacaccggactgcgttttttttccgaacgcccgcagcagggtcagaagggaggtggtcgccctccgtcgtggtctggcgtgtattccgagcgttggtgtctggcggtttccgagcgttggtgtctggcggtttccgaccgttggtgtctggcggtttccgaccgttggtgtctggcacgcgccaccctctcttgctttggttgcgccatgccgatgtaccagacaagaagacaagaaaatgatttgaggacagcttcaatcgcggtgtgaagaagaaagcagcaaaacgaccactgaaaacaacgccggtggcaaaatatccaaagaaagggtcccaagcggtacatcgtcatagccggaaacagtcagagccaccagccaatgatattttcaatgctgcgaaagctgccaaaagtgacatgcagcaccgagaagtccgcgtgaagtgcgtgaaggctctgaaagggctgtacggtaaccgggacctgaccgcacgcctggagctcttcactggccgcttcaaggactggatggtttccatgatcgtggacagagagtacagtgtggcagtggaggccgtcagattactgatacttatccttaagaacatggaaggggtgctgatggacgtggactgtgagagcgtctaccccattgtgtaggcctctaattgaggcctggcctctgctgtgggtgaatttctgtactggaaacttttctaccctgagtgcgagataagaacgatgggtggaagagagcaacgccagagcccaggcgcccagaggactttcttccagcttctgctgtccttctttgtggagagcaactccacgaccacgctgcttacttagtagacaacctgtgggactgtgcagggactcagctgaaggactgggagggtctgacaagcctgctgctggagaaggaccagagcacgtgccacatggagccagggccagggaccttccacctcctagggtgaaaccaggagagattgcttgcttcacttgtacaaggcaggaacggtggcatggcgtgggggaaacttggagttggaaggtggctaatctttgattctatgtttttgatcctcctggcactccagacctgggtgatatgcaggagagcacactgatagaaatccttgtgtccagtgcccagcaactcctgcctcagcctcccgagcagctgggactacaggtgcccgccaccacgcccgtctctactaaaaatacaaaaaattagcngggcgnngtggngggcgcctntagtcccanctactcgggaggctgaggcaggagaatggngtgancccnggaggcngagcttgcagtgagcngagatngcgccactgcactcnagcctgggngacagagngagantcngnctc

SEQ ID NO: 423348 - DNA, 790 bp, Homo sapiens
gagcacaccggactgcgttttttttccgaacgcccgcagcagggtcagaagggaggtggtcgccctccgtcgtggtctggcgtgtattccgagcgttggtgtctggcggtttccgagcgttggtgtctggcggtttccgaccgttggtgtctggcggtttccgaccgttggtgtctggcacgcgccaccctctcttgctttggttgcgccatgccgatgtaccagacaagaagacaagaaaatgatttgaggacagcttcaatcgcggtgtgaagaagaaagcagcaaaacgaccactgaaaacaacgccggtggcaaaatatccaaagaaagggtcccaagcggtacatcgtcatagccggaaacagtcagagccaccagccaatgatattttcaatgctgcgaaagctgccaaaagtgacatgcagcaccgagaagtccgcgtgaagtgcgtgaaggctctgaaagggctgtacggtaaccgggacctgaccgcacgcctggagctcttcactggccgcttcaaggactggatggtttccatgatcgtggacagagagtacagtgtggcagtggaggccgtcagattactgatacttatccttaatagagacggaatttcaccatggtggccatgactggtccccaactcctgacctcaggtgatctgcccgcctccacctcccaaagtgctgagattacaggcctgagccaccggcccagccatggcatctgttttaccagaagagatcaacacaccctctgaaacatgatacaggacactgatctg

SEQ ID NO: 423349 - DNA, 634 bp, Homo sapiens
taggaagtgggtgttgagctttaacgctcctggtcccaattcggcacgaggaagacaaatggagaaggatgggggtgtacactgtaggaaggagagcgatatttaatcagtaaccacttcctagggtattttaacatgccatcactaaatccccatgcacctccttccccagctccacgaccacgctgcttacttagtagacaacctgtgggactgtgcagggactcagctgaaggactgggagggtctgacaagcctgctgctggagaaggaccagagcacgtgccacatggagccagggccagggaccttccacctcctagggtgaaaccaggagagattgcttgcttcacttgtacaaggcaggaacggtggcatggcgtgggggaaacttggagttggaaggtggctaatctttgattctatgtttttgatcctcctggcactccagacctgggtgatatgcaggagagcacactgatagaaatccttgtgtccagtgcccagcaactccttcccagctacttgagaggctgaggtgggaggattgtttgaacccaggaggttgaggctacagtgagctgtgattgtgccactgcactccaggttgggtaatgcagcgagactgcgtctc

SEQ ID NO: 423350 - DNA, 399 bp, Homo sapiens
aaagcgaaccccagggtcaccacctcctaggttgacacacattgtcaccgctccattctttccacttaaaccttccccaccagcaccccagggcctgatttttatgacaagaagacaagaaaatgatttgaggacagcttcaatcgcggtgtgaagaagaaagcagcaaaacgaccactgaaaacaacgccgctgggagggtatatctggtctttgtcacttcgtcgtggacagaagcgtaaattaggacctttactctgaaatggacatttttgagaagagtgaaatgagttacactttacaagattctttttgttgctgtgttaagaatggaagagggttaagggcagaattagggagacaaattaggagtctacagcaagagacagtgttggcttg

SEQ ID NO: 423351 - DNA, 349 bp, Homo sapiens
gaggccagtgtctcagacctttgcccttccagggtcatctccctccacctgtcacagctgactcttccatctgtgcaggttgactgaggtcattcctgagttgcagtatgttgagagggtaatatttctgtcttctctaactccccatactcccttgtcttccactctccacttaggagttttttgtgagttatgtccttgttgcttttgcctctttttctttctagccttgattgtgccagaagacaatgtccctattcacacactctttctgcttttctgtgggccggtacaggtcccggttaccgtacagctctttcagagccttcacgcacttcacgcaaactct

SEQ ID NO: 423352 - DNA, 3031 bp, Homo sapiens
gagcacaccggactgcgttttttttccgaacgcccgcagcagggtcagaagggaggtggtcgccctccgtcgtggtctggcgtgtattccgagcgttggtgtctggcggtttccgagcgttggtgtctggcggtttccgaccgttggtgtctggcggtttccgaccgttggtgtctggcacgcgccaccctctcttgctttggttgcgccatgccgatgtaccaggtaaagccctatcacggggtctgcgcccctctccgtgtggagcccacctgcatgtactggctccccaacatgcacggcaggagcggcggcccagcacttggcactggccacttgcagacaagaagacaagaaaatgatttgaggacagcttcaatcgcggtgtgaagaagaaagcagcaaaacgaccactgaaaacaacgccggtggcaaaatatccaaagaaagggtcccaagcggtacatcgtcatagccggaaacagtcagagccaccagccaatgatattttcaatgctgcgaaagctgccaaaagtgacatgcagggatgtccttcctgagatccgtgctatctgcattgaggaaattgggtgttggatgcaaagctacagcacgtctttcctcaccgacagctatttaaaatatattggttggactctgcatgataagcaccgagaagtccgcgtgaagtgcgtgaaggctctgaaagggctgtacggtaaccgggacctgaccgcacgcctggagctcttcactggccgcttcaaggactggatggtttccatgatcgtggacagagagtacagtgtggcagtggaggccgtcagattactgatacttatccttaagaacatggaaggggtgctgatggacgtggactgtgagagcgtctaccccattgtgtaggcctctaattgaggcctggcctctgctgtgggtgaatttctgtactggaagtgagtggggctccttttacgtttctttaacaccaccctctcggtttctctcccacatgtgctgctgccctacttaaggcctccccatctccgtggaagtctctctggtgtctcttttcctctctcagctccttggggctttccttagctctgcacctccttttcctttatcatctccttgggccatctcctccgtctgtggtcatgattacacctccttgtttcctcctgtgctgagccctttccttgtgtccattccaccagacttttctaccctgagtgcgagataagaacgatgggtggaagagagcaacgccagagcccaggcgcccagaggactttcttccagcttctgctgtccttctttgtggagagcaaggtgacatacacagagagaactctggctgttgtgcataggacctacaagtgggctggggttggtggctcacgcctgtaagcccagcactttgggaggctgaggtgggaggatcctttgagcccaggagtttgagaccagcttgggcaacatagtgagaccctgtctctaccaaaaaaaaaaaaaaaaaagacaaatggagaaggatgggggtgtacactgtaggaaggagagcgatatttaatcagtaaccacttcctagggtattttaacatgccatcactaaatccccatgcacctccttccccagctccacgaccacgctgcttacttagtagacaacctgtgggactgtgcagggactcagctgaaggactgggagggtctgacaagcctgctgctggagaaggaccagagcacgtgccacatggagccagggccagggaccttccacctcctagggtgaaaccaggagagattgcttgcttcacttgtacaaggcaggaacggtggcatggcgtgggggaaacttggagttggaaggtgtgtggaatattttgatgagacgcatgtctgagccgcacttgaccactacctagattggctgatacacaatcagcagcaccacgatagccaccacctcctgcattcccccgatccgcctcagcctcccgagcagctgggactacaggtgcccgccaccacgcccggctaacttttttgtatttttggtagagacgggttttcaccgtgttggccaggatggtcttgatctcttgaccttgtgatccacctgcctcatcatcccaaagtgctgggattacaggcgtgagccactgcgcccagcatgttagacaatttttaattcatcctctctgtgctgttgttttctcagctgtgaaaggaatattctggtggggacaaggttacagagttgctgagagggtctcatgacatgaaggtactggccttggcacagtgcctgggggggcggggactccgcacatgcctgtgatgtcacagttactgtcagttcacagcgaaccttccctccttttcctgttgactttcccacactcctgtaaccatccctccctcccttcttcctctctctctctctcactcactgcaccccagcctgggcaataagagtgaaactccatctccaaaaaaaaaaaaaaaaggtacatgaaacatatgaagcaaaaagtgaaagtccccattcttttcctttttccagaggtgatttttgtggccaatctggtttcattccctcccagacacttttctaggcatctatgtgcctctattcacatataaacaaaataggagttttcctgtgcttcccttaaatggcatatgtatctttcactcttttttttcacctagtggatctttaataccttaaaagctcaacctgggcttggtgcggtggctcatacgtgtaatcccaggcctttgggaggccaaggtgggaggatcacttgagctcaggagttccagaccattccaaagcaaaaacaaaaggattttgagatcagtgtggacaacttagcaaaacaccatctctaaaaaaaaaaaaaaagggtacttgaaccttttgaggcaaaaagtgaaggtccccattctttcctttttcccagaggttgtttttggtggcccaaatctggttttcatttcccctcccagaaacactttt

SEQ ID NO: 423353 - DNA, 2636 bp, Homo sapiens
tttgactttccaatggaagagatttattgatggatggtaatgcaggtgctaaggggcagccaaaggatccttctcatcatgagtactgctgtgatccttttttttttttaagtatgaagacagctgttcattgtttctgacatctcagagtcctcagtagaggggacacccaagctagaatgagggatcggagaggggagtctggacgctcagtaggggcgagtagagtgtggttggtcttatttccattctcttggttttccctcctcaccagcaccgagaagtccgcgtgaagtgcgtgaaggctctgaaagggctgtacggtaaccgggacctgaccgcacgcctggagctcttcactggccgcttcaaggactggatggtttccatgatcgtggacagagagtacagtgtggcagtggaggccgtcagattactgatacttatccttaagaacatggaaggggtgctgatggacgtggactgtgagagcgtctaccccattgtgtaggcctctaattgaggcctggcctctgctgtgggtgaatttctgtactggaagtgagtggggctccttttacgtttctttaacaccaccctctcggtttctctcccacatgtgctgctgccctacttaaggcctccccatctccgtggaagtctctctggtgtctcttttcctctctcagctccttggggctttccttagctctgcacctccttttcctttatcatctccttgggccatctcctccgtctgtggtcatgattacacctccttgtttcctcctgtgctgagccctttccttgtgtccattccaccagacttttctaccctgagtgcgagataagaacgatgggtggaagagagcaacgccagagcccaggcgcccagaggactttcttccagcttctgctgtccttctttgtggagagcaaggtgacatacacagagagaactctggctgttgtgcataggacctacaagtgggctggggttggtggctcacgcctgtaagcccagcactttgggaggctgaggtgggaggatcctttgagcccaggagtttgagaccagcttgggcaacatagtgagaccctgtctctaccaaaaaaaaaaaaaaaaaagacaaatggagaaggatgggggtgtacactgtaggaaggagagcgatatttaatcagtaaccacttcctagggtattttaacatgccatcactaaatccccatgcacctccttccccagctccacgaccacgctgcttacttagtagacaacctgtgggactgtgcagggactcagctgaaggactgggagggtctgacaagcctgctgctggagaaggaccagagcacgtgccacatggagccagggccagggaccttccacctcctagggtgaaaccaggagagattgcttgcttcacttgtacaaggcaggaacggtggcatggcgtgggggaaacttggagttggaaggtgtgtggaatattttgatgagacgcatgtctgagccgcacttgaccactacctagattggctgatacacaatcagcagcaccacgatagccaccacctcctgcattcccccgatccgcctcagcctcccgagcagctgggactacaggtgcccgccaccacgcccggctaacttttttgtatttttggtagagacgggttttcaccgtgttggccaggatggtcttgatctcttgaccttgtgatccacctgcctcatcatcccaaagtgctgggattacaggcgtgagccactgcgcccagcatgttagacaatttttaattcatcctctctgtgctgttgttttctcagctgtgaaaggaatattctggtggggacaaggttacagagttgctgagagggtctcatgacatgaaggtactggccttggcacagtgcctgggggggcggggactccgcacatgcctgtgatgtcacagttactgtcagttcacagcgaaccttccctccttttcctgttgactttcccacactcctgtaaccatccctccctcccttcttcctctctctctctctcactcactgcaccccagcctgggcaataagagtgaaactccatctccaaaaaaaaaaaaaaaaggtacatgaaacatatgaagcaaaaagtgaaagtccccattcttttcctttttccagaggtgatttttgtggccaatctggtttcattccctcccagacacttttctaggcatctatgtgcctctattcacatataaacaaaataggagttttcctgtgcttcccttaaatggcatatgtatctttcactcttttttttcacctagtggatctttaataccttaaaagctcaacctgggcttggtgcggtggctcatacgtgtaatcccaggcctttgggaggccaaggtgggaggatcacttgagctcaggagttccagaccattccaaagcaaaaacaaaaggattttgagatcagtgtggacaacttagcaaaacaccatctctaaaaaaaaaaaaaaagggtacttgaaccttttgaggcaaaaagtgaaggtccccattctttcctttttcccagaggttgtttttggtggcccaaatctggttttcatttcccctcccagaaacactttt

SEQ ID NO: 423354 - DNA, 2470 bp, Homo sapiens
gaggccagtgtctcagacctttgcccttccagggtcatctccctccacctgtcacagctgactcttccatctgtgcaggttgactgaggtcattcctgagttgcagtatgttgagagggtaatatttctgtcttctctaactccccatactcccttgtcttccactctccacttaggagttttttgtgagttatgtccttgttgcttttgcctctttttctttctagccttgattgtgccagaagacaatgtccctattcacacactctttctgcttttctgtgggcgaacatggaaggggtgctgatggacgtggactgtgagagcgtctaccccattgtgtaggcctctaattgaggcctggcctctgctgtgggtgaatttctgtactggaagtgagtggggctccttttacgtttctttaacaccaccctctcggtttctctcccacatgtgctgctgccctacttaaggcctccccatctccgtggaagtctctctggtgtctcttttcctctctcagctccttggggctttccttagctctgcacctccttttcctttatcatctccttgggccatctcctccgtctgtggtcatgattacacctccttgtttcctcctgtgctgagccctttccttgtgtccattccaccagacttttctaccctgagtgcgagataagaacgatgggtggaagagagcaacgccagagcccaggcgcccagaggactttcttccagcttctgctgtccttctttgtggagagcaaggtgacatacacagagagaactctggctgttgtgcataggacctacaagtgggctggggttggtggctcacgcctgtaagcccagcactttgggaggctgaggtgggaggatcctttgagcccaggagtttgagaccagcttgggcaacatagtgagaccctgtctctaccaaaaaaaaaaaaaaaaaagacaaatggagaaggatgggggtgtacactgtaggaaggagagcgatatttaatcagtaaccacttcctagggtattttaacatgccatcactaaatccccatgcacctccttccccagctccacgaccacgctgcttacttagtagacaacctgtgggactgtgcagggactcagctgaaggactgggagggtctgacaagcctgctgctggagaaggaccagagcacgtgccacatggagccagggccagggaccttccacctcctagggtgaaaccaggagagattgcttgcttcacttgtacaaggcaggaacggtggcatggcgtgggggaaacttggagttggaaggtgtgtggaatattttgatgagacgcatgtctgagccgcacttgaccactacctagattggctgatacacaatcagcagcaccacgatagccaccacctcctgcattcccccgatccgcctcagcctcccgagcagctgggactacaggtgcccgccaccacgcccggctaacttttttgtatttttggtagagacgggttttcaccgtgttggccaggatggtcttgatctcttgaccttgtgatccacctgcctcatcatcccaaagtgctgggattacaggcgtgagccactgcgcccagcatgttagacaatttttaattcatcctctctgtgctgttgttttctcagctgtgaaaggaatattctggtggggacaaggttacagagttgctgagagggtctcatgacatgaaggtactggccttggcacagtgcctgggggggcggggactccgcacatgcctgtgatgtcacagttactgtcagttcacagcgaaccttccctccttttcctgttgactttcccacactcctgtaaccatccctccctcccttcttcctctctctctctctcactcactgcaccccagcctgggcaataagagtgaaactccatctccaaaaaaaaaaaaaaaaggtacatgaaacatatgaagcaaaaagtgaaagtccccattcttttcctttttccagaggtgatttttgtggccaatctggtttcattccctcccagacacttttctaggcatctatgtgcctctattcacatataaacaaaataggagttttcctgtgcttcccttaaatggcatatgtatctttcactcttttttttcacctagtggatctttaataccttaaaagctcaacctgggcttggtgcggtggctcatacgtgtaatcccaggcctttgggaggccaaggtgggaggatcacttgagctcaggagttccagaccattccaaagcaaaaacaaaaggattttgagatcagtgtggacaacttagcaaaacaccatctctaaaaaaaaaaaaaaagggtacttgaaccttttgaggcaaaaagtgaaggtccccattctttcctttttcccagaggttgtttttggtggcccaaatctggttttcatttcccctcccagaaacactttt

SEQ ID NO: 423355 - DNA, 2790 bp, Homo sapiens
gagcacaccggactgcgttttttttccgaacgcccgcagcagggtcagaagggaggtggtcgccctccgtcgtggtctggcgtgtattccgagcgttggtgtctggcggtttccgagcgttggtgtctggcggtttccgaccgttggtgtctggcggtttccgaccgttggtgtctggcacgcgccaccctctcttgctttggttgcgccatgccgatgtaccagacaagaagacaagaaaatgatttgaggacagcttcaatcgcggtgtgaagaagaaagcagcaaaacgaccactgaaaacaacgccggtggcaaaatatccaaagaaagggtcccaagcggtacatcgtcatagccggaaacagtcagagccaccagccaatgatattttcaatgctgcgaaagctgccaaaagtgacatgcagcaccgagaagtccgcgtgaagtgcgtgaaggctctgaaagggctgtacggtaaccgggacctgaccgcacgcctggagctcttcactggccgcttcaaggactggatggtttccatgatcgtggacagagagtacagtgtggcagtggaggccgtcagattactgatacttatccttaagaacatggaaggggtgctgatggacgtggactgtgagagcgtctaccccattgtgtaggcctctaattgaggcctggcctctgctgtgggtgaatttctgtactggaagtgagtggggctccttttacgtttctttaacaccaccctctcggtttctctcccacatgtgctgctgccctacttaaggcctccccatctccgtggaagtctctctggtgtctcttttcctctctcagctccttggggctttccttagctctgcacctccttttcctttatcatctccttgggccatctcctccgtctgtggtcatgattacacctccttgtttcctcctgtgctgagccctttccttgtgtccattccaccagacttttctaccctgagtgcgagataagaacgatgggtggaagagagcaacgccagagcccaggcgcccagaggactttcttccagcttctgctgtccttctttgtggagagcaaggtgacatacacagagagaactctggctgttgtgcataggacctacaagtgggctggggttggtggctcacgcctgtaagcccagcactttgggaggctgaggtgggaggatcctttgagcccaggagtttgagaccagcttgggcaacatagtgagaccctgtctctaccaaaaaaaaaaaaaaaaaagacaaatggagaaggatgggggtgtacactgtaggaaggagagcgatatttaatcagtaaccacttcctagggtattttaacatgccatcactaaatccccatgcacctccttccccagctccacgaccacgctgcttacttagtagacaacctgtgggactgtgcagggactcagctgaaggactgggagggtctgacaagcctgctgctggagaaggaccagagcacgtgccacatggagccagggccagggaccttccacctcctagggtgaaaccaggagagattgcttgcttcacttgtacaaggcaggaacggtggcatggcgtgggggaaacttggagttggaaggtgtgtggaatattttgatgagacgcatgtctgagccgcacttgaccactacctagattggctgatacacaatcagcagcaccacgatagccaccacctcctgcattcccccgatccgcctcagcctcccgagcagctgggactacaggtgcccgccaccacgcccggctaacttttttgtatttttggtagagacgggttttcaccgtgttggccaggatggtcttgatctcttgaccttgtgatccacctgcctcatcatcccaaagtgctgggattacaggcgtgagccactgcgcccagcatgttagacaatttttaattcatcctctctgtgctgttgttttctcagctgtgaaaggaatattctggtggggacaaggttacagagttgctgagagggtctcatgacatgaaggtactggccttggcacagtgcctgggggggcggggactccgcacatgcctgtgatgtcacagttactgtcagttcacagcgaaccttccctccttttcctgttgactttcccacactcctgtaaccatccctccctcccttcttcctctctctctctctcactcactgcaccccagcctgggcaataagagtgaaactccatctccaaaaaaaaaaaaaaaaggtacatgaaacatatgaagcaaaaagtgaaagtccccattcttttcctttttccagaggtgatttttgtggccaatctggtttcattccctcccagacacttttctaggcatctatgtgcctctattcacatataaacaaaataggagttttcctgtgcttcccttaaatggcatatgtatctttcactcttttttttcacctagtggatctttaataccttaaaagctcaacctgggcttggtgcggtggctcatacgtgtaatcccaggcctttgggaggccaaggtgggaggatcacttgagctcaggagttccagaccattccaaagcaaaaacaaaaggattttgagatcagtgtggacaacttagcaaaacaccatctctaaaaaaaaaaaaaaagggtacttgaaccttttgaggcaaaaagtgaaggtccccattctttcctttttcccagaggttgtttttggtggcccaaatctggttttcatttcccctcccagaaacactttt

SEQ ID NO: 423356 - DNA, 2795 bp, Homo sapiens
aaagcgaaccccagggtcaccacctcctaggttgacacacattgtcaccgctccattctttccacttaaaccttccccaccagcaccccagggcctgatttttatgacaagaagacaagaaaatgatttgaggacagcttcaatcgcggtgtgaagaagaaagcagcaaaacgaccactgaaaacaacgccggtggcaaaatatccaaagaaagggtcccaagcggtacatcgtcatagccggaaacagtcagagccaccagccaatgatattttcaatgctgcgaaagctgccaaaagtgacatgcagggatgtccttcctgagatccgtgctatctgcattgaggaaattgggtgttggatgcaaagctacagcacgtctttcctcaccgacagctatttaaaatatattggttggactctgcatgataagcaccgagaagtccgcgtgaagtgcgtgaaggctctgaaagggctgtacggtaaccgggacctgaccgcacgcctggagctcttcactggccgcttcaaggactggatggtttccatgatcgtggacagagagtacagtgtggcagtggaggccgtcagattactgatacttatccttaagaacatggaaggggtgctgatggacgtggactgtgagagcgtctaccccattgtgtaggcctctaattgaggcctggcctctgctgtgggtgaatttctgtactggaagtgagtggggctccttttacgtttctttaacaccaccctctcggtttctctcccacatgtgctgctgccctacttaaggcctccccatctccgtggaagtctctctggtgtctcttttcctctctcagctccttggggctttccttagctctgcacctccttttcctttatcatctccttgggccatctcctccgtctgtggtcatgattacacctccttgtttcctcctgtgctgagccctttccttgtgtccattccaccagacttttctaccctgagtgcgagataagaacgatgggtggaagagagcaacgccagagcccaggcgcccagaggactttcttccagcttctgctgtccttctttgtggagagcaaggtgacatacacagagagaactctggctgttgtgcataggacctacaagtgggctggggttggtggctcacgcctgtaagcccagcactttgggaggctgaggtgggaggatcctttgagcccaggagtttgagaccagcttgggcaacatagtgagaccctgtctctaccaaaaaaaaaaaaaaaaaagacaaatggagaaggatgggggtgtacactgtaggaaggagagcgatatttaatcagtaaccacttcctagggtattttaacatgccatcactaaatccccatgcacctccttccccagctccacgaccacgctgcttacttagtagacaacctgtgggactgtgcagggactcagctgaaggactgggagggtctgacaagcctgctgctggagaaggaccagagcacgtgccacatggagccagggccagggaccttccacctcctagggtgaaaccaggagagattgcttgcttcacttgtacaaggcaggaacggtggcatggcgtgggggaaacttggagttggaaggtgtgtggaatattttgatgagacgcatgtctgagccgcacttgaccactacctagattggctgatacacaatcagcagcaccacgatagccaccacctcctgcattcccccgatccgcctcagcctcccgagcagctgggactacaggtgcccgccaccacgcccggctaacttttttgtatttttggtagagacgggttttcaccgtgttggccaggatggtcttgatctcttgaccttgtgatccacctgcctcatcatcccaaagtgctgggattacaggcgtgagccactgcgcccagcatgttagacaatttttaattcatcctctctgtgctgttgttttctcagctgtgaaaggaatattctggtggggacaaggttacagagttgctgagagggtctcatgacatgaaggtactggccttggcacagtgcctgggggggcggggactccgcacatgcctgtgatgtcacagttactgtcagttcacagcgaaccttccctccttttcctgttgactttcccacactcctgtaaccatccctccctcccttcttcctctctctctctctcactcactgcaccccagcctgggcaataagagtgaaactccatctccaaaaaaaaaaaaaaaaggtacatgaaacatatgaagcaaaaagtgaaagtccccattcttttcctttttccagaggtgatttttgtggccaatctggtttcattccctcccagacacttttctaggcatctatgtgcctctattcacatataaacaaaataggagttttcctgtgcttcccttaaatggcatatgtatctttcactcttttttttcacctagtggatctttaataccttaaaagctcaacctgggcttggtgcggtggctcatacgtgtaatcccaggcctttgggaggccaaggtgggaggatcacttgagctcaggagttccagaccattccaaagcaaaaacaaaaggattttgagatcagtgtggacaacttagcaaaacaccatctctaaaaaaaaaaaaaaagggtacttgaaccttttgaggcaaaaagtgaaggtccccattctttcctttttcccagaggttgtttttggtggcccaaatctggttttcatttcccctcccagaaacactttt

SEQ ID NO: 423357 - DNA, 2344 bp, Homo sapiens
tcgaactcgggatccgttccaggttaaggatagaaagaagcagaagccacacggacatggatctcactcacctcctaattctagattgggagtcaaaggcaaaggaggatgtagagttaaagaagacactaataatacactctttctgcttttctgtgggcgaacatggaaggggtgctgatggacgtggactgtgagagcgtctaccccattgtgtaggcctctaattgaggcctggcctctgctgtgggtgaatttctgtactggaagtgagtggggctccttttacgtttctttaacaccaccctctcggtttctctcccacatgtgctgctgccctacttaaggcctccccatctccgtggaagtctctctggtgtctcttttcctctctcagctccttggggctttccttagctctgcacctccttttcctttatcatctccttgggccatctcctccgtctgtggtcatgattacacctccttgtttcctcctgtgctgagccctttccttgtgtccattccaccagacttttctaccctgagtgcgagataagaacgatgggtggaagagagcaacgccagagcccaggcgcccagaggactttcttccagcttctgctgtccttctttgtggagagcaaggtgacatacacagagagaactctggctgttgtgcataggacctacaagtgggctggggttggtggctcacgcctgtaagcccagcactttgggaggctgaggtgggaggatcctttgagcccaggagtttgagaccagcttgggcaacatagtgagaccctgtctctaccaaaaaaaaaaaaaaaaaagacaaatggagaaggatgggggtgtacactgtaggaaggagagcgatatttaatcagtaaccacttcctagggtattttaacatgccatcactaaatccccatgcacctccttccccagctccacgaccacgctgcttacttagtagacaacctgtgggactgtgcagggactcagctgaaggactgggagggtctgacaagcctgctgctggagaaggaccagagcacgtgccacatggagccagggccagggaccttccacctcctagggtgaaaccaggagagattgcttgcttcacttgtacaaggcaggaacggtggcatggcgtgggggaaacttggagttggaaggtgtgtggaatattttgatgagacgcatgtctgagccgcacttgaccactacctagattggctgatacacaatcagcagcaccacgatagccaccacctcctgcattcccccgatccgcctcagcctcccgagcagctgggactacaggtgcccgccaccacgcccggctaacttttttgtatttttggtagagacgggttttcaccgtgttggccaggatggtcttgatctcttgaccttgtgatccacctgcctcatcatcccaaagtgctgggattacaggcgtgagccactgcgcccagcatgttagacaatttttaattcatcctctctgtgctgttgttttctcagctgtgaaaggaatattctggtggggacaaggttacagagttgctgagagggtctcatgacatgaaggtactggccttggcacagtgcctgggggggcggggactccgcacatgcctgtgatgtcacagttactgtcagttcacagcgaaccttccctccttttcctgttgactttcccacactcctgtaaccatccctccctcccttcttcctctctctctctctcactcactgcaccccagcctgggcaataagagtgaaactccatctccaaaaaaaaaaaaaaaaggtacatgaaacatatgaagcaaaaagtgaaagtccccattcttttcctttttccagaggtgatttttgtggccaatctggtttcattccctcccagacacttttctaggcatctatgtgcctctattcacatataaacaaaataggagttttcctgtgcttcccttaaatggcatatgtatctttcactcttttttttcacctagtggatctttaataccttaaaagctcaacctgggcttggtgcggtggctcatacgtgtaatcccaggcctttgggaggccaaggtgggaggatcacttgagctcaggagttccagaccattccaaagcaaaaacaaaaggattttgagatcagtgtggacaacttagcaaaacaccatctctaaaaaaaaaaaaaaagggtacttgaaccttttgaggcaaaaagtgaaggtccccattctttcctttttcccagaggttgtttttggtggcccaaatctggttttcatttcccctcccagaaacactttt

SEQ ID NO: 423358 - DNA, 2486 bp, Homo sapiens
gagcacaccggactgcgttttttttccgaacgcccgcagcagggtcagaagggaggtggtcgccctccgtcgtggtctggcgtgtattccgagcgttggtgtctggcggtttccgagcgttggtgtctggcggtttccgaccgttggtgtctggcggtttccgaccgttggtgtctggcacgcgccaccctctcttgctttggttgcgccatgccgatgtaccagacaagaagacaagaaaatgatttgaggacagcttcaatcgcggtgtgaagaagaaagcagcaaaacgaccactgaaaacaacgccggtggcaaaatatccaaagaaagggtcccaagcggtacatcgtcatagccggaaacagtcagagccaccagccaatgatattttcaatgctgcgaaagctgccaaaagtgacatgcagggatgtccttcctgagatccgtgctatctgcattgaggaaattgggtgttggatgcaaagctacagcacgtctttcctcaccgacagctatttaaaatatattggttggactctgcatgataagcaccgagaagtccgcgtgaagtgcgtgaaggctctgaaagggctgtacggtaaccgggacctgaccgcacgcctggagctcttcactggccgcttcaaggactggatggtttccatgatcgtggacagagagtacagtgtggcagtggaggccgtcagattactgatacttatccttaagaacatggaaggggtgctgatggacgtggactgtgagagcgtctaccccattgtgtaggcctctaattgaggcctggcctctgctgtgggtgaatttctgtactggaagtgagtggggctccttttacgtttctttaacaccaccctctcggtttctctcccacatgtgctgctgccctacttaaggcctccccatctccgtggaagtctctctggtgtctcttttcctctctcagctccttggggctttccttagctctgcacctccttttcctttatcatctccttgggccatctcctccgtctgtggtcatgattacacctccttgtttcctcctgtgctgagccctttccttgtgtccattccaccagacttttctaccctgagtgcgagataagaacgatgggtggaagagagcaacgccagagcccaggcgcccagaggactttcttccagcttctgctgtccttctttgtggagagcaaggtgacatacacagagagaactctggctgttgtgcataggacctacaagtgggctggggttggtggctcacgcctgtaagcccagcactttgggaggctgaggtgggaggatcctttgagcccaggagtttgagaccagcttgggcaacatagtgagaccctgtctctaccaaaaaaaaaaaaaaaaaagacaaatggagaaggatgggggtgtacactgtaggaaggagagcgatatttaatcagtaaccacttcctagggtattttaacatgccatcactaaatccccatgcacctccttccccagctccacgaccacgctgcttacttagtagacaacctgtgggactgtgcagggactcagctgaaggactgggagggtctgacaagcctgctgctggagaaggaccagagcacgtgccacatggagccagggccagggaccttccacctcctagggtgaaaccaggagagattgcttgcttcacttgtacaaggcaggaacggtggcatggcgtgggggaaacttggagttggaaggtgtgtggaatattttgatgagacgcatgtctgagccgcacttgaccactacctagattggctgatacacaatcagcagcaccacgatagccaccacctcctgcattcccccgatccgcctcagcctcccgagcagctgggactacaggtgcccgccaccacgcccggctaacttttttgtatttttggtagagacgggttttcaccgtgttggccaggatggtcttgatctcttgaccttgtgatccacctgcctcatcatcccaaagtgctgggattacaggcgtgagccactgcgcccagcatgttagacaatttttaattcatcctctctgtgctgttgttttctcagctgtgaaaggaatattctggtggggacaaggttacagagttgctgagagggtctcatgacatgaaggtactggccttggcacagtgcctgggggggcggggactccgcacatgcctgtgatgtcacagttactgtcagttcacagcgaaccttccctccttttcctgttgactttcccacactcctgtaaccatccctccctcccttcttcctctctctctctctcactcacgcacacgcacacacacacacacacactccattcactgtctccatgactctggagtaaactaacgtctcgagttgccattggaagccccattgtcctcattttgttttgttttgtttgtttgagacggggtctcgctctgtcccc

SEQ ID NO: 423359 - DNA, 2264 bp, Homo sapiens
tttgactttccaatggaagagatttattgatggatggtaatgcaggtgctaaggggcagccaaaggatccttctcatcatgagtactgctgtgatccttttttttttttaagtatgaagacagctgttcattgtttctgacatctcagagtcctcagtagaggggacacccaagctagaatgagggatcggagaggggagtctggacgctcagtaggggcgagtagagtgtggttggtcttatttccattctcttggttttccctcctcaccagcaccgagaagtccgcgtgaagtgcgtgaaggctctgaaagggctgtacggtaaccgggacctgaccgcacgcctggagctcttcactggccgcttcaaggactggatggtttccatgatcgtggacagagagtacagtgtggcagtggaggccgtcagattactgatacttatccttaaacttttctaccctgagtgcgagataagaacgatgggtggaagagagcaacgccagagcccaggcgcccagaggactttcttccagcttctgctgtccttctttgtggagagcaaggtgacatacacagagagaactctggctgttgtgcataggacctacaagtgggctggggttggtggctcacgcctgtaagcccagcactttgggaggctgaggtgggaggatcctttgagcccaggagtttgagaccagcttgggcaacatagtgagaccctgtctctaccaaaaaaaaaaaaaaaaaagacaaatggagaaggatgggggtgtacactgtaggaaggagagcgatatttaatcagtaaccacttcctagggtattttaacatgccatcactaaatccccatgcacctccttccccagctccacgaccacgctgcttacttagtagacaacctgtgggactgtgcagggactcagctgaaggactgggagggtctgacaagcctgctgctggagaaggaccagagcacgtgccacatggagccagggccagggaccttccacctcctagggtgaaaccaggagagattgcttgcttcacttgtacaaggcaggaacggtggcatggcgtgggggaaacttggagttggaaggtgtgtggaatattttgatgagacgcatgtctgagccgcacttgaccactacctagattggctgatacacaatcagcagcaccacgatagccaccacctcctgcattcccccgatccgcctcagcctcccgagcagctgggactacaggtgcccgccaccacgcccggctaacttttttgtatttttggtagagacgggttttcaccgtgttggccaggatggtcttgatctcttgaccttgtgatccacctgcctcatcatcccaaagtgctgggattacaggcgtgagccactgcgcccagcatgttagacaatttttaattcatcctctctgtgctgttgttttctcagctgtgaaaggaatattctggtggggacaaggttacagagttgctgagagggtctcatgacatgaaggtactggccttggcacagtgcctgggggggcggggactccgcacatgcctgtgatgtcacagttactgtcagttcacagcgaaccttccctccttttcctgttgactttcccacactcctgtaaccatccctccctcccttcttcctctctctctctctcactcactgcaccccagcctgggcaataagagtgaaactccatctccaaaaaaaaaaaaaaaaggtacatgaaacatatgaagcaaaaagtgaaagtccccattcttttcctttttccagaggtgatttttgtggccaatctggtttcattccctcccagacacttttctaggcatctatgtgcctctattcacatataaacaaaataggagttttcctgtgcttcccttaaatggcatatgtatctttcactcttttttttcacctagtggatctttaataccttaaaagctcaacctgggcttggtgcggtggctcatacgtgtaatcccaggcctttgggaggccaaggtgggaggatcacttgagctcaggagttccagaccattccaaagcaaaaacaaaaggattttgagatcagtgtggacaacttagcaaaacaccatctctaaaaaaaaaaaaaaagggtacttgaaccttttgaggcaaaaagtgaaggtccccattctttcctttttcccagaggttgtttttggtggcccaaatctggttttcatttcccctcccagaaacactttt

SEQ ID NO: 423360 - DNA, 1970 bp, Homo sapiens
gaggccagtgtctcagacctttgcccttccagggtcatctccctccacctgtcacagctgactcttccatctgtgcaggttgactgaggtcattcctgagttgcagtatgttgagagggtaatatttctgtcttctctaactccccatactcccttgtcttccactctccacttaggagttttttgtgagttatgtccttgttgcttttgcctctttttctttctagccttgattgtgccagaagacaatgtccctattcacacactctttctgcttttctgtgggcgaacatggaaggggtgctgatggacgtggactgtgagagcgtctaccccattgtgtaggcctctaattgaggcctggcctctgctgaggtgggaggatcctttgagcccaggagtttgagaccagcttgggcaacatagtgagaccctgtctctaccaaaaaaaaaaaaaaaaaagacaaatggagaaggatgggggtgtacactgtaggaaggagagcgatatttaatcagtaaccacttcctagggtattttaacatgccatcactaaatccccatgcacctccttccccagctccacgaccacgctgcttacttagtagacaacctgtgggactgtgcagggactcagctgaaggactgggagggtctgacaagcctgctgctggagaaggaccagagcacgtgccacatggagccagggccagggaccttccacctcctagggtgaaaccaggagagattgcttgcttcacttgtacaaggcaggaacggtggcatggcgtgggggaaacttggagttggaaggtgtgtggaatattttgatgagacgcatgtctgagccgcacttgaccactacctagattggctgatacacaatcagcagcaccacgatagccaccacctcctgcattcccccgatccgcctcagcctcccgagcagctgggactacaggtgcccgccaccacgcccggctaacttttttgtatttttggtagagacgggttttcaccgtgttggccaggatggtcttgatctcttgaccttgtgatccacctgcctcatcatcccaaagtgctgggattacaggcgtgagccactgcgcccagcatgttagacaatttttaattcatcctctctgtgctgttgttttctcagctgtgaaaggaatattctggtggggacaaggttacagagttgctgagagggtctcatgacatgaaggtactggccttggcacagtgcctgggggggcggggactccgcacatgcctgtgatgtcacagttactgtcagttcacagcgaaccttccctccttttcctgttgactttcccacactcctgtaaccatccctccctcccttcttcctctctctctctctcactcactgcaccccagcctgggcaataagagtgaaactccatctccaaaaaaaaaaaaaaaaggtacatgaaacatatgaagcaaaaagtgaaagtccccattcttttcctttttccagaggtgatttttgtggccaatctggtttcattccctcccagacacttttctaggcatctatgtgcctctattcacatataaacaaaataggagttttcctgtgcttcccttaaatggcatatgtatctttcactcttttttttcacctagtggatctttaataccttaaaagctcaacctgggcttggtgcggtggctcatacgtgtaatcccaggcctttgggaggccaaggtgggaggatcacttgagctcaggagttccagaccattccaaagcaaaaacaaaaggattttgagatcagtgtggacaacttagcaaaacaccatctctaaaaaaaaaaaaaaagggtacttgaaccttttgaggcaaaaagtgaaggtccccattctttcctttttcccagaggttgtttttggtggcccaaatctggttttcatttcccctcccagaaacactttt

SEQ ID NO: 423361 - DNA, 1384 bp, Homo sapiens
gagcacaccggactgcgttttttttccgaacgcccgcagcagggtcagaagggaggtggtcgccctccgtcgtggtctggcgtgtattccgagcgttggtgtctggcggtttccgagcgttggtgtctggcggtttccgaccgttggtgtctggcggtttccgaccgttggtgtctggcacgcgccaccctctcttgctttggttgcgccatgccgatgtaccagacaagaagacaagaaaatgatttgaggacagcttcaatcgcggtgtgaagaagaaagcagcaaaacgaccactgaaaacaacgccggtggcaaaatatccaaagaaagggtcccaagcggtacatcgtcatagccggaaacagtcagagccaccagccaatgatattttcaatgctgcgaaagctgccaaaagtgacatgcagggatgtccttcctgagatccgtgctatctgcattgaggaaattgggtgttggatgcaaagctacagcacgtctttcctcaccgacagctatttaaaatatattggttggactctgcatgataagcaccgagaagtccgcgtgaagtgcgtgaaggctctgaaagggctgtacggtaaccgggacctgaccgcacgcctggagctcttcactggccgcttcaaggactggatggtttccatgatcgtggacagagagtacagtgtggcagtggaggccgtcagattactgatacttatccttaagaacatggaaggggtgctgatggacgtggactgtgagagcgtctaccccattgtgtaggcctctaattgaggcctggcctctgctgtgggtgaatttctgtactggaagtgagtggggctccttttacgtttctttaacaccaccctctcggtttctctcccacatgtgctgctgccctacttaaggcctccccatctccgtggaagtctctctggtgtctcttttcctctctcagctccttggggctttccttagctctgcacctccttttcctttatcatctccttgggccatctcctccgtctgtggtcatgattacacctccttgtttcctcctgtgctgagccctttccttgtgtccattccaccagacttttctaccctgagtgcgagataagaacgatgggtggaagagagcaacgccagagcccaggcgcccagaggactttcttccagcttctgctgtccttctttgtggagagcaagctggagtgcaatggcgcgatcttggcccactgcaacctccacctcccagattgaagcaattctcctgcctcagcctcccgagtagctgggaccacaggaaatggattgcatgattgttttgaccatttttcttcatgctaaataaagtatgcagacttaagcattg

SEQ ID NO: 423362 - DNA, 941 bp, Homo sapiens
agccactgcactccagcctgggcaacagggcaagaccctgtctcaaaaaaaaaaaaatttaatttgaacacttctgttttgtgcagttttctctgttatattttactttttaaaaagaaaaagcagctgggcgcggtggctcacgcctgtaatcccagcactttgggaggccaaggtgggtagatcacctgatgtcaggagttcgagaccagcctgaccaacatggagaaacctcgtctctactaaaaacacaaaaaattagccgggcgtggtggcgcatgcctgtaatcccagctacttgggaggctgaggcaggagaatcgcttgaacctaggaggcagaggttgcagtgagctgagatcgcaccactgcaccccagcctgggcaataagagtgaaactccatctccaaaaaaaaaaaaaaaaggtacatgaaacatatgaagcaaaaagtgaaagtccccattcttttcctttttccagaggtgatttttgtggccaatctggtttcattccctcccagacacttttctaggcatctatgtgcctctattcacatataaacaaaataggagttttcctgtgcttcccttaaatggcatatgtatctttcactcttttttttcacctagtggatctttaataccttaaaagctcaacctgggcttggtgcggtggctcatacgtgtaatcccaggcctttgggaggccaaggtgggaggatcacttgagctcaggagttccagaccattccaaagcaaaaacaaaaggattttgagatcagtgtggacaacttagcaaaacaccatctctaaaaaaaaaaaaaaagggtacttgaaccttttgaggcaaaaagtgaaggtccccattctttcctttttcccagaggttgtttttggtggcccaaatctggttttcatttcccctcccagaaacactttt

SEQ ID NO: 423363 - DNA, 1094 bp, Homo sapiens
gcaatggcgcagtcttggctcatggcagcctccacctcctgggtttaagtgattcgcctcagcctcccgagcagctgggactacaggtgcccgccaccacgcccggctaacttttttgtatttttggtagagacgggttttcaccgtgttggccaggatggtcttgatctcttgaccttgtgatccacctgcctcatcatcccaaagtgctgggattacaggcgtgagccactgcgcccagcatgttagacaatttttaattcatcctctctgtgctgttgttttctcagctgtgaaaggaatattctggtggggacaaggttacagagttgctgagagggtctcatgacatgaaggtactggccttggcacagtgcctgggggggcggggactccgcacatgcctgtgatgtcacagttactgtcagttcacagcgaaccttccctccttttcctgttgactttcccacactcctgtaaccatccctccctcccttcttcctctctctctctctcactcactgcaccccagcctgggcaataagagtgaaactccatctccaaaaaaaaaaaaaaaaggtacatgaaacatatgaagcaaaaagtgaaagtccccattcttttcctttttccagaggtgatttttgtggccaatctggtttcattccctcccagacacttttctaggcatctatgtgcctctattcacatataaacaaaataggagttttcctgtgcttcccttaaatggcatatgtatctttcactcttttttttcacctagtggatctttaataccttaaaagctcaacctgggcttggtgcggtggctcatacgtgtaatcccaggcctttgggaggccaaggtgggaggatcacttgagctcaggagttccagaccattccaaagcaaaaacaaaaggattttgagatcagtgtggacaacttagcaaaacaccatctctaaaaaaaaaaaaaaagggtacttgaaccttttgaggcaaaaagtgaaggtccccattctttcctttttcccagaggttgtttttggtggcccaaatctggttttcatttcccctcccagaaacactttt

SEQ ID NO: 423364 - DNA, 806 bp, Homo sapiens
tccagaggtgatttttgtggccaatctggtttcattccctcccagacacttttctaggcatctatgtgcctctattcacatataaacaaaataggagttttcctgtgcttcccttaaatggcatatgtatctttcactcttttttttcacctagtggatctttaataccttaaaagctcaacctgggctgggcgcggtggctcacgcctgtaatcccagcactttgggaggccaaggtgggtagatcacctgatgtcaggagttcgagaccagcaaaaaaaaaaaaaaaaggtacatgaaacatatgaagcaaaaagtgaaagtccccattcttttcctttttccagaggtgatttttgtggccaatctggtttcattccctcccagacacttttctaggcatctatgtgcctctattcacatataaacaaaataggagttttcctgtgcttcccttaaatggcatatgtatctttcactcttttttttcacctagtggatctttaataccttaaaagctcaacctgggcttggtgcggtggctcatacgtgtaatcccaggcctttgggaggccaaggtgggaggatcacttgagctcaggagttccagaccattccaaagcaaaaacaaaaggattttgagatcagtgtggacaacttagcaaaacaccatctctaaaaaaaaaaaaaaagggtacttgaaccttttgaggcaaaaagtgaaggtccccattctttcctttttcccagaggttgtttttggtggcccaaatctggttttcatttcccctcccagaaacactttt

SEQ ID NO: 423365 - DNA, 1004 bp, Homo sapiens
gagcacaccggactgcgttttttttccgaacgcccgcagcagggtcagaagggaggtggtcgccctccgtcgtggtctggcgtgtattccgagcgttggtgtctggcggtttccgagcgttggtgtctggcggtttccgaccgttggtgtctggcggtttccgaccgttggtgtctggcacgcgccaccctctcttgctttggttgcgccatgccgatgtaccagacaagaagacaagaaaatgatttgaggacagcttcaatcgcggtgtgaagaagaaagcagcaaaacgaccactgaaaacaacgccggtggcaaaatatccaaagaaagggtcccaagcggtacatcgtcatagccggaaacagtcagagccaccagccaatgatattttcaatgctgcgaaagctgccaaaagtgacatgcagggatgtccttcctgagatccgtgctatctgcattgaggaaattgggtgttggatgcaaagctacagcacgtctttcctcaccgacagctatttaaaatatattggttggactctgcatgataagcaccgagaagtccgcgtgaagtgcgtgaaggctctgaaagggctgtacggtaaccgggacctgaccgcacgcctggagctcttcactggccgcttcaaggactggatggtttccatgatcgtggacagagagtacagtgtggcagtggaggccgtcagattactgatacttatccttaagaacatggaaggggtgctgatggacgtggactgtgagagcgtctaccccattgtgtaggcctctaattgaggcctggcctctgctgtgggtgaatttctgtactggaagtgagtggggctccttttacgtttctttaacaccaccctctcggtttctctcccacatgtgctgctgccctacttaaggcctccccatctccgtggaagtctctctggttcttcaaataacctggagagcgggcaggaggcctctgtgaaggctggcttgcgcct

SEQ ID NO: 423366 - DNA, 753 bp, Homo sapiens
ttctcacctcctcattggcccagtttccttatctgtcaatgagagtagctgtaaaatatggttaatgtgaggaccaaacaggtcaattagggaaaagcagtgtctctgccagcacctgacacttctttttttttttttttgagccaagatcgtgtcactgcactctagcctaggtgatacagcgagactcagtctcaaaaaataaaggaagaaaaagaaaccaggtgactgttgtgcccgtctcttgtccccgatctttctcccaatcctgaggtccatcagctggaaggacatatccatccggaggcctccccaagtgtggtgggagaaatccatcccctctctgacactccccccgcctttccctcccgacacccagtccccgggagatcaaaatttaacctggtgttatctaggctggagcctgaagagcctggtgggaagtggaggacggagaggaggggcatggacccagaaagtagcaggaagtcttcagagacccttatttttaaattatttatttttgtttgttttgtttttttgtttccctcgacaacaagagccaaactccgtctcaaaaaaaaaaattaaataacagcaagcaactgcatgcacgtctgggggcggtgtccggggtgagaaaggccccgccagcaatccatcccacaatcagcgatggctgagggggtctggacctcgcgggacggggctgcacgcccccaagcaaatgcacagcgcggctaaattggattc

SEQ ID NO: 423367 - DNA, 916 bp, Homo sapiens
tacacttcagcctgggtgacagaatgagactccgtcttaaaaaaaaaaaaaaaaaaaatttaaataaaatgcatgcaatgtggtccaggcgtggtggtgcatgcctgtaaccccagcactttgggagatagaggcagatcacttgaggtcaggagttcaagaccagcctggccaacatggcaaaaccccatctctactaaaatccaaaaattagtcgggtatggcagtgcacgcctgtagtcccagatactcagaaggctgaggcaggagaatcatttgaacctgggaagtggaggttgcagtgagccaagatcgtgtcactgcactctagcctaggtgatacagcgagactcagtctcaaaaaataaaggaagaaaaagaaaccaggtgactgttgtgcccgtctcttgtccccgatctttctcccaatcctgaggtccatcagctggaaggacatatccatccggaggcctccccaagtgtggtgggagaaatccatcccctctctgacactccccccgcctttccctcccgacacccagtccccgggagatcaaaatttaacctggtgttatctaggctggagcctgaagagcctggtgggaagtggaggacggagaggaggggcatggacccagaaagtagcaggaagtcttcagagacccttatttttaaattatttatttttgtttgttttgtttttttgtttccctcgacaacaagagccaaactccgtctcaaaaaaaaaaattaaataacagcaagcaactgcatgcacgtctgggggcggtgtccggggtgagaaaggccccgccagcaatccatcccacaatcagcgatggctgagggggtctggacctcgcgggacggggctgcacgcccccaagcaaatgcacagcgcggctaaattggattc

SEQ ID NO: 423368 - DNA, 673 bp, Homo sapiens
gagcacaccggactgcgttttttttccgaacgcccgcagcagggtcagaagggaggtggtcgccctccgtcgtggtctggcgtgtattccgagcgttggtgtctggcggtttccgagcgttggtgtctggcggtttccgaccgttggtgtctggcggtttccgaccgttggtgtctggcacgcgccaccctctcttgctttggttgcgccatgccgatgtaccagacaagaagacaagaaaatgatttgaggacagcttcaatcgcggtgtgaagaagaaagcagcaaaacgaccactgaaaacaacgccgcaccgagaagtccgcgtgaagtgcgtgaaggctctgaaagggctgtacggtaaccgggacctgaccgcacgcctggagctcttcactggccgcttcaaggactggatggtttccatgatcgtggacagagagtacagtgtggcagtggaggccgtcagattactgatacttatccttaatagagacggaatttcaccatggtggccatgactggtccccaactcctgacctcaggtgatctgcccgcctccacctcccaaagtgctgagattacaggcctgagccaccggcccagccatggcatctgttttaccagaagagatcaacacaccctctgaaacatgatacaggacactgatctg

SEQ ID NO: 423369 - DNA, 2914 bp, Homo sapiens
gagcacaccggactgcgttttttttccgaacgcccgcagcagggtcagaagggaggtggtcgccctccgtcgtggtctggcgtgtattccgagcgttggtgtctggcggtttccgagcgttggtgtctggcggtttccgaccgttggtgtctggcggtttccgaccgttggtgtctggcacgcgccaccctctcttgctttggttgcgccatgccgatgtaccagacaagaagacaagaaaatgatttgaggacagcttcaatcgcggtgtgaagaagaaagcagcaaaacgaccactgaaaacaacgccggtggcaaaatatccaaagaaagggtcccaagcggtacatcgtcatagccggaaacagtcagagccaccagccaatgatattttcaatgctgcgaaagctgccaaaagtgacatgcagggatgtccttcctgagatccgtgctatctgcattgaggaaattgggtgttggatgcaaagctacagcacgtctttcctcaccgacagctatttaaaatatattggttggactctgcatgataagcaccgagaagtccgcgtgaagtgcgtgaaggctctgaaagggctgtacggtaaccgggacctgaccgcacgcctggagctcttcactggccgcttcaaggactggatggtttccatgatcgtggacagagagtacagtgtggcagtggaggccgtcagattactgatacttatccttaagaacatggaaggggtgctgatggacgtggactgtgagagcgtctaccccattgtgtaggcctctaattgaggcctggcctctgctgtgggtgaatttctgtactggaagtgagtggggctccttttacgtttctttaacaccaccctctcggtttctctcccacatgtgctgctgccctacttaaggcctccccatctccgtggaagtctctctggtgtctcttttcctctctcagctccttggggctttccttagctctgcacctccttttcctttatcatctccttgggccatctcctccgtctgtggtcatgattacacctccttgtttcctcctgtgctgagccctttccttgtgtccattccaccagacttttctaccctgagtgcgagataagaacgatgggtggaagagagcaacgccagagcccaggcgcccagaggactttcttccagcttctgctgtccttctttgtggagagcaaggtgacatacacagagagaactctggctgttgtgcataggacctacaagtgggctggggttggtggctcacgcctgtaagcccagcactttgggaggctgaggtgggaggatcctttgagcccaggagtttgagaccagcttgggcaacatagtgagaccctgtctctaccaaaaaaaaaaaaaaaaaagacaaatggagaaggatgggggtgtacactgtaggaaggagagcgatatttaatcagtaaccacttcctagggtattttaacatgccatcactaaatccccatgcacctccttccccagctccacgaccacgctgcttacttagtagacaacctgtgggactgtgcagggactcagctgaaggactgggagggtctgacaagcctgctgctggagaaggaccagagcacgtgccacatggagccagggccagggaccttccacctcctagggtgaaaccaggagagattgcttgcttcacttgtacaaggcaggaacggtggcatggcgtgggggaaacttggagttggaaggtgtgtggaatattttgatgagacgcatgtctgagccgcacttgaccactacctagattggctgatacacaatcagcagcaccacgatagccaccacctcctgcattcccccgatccgcctcagcctcccgagcagctgggactacaggtgcccgccaccacgcccggctaacttttttgtatttttggtagagacgggttttcaccgtgttggccaggatggtcttgatctcttgaccttgtgatccacctgcctcatcatcccaaagtgctgggattacaggcgtgagccactgcgcccagcatgttagacaatttttaattcatcctctctgtgctgttgttttctcagctgtgaaaggaatattctggtggggacaaggttacagagttgctgagagggtctcatgacatgaaggtactggccttggcacagtgcctgggggggcggggactccgcacatgcctgtgatgtcacagttactgtcagttcacagcgaaccttccctccttttcctgttgactttcccacactcctgtaaccatccctccctcccttcttcctctctctctctctcactcactgcaccccagcctgggcaataagagtgaaactccatctccaaaaaaaaaaaaaaaaggtacatgaaacatatgaagcaaaaagtgaaagtccccattcttttcctttttccagaggtgatttttgtggccaatctggtttcattccctcccagacacttttctaggcatctatgtgcctctattcacatataaacaaaataggagttttcctgtgcttcccttaaatggcatatgtatctttcactcttttttttcacctagtggatctttaataccttaaaagctcaacctgggcttggtgcggtggctcatacgtgtaatcccaggcctttgggaggccaaggtgggaggatcacttgagctcaggagttccagaccattccaaagcaaaaacaaaaggattttgagatcagtgtggacaacttagcaaaacaccatctctaaaaaaaaaaaaaaagggtacttgaaccttttgaggcaaaaagtgaaggtccccattctttcctttttcccagaggttgtttttggtggcccaaatctggttttcatttcccctcccagaaacactttt

SEQ ID NO: 423370 - DNA, 3958 bp, Homo sapiens
gagcacaccggactgcgttttttttccgaacgcccgcagcagggtcagaagggaggtggtcgccctccgtcgtggtctggcgtgtattccgagcgttggtgtctggcggtttccgagcgttggtgtctggcggtttccgaccgttggtgtctggcggtttccgaccgttggtgtctggcacgcgccaccctctcttgctttggttgcgccatgccgatgtaccagacaagaagacaagaaaatgatttgaggacagcttcaatcgcggtgtgaagaagaaagcagcaaaacgaccactgaaaacaacgccggtggcaaaatatccaaagaaagggtcccaagcggtacatcgtcatagccggaaacagtcagagccaccagccaatgatattttcaatgctgcgaaagctgccaaaagtgacatgcagggatgtccttcctgagatccgtgctatctgcattgaggaaattgggtgttggatgcaaagctacagcacgtctttcctcaccgacagctatttaaaatatattggttggactctgcatgataagcaccgagaagtccgcgtgaagtgcgtgaaggctctgaaagggctgtacggtaaccgggacctgaccgcacgcctggagctcttcactggccgcttcaaggactggatggtttccatgatcgtggacagagagtacagtgtggcagtggaggccgtcagattactgatacttatccttaagaacatggaaggggtgctgatggacgtggactgtgagagcgtctaccccattgtgtaggcctctaattgaggcctggcctctgctgtgggtgaatttctgtactggaagtgagtggggctccttttacgtttctttaacaccaccctctcggtttctctcccacatgtgctgctgccctacttaaggcctccccatctccgtggaagtctctctggtgtctcttttcctctctcagctccttggggctttccttagctctgcacctccttttcctttatcatctccttgggccatctcctccgtctgtggtcatgattacacctccttgtttcctcctgtgctgagccctttccttgtgtccattccaccagacttttctaccctgagtgcgagataagaacgatgggtggaagagagcaacgccagagcccaggcgcccagaggactttcttccagcttctgctgtccttctttgtggagagcaaggtgacatacacagagagaactctggctgttgtgcataggacctacaagtgggctggggttggtggctcacgcctgtaagcccagcactttgggaggctgaggtgggaggatcctttgagcccaggagtttgagaccagcttgggcaacatagtgagaccctgtctctaccaaaaaaaaaaaaaaaaaagacaaatggagaaggatgggggtgtacactgtaggaaggagagcgatatttaatcagtaaccacttcctagggtattttaacatgccatcactaaatccccatgcacctccttccccagctccacgaccacgctgcttacttagtagacaacctgtgggactgtgcagggactcagctgaaggactgggagggtctgacaagcctgctgctggagaaggaccagagcacgtgccacatggagccagggccagggaccttccacctcctagggtgaaaccaggagagattgcttgcttcacttgtacaaggcaggaacggtggcatggcgtgggggaaacttggagttggaaggtgtgtggaatattttgatgagacgcatgtctgagccgcacttgaccactacctagattggctgatacacaatcagcagcaccacgatagccaccacctcctgcattcccccgatccgcctcagcctcccgagcagctgggactacaggtgcccgccaccacgcccggctaacttttttgtatttttggtagagacgggttttcaccgtgttggccaggatggtcttgatctcttgaccttgtgatccacctgcctcatcatcccaaagtgctgggattacaggcgtgagccactgcgcccagcatgttagacaatttttaattcatcctctctgtgctgttgttttctcagctgtgaaaggaatattctggtggggacaaggttacagagttgctgagagggtctcatgacatgaaggtactggccttggcacagtgcctgggggggcggggactccgcacatgcctgtgatgtcacagttactgtcagttcacagcgaaccttccctccttttcctgttgactttcccacactcctgtaaccatccctccctcccttcttcctctctctctctctcactcacgcacacgcacacacacacacacacatccagcctaggcaacaagagtgaaactctgtcttaaaaaaaaaaaattaaaaattatattcgggccgggcttggtggctcaatcctataataccagcaccttgggaggccaaggcaggaggatcacttgaggccaggagttcaagaccggcctgggcaacataatgagaacccatctttaccaaaaaaataaaattacattaaaaattagctgggcacggtgacgtctgcctgaggtcacattcaagaagctgatgtgggaggatcgcttgagcccaggaattggaggctgcagtgagctaagatcataccactgcacttcagcctgggcgtcagagtgagaccctgtttctaaaataataataattttaaaaaatgatatttatggttgcattgggaaaagatcaatctattaatatatgtgaagacatttttggcctaaaagttatatatattttttccttctgattttaaaagaaatgaggccaggcgtggtggtgcatgcctgtaaccccagcactttgggagatagaggcaggtggatcccttgagcttaggaatttgagactaggctgggcaacatagtgagacctcatctctaaaattaaaaaaataaaagccaccagaaaaaaacctaaaaacatgccaagtgacatcagtctttgatgaaaatggcagcagaagagtgatgccatgggtgggggtgggaaatgctatttcagcagagagggagctgtcacggaagacaccatgtggctgggcacggtggctcacacctgtaatcccaacacgttgggaggccaaggtgggcagatcacttgaggtcaggagttcaagaccagcctggccaacatggcaaaaccccatctctactaaaatccaaaaattagtcgggtatggcagtgcacgcctgtagtcccagatactcagaaggctgaggcaggagaatcatttgaacctgggaagtggaggttgcagtgagccaagatcgtgtcactgcactctagcctaggtgatacagcgagactcagtctcaaaaaataaaggaagaaaaagaaaccaggtgactgttgtgcccgtctcttgtccccgatctttctcccaatcctgaggtccatcagctggaaggacatatccatccggaggcctccccaagtgtggtgggagaaatccatcccctctctgacactccccccgcctttccctcccgacacccagtccccgggagatcaaaatttaacctggtgttatctaggctggagcctgaagagcctggtgggaagtggaggacggagaggaggggcatggacccagaaagtagcaggaagtcttcagagacccttatttttaaattatttatttttgtttgttttgtttttttgtttccctcgacaacaagagccaaactccgtctcaaaaaaaaaaattaaataacagcaagcaactgcatgcacgtctgggggcggtgtccggggtgagaaaggccccgccagcaatccatcccacaatcagcgatggctgagggggtctggacctcgcgggacggggctgcacgcccccaagcaaatgcacagcgcggctaaattggattc

SEQ ID NO: 423371 - DNA, 2861 bp, Homo sapiens
gagcacaccggactgcgttttttttccgaacgcccgcagcagggtcagaagggaggtggtcgccctccgtcgtggtctggcgtgtattccgagcgttggtgtctggcggtttccgagcgttggtgtctggcggtttccgaccgttggtgtctggcggtttccgaccgttggtgtctggcacgcgccaccctctcttgctttggttgcgccatgccgatgtaccagacaagaagacaagaaaatgatttgaggacagcttcaatcgcggtgtgaagaagaaagcagcaaaacgaccactgaaaacaacgccggtggcaaaatatccaaagaaagggtcccaagcggtacatcgtcatagccggaaacagtcagagccaccagccaatgatattttcaatgctgcgaaagctgccaaaagtgacatgcagggatgtccttcctgagatccgtgctatctgcattgaggaaattgggtgttggatgcaaagctacagcacgtctttcctcaccgacagctatttgcgtgaaggctctgaaagggctgtacggtaaccgggacctgaccgcacgcctggagctcttcactggccgcttcaaggactggatggtttccatgatcgtggacagagagtacagtgtggcagtggaggccgtcagattactgatacttatccttaagaacatggaaggggtgctgatggacgtggactgtgagagcgtctaccccattgtgtaggcctctaattgaggcctggcctctgctgtgggtgaatttctgtactggaagtgagtggggctccttttacgtttctttaacaccaccctctcggtttctctcccacatgtgctgctgccctacttaaggcctccccatctccgtggaagtctctctggtgtctcttttcctctctcagctccttggggctttccttagctctgcacctccttttcctttatcatctccttgggccatctcctccgtctgtggtcatgattacacctccttgtttcctcctgtgctgagccctttccttgtgtccattccaccagacttttctaccctgagtgcgagataagaacgatgggtggaagagagcaacgccagagcccaggcgcccagaggactttcttccagcttctgctgtccttctttgtggagagcaaggtgacatacacagagagaactctggctgttgtgcataggacctacaagtgggctggggttggtggctcacgcctgtaagcccagcactttgggaggctgaggtgggaggatcctttgagcccaggagtttgagaccagcttgggcaacatagtgagaccctgtctctaccaaaaaaaaaaaaaaaaaagacaaatggagaaggatgggggtgtacactgtaggaaggagagcgatatttaatcagtaaccacttcctagggtattttaacatgccatcactaaatccccatgcacctccttccccagctccacgaccacgctgcttacttagtagacaacctgtgggactgtgcagggactcagctgaaggactgggagggtctgacaagcctgctgctggagaaggaccagagcacgtgccacatggagccagggccagggaccttccacctcctagggtgaaaccaggagagattgcttgcttcacttgtacaaggcaggaacggtggcatggcgtgggggaaacttggagttggaaggtgtgtggaatattttgatgagacgcatgtctgagccgcacttgaccactacctagattggctgatacacaatcagcagcaccacgatagccaccacctcctgcattcccccgatccgcctcagcctcccgagcagctgggactacaggtgcccgccaccacgcccggctaacttttttgtatttttggtagagacgggttttcaccgtgttggccaggatggtcttgatctcttgaccttgtgatccacctgcctcatcatcccaaagtgctgggattacaggcgtgagccactgcgcccagcatgttagacaatttttaattcatcctctctgtgctgttgttttctcagctgtgaaaggaatattctggtggggacaaggttacagagttgctgagagggtctcatgacatgaaggtactggccttggcacagtgcctgggggggcggggactccgcacatgcctgtgatgtcacagttactgtcagttcacagcgaaccttccctccttttcctgttgactttcccacactcctgtaaccatccctccctcccttcttcctctctctctctctcactcactgcaccccagcctgggcaataagagtgaaactccatctccaaaaaaaaaaaaaaaaggtacatgaaacatatgaagcaaaaagtgaaagtccccattcttttcctttttccagaggtgatttttgtggccaatctggtttcattccctcccagacacttttctaggcatctatgtgcctctattcacatataaacaaaataggagttttcctgtgcttcccttaaatggcatatgtatctttcactcttttttttcacctagtggatctttaataccttaaaagctcaacctgggcttggtgcggtggctcatacgtgtaatcccaggcctttgggaggccaaggtgggaggatcacttgagctcaggagttccagaccattccaaagcaaaaacaaaaggattttgagatcagtgtggacaacttagcaaaacaccatctctaaaaaaaaaaaaaaagggtacttgaaccttttgaggcaaaaagtgaaggtccccattctttcctttttcccagaggttgtttttggtggcccaaatctggttttcatttcccctcccagaaacactttt

SEQ ID NO: 423372 - DNA, 2650 bp, Homo sapiens
gagcacaccggactgcgttttttttccgaacgcccgcagcagggtcagaagggaggtggtcgccctccgtcgtggtctggcgtgtattccgagcgttggtgtctggcggtttccgagcgttggtgtctggcggtttccgaccgttggtgtctggcggtttccgaccgttggtgtctggcacgcgccaccctctcttgctttggttgcgccatgccgatgtaccagacaagaagacaagaaaatgatttgaggacagcttcaatcgcggtgtgaagaagaaagcagcaaaacgaccactgaaaacaacgccggtggcaaaatatccaaagaaagggtcccaagcggtacatcgtcatagccggaaacagtcagagccaccagccaatgatattttcaatgctgcgaaagctgccaaaagtgacatgcagggatgtccttcctgagatccgtgctatctgcattgaggaaattgggtgttggatgcaaagctacagcacgtctttcctcaccgacagctatttaaaatatattggttggactctgcatgataagcaccgagaagtccgcgtgaagtgcgtgaaggctctgaaagggctgtacggtaaccgggacctgaccgcacgcctggagctcttcactggccgcttcaaggactggatggtttccatgatcgtggacagagagtacagtgtggcagtggaggccgtcagattactgatacttatccttaagaacatggaaggggtgctgatggacgtggactgtgagagcgtctaccccattgtgtaggcctctaattgaggcctggcctctgctgtgggtgaatttctgtactggaaacttttctaccctgagtgcgagataagaacgatgggtggaagagagcaacgccagagcccaggcgcccagaggactttcttccagcttctgctgtccttctttgtggagagcaaggtgacatacacagagagaactctggctgttgtgcataggacctacaagtgggctggggttggtggctcacgcctgtaagcccagcactttgggaggctgaggtgggaggatcctttgagcccaggagtttgagaccagcttgggcaacatagtgagaccctgtctctaccaaaaaaaaaaaaaaaaaagacaaatggagaaggatgggggtgtacactgtaggaaggagagcgatatttaatcagtaaccacttcctagggtattttaacatgccatcactaaatccccatgcacctccttccccagctccacgaccacgctgcttacttagtagacaacctgtgggactgtgcagggactcagctgaaggactgggagggtctgacaagcctgctgctggagaaggaccagagcacgtgccacatggagccagggccagggaccttccacctcctagggtgaaaccaggagagattgcttgcttcacttgtacaaggcaggaacggtggcatggcgtgggggaaacttggagttggaaggtgtgtggaatattttgatgagacgcatgtctgagccgcacttgaccactacctagattggctgatacacaatcagcagcaccacgatagccaccacctcctgcattcccccgatccgcctcagcctcccgagcagctgggactacaggtgcccgccaccacgcccggctaacttttttgtatttttggtagagacgggttttcaccgtgttggccaggatggtcttgatctcttgaccttgtgatccacctgcctcatcatcccaaagtgctgggattacaggcgtgagccactgcgcccagcatgttagacaatttttaattcatcctctctgtgctgttgttttctcagctgtgaaaggaatattctggtggggacaaggttacagagttgctgagagggtctcatgacatgaaggtactggccttggcacagtgcctgggggggcggggactccgcacatgcctgtgatgtcacagttactgtcagttcacagcgaaccttccctccttttcctgttgactttcccacactcctgtaaccatccctccctcccttcttcctctctctctctctcactcactgcaccccagcctgggcaataagagtgaaactccatctccaaaaaaaaaaaaaaaaggtacatgaaacatatgaagcaaaaagtgaaagtccccattcttttcctttttccagaggtgatttttgtggccaatctggtttcattccctcccagacacttttctaggcatctatgtgcctctattcacatataaacaaaataggagttttcctgtgcttcccttaaatggcatatgtatctttcactcttttttttcacctagtggatctttaataccttaaaagctcaacctgggcttggtgcggtggctcatacgtgtaatcccaggcctttgggaggccaaggtgggaggatcacttgagctcaggagttccagaccattccaaagcaaaaacaaaaggattttgagatcagtgtggacaacttagcaaaacaccatctctaaaaaaaaaaaaaaagggtacttgaaccttttgaggcaaaaagtgaaggtccccattctttcctttttcccagaggttgtttttggtggcccaaatctggttttcatttcccctcccagaaacactttt

SEQ ID NO: 423373 - DNA, 3019 bp, Homo sapiens
gagcacaccggactgcgttttttttccgaacgcccgcagcagggtcagaagggaggtggtcgccctccgtcgtggtctggcgtgtattccgagcgttggtgtctggcggtttccgagcgttggtgtctggcggtttccgaccgttggtgtctggcggtttccgaccgttggtgtctggcacgcgccaccctctcttgctttggttgcgccatgccgatgtaccagacaagaagacaagaaaatgatttgaggacagcttcaatcgcggtgtgaagaagaaagcagcaaaacgaccactgaaaacaacgccggtggcaaaatatccaaagaaagggtcccaagcggtacatcgtcatagccggaaacagtcagagccaccagccaatgatattttcaatgctgcgaaagctgccaaaagtgacatgcagggatgtccttcctgagatccgtgctatctgcattgaggaaattgggtgttggatgcaaagctacagcacgtctttcctcaccgacagctatttaaaatatattggttggactctgcatgataagcaccgagaagtccgcgtgaagtgcgtgaaggctctgaaagggctgtacggtaaccgggacctgaccgcacgcctggagctcttcactggccgcttcaaggactggatggtttccatgatcgtggacagagagtacagtgtggcagtggaggccgtcagattactgatacttatccttaagaacatggaaggggtgctgatggacgtggactgtgagagcgtctaccccattgtgtaggcctctaattgaggcctggcctctgctgtgggtgaatttctgtactggaagtgagtggggctccttttacgtttctttaacaccaccctctcggtttctctcccacatgtgctgctgccctacttaaggcctccccatctccgtggaagtctctctggtgtctcttttcctctctcagctccttggggctttccttagctctgcacctccttttcctttatcatctccttgggccatctcctccgtctgtggtcatgattacacctccttgtttcctcctgtgctgagccctttccttgtgtccattccaccagacttttctaccctgagtgcgagataagaacgatgggtggaagagagcaacgccagagcccaggcgcccagaggactttcttccagcttctgctgtccttctttgtggagagcaaggtgacatacacagagagaactctggctgttgtgcataggacctacaagtgggctggggttggtggctcacgcctgtaagcccagcactttgggaggctgaggtgggaggatcctttgagcccaggagtttgagaccagcttgggcaacatagtgagaccctgtctctaccaaaaaaaaaaaaaaaaaagacaaatggagaaggatgggggtgtacactgtaggaaggagagcgatatttaatcagtaaccacttcctagggtattttaacatgccatcactaaatccccatgcacctccttccccagctccacgaccacgctgcttacttagtagacaacctgtgggactgtgcagggactcagctgaaggactgggagggtctgacaagcctgctgctggagaaggaccagagcacgtgccacatggagccagggccagggaccttccacctcctagggtgaaaccaggagagattgcttgcttcacttgtacaaggcaggaacggtggcatggcgtgggggaaacttggagttggaaggtgtgtggaatattttgatgagacgcatgtctgagccgcacttgaccactacctagattggctgatacacaatcagcagcaccacgatagccaccacctcctgcattcccccgatccgcctcagcctcccgagcagctgggactacaggtgcccgccaccacgcccggctaacttttttgtatttttggtagagacgggttttcaccgtgttggccaggatggtcttgatctcttgaccttgtgatccacctgcctcatcatcccaaagtgctgggattacaggcgtgagccactgcgcccagcatgttagacaatttttaattcatcctctctgtgctgttgttttctcagctgtgaaaggaatattctggtggggacaaggttacagagttgctgagagggtctcatgacatgaaggtactggccttggcacagtgcctgggggggcggggactccgcacatgcctgtgatgtcacagttactgtcagttcacagcgaaccttccctccttttcctgttgactttcccacactcctgtaaccatccctccctcccttcttcctctctctctctctcactcacgcacacgcacacacacacacacacatccagcctaggcaacaagagtgaaactctgtcttaaaaaaaaaaaattaaaaattatattcgggccgggcttggtggctcaatcctataataccagcaccttgggaggccaaggcaggaggatcacttgaggccaggagttcaagaccggcctgggcaacataatgagaacccatctttaccaaaaaaataaaattacattaaaaattagctgggcacggtgacgtctgcctgaggtcacattcaagaagctgatgtgggaggatcgcttgagcccaggaattggaggctgcagtgagctaagatcataccactgcacttcagcctgggcgtcagagtgagaccctgtttctaaaataataataattttaaaaaatgatatttatggttgcattgggaaaagatcaatctattaatatatgtgaagacatttttggcctaaaagttatatatattttttccttctgattttaaaagaaatgaggccaggagtgagccaccacgccgcagcctcccgttgtcctcatttagactttcctgggttataggcacttttgactacctggggtccttcttcagttaaataaaaacaaattacaaacattaggccgggcgtgaatggcacattgcctgtaatcccaagcacttactga

SEQ ID NO: 423374 - DNA, 1129 bp, Homo sapiens
gagcacaccggactgcgttttttttccgaacgcccgcagcagggtcagaagggaggtggtcgccctccgtcgtggtctggcgtgtattccgagcgttggtgtctggcggtttccgagcgttggtgtctggcggtttccgaccgttggtgtctggcggtttccgaccgttggtgtctggcacgcgccaccctctcttgctttggttgcgccatgccgatgtaccaggtaaagccctatcacggggtctgcgcccctctccgtgtggagcccacctgcatgtactggctccccaacatgcacggcaggagcggcggcccagcacttggcactggccacttgcagacaagaagacaagaaaatgatttgaggacagcttcaatcgcggtgtgaagaagaaagcagcaaaacgaccactgaaaacaacgccggtggcaaaatatccaaagaaagggtcccaagcggtacatcgtcatagccggaaacagtcagagccaccagccaatgatattttcaatgctgcgaaagctgccaaaagtgacatgcagggatgtccttcctgagatccgtgctatctgcattgaggaaattgggtgttggatgcaaagctacagcacgtctttcctcaccgacagctatttaaaatatattggttggactctgcatgataagcaccgagaagtccgcgtgaagtgcgtgaaggctctgaaagggctgtacggtaaccgggacctgaccgcacgcctggagctcttcactggccgcttcaaggactggatggtttccatgatcgtggacagagagtacagtgtggcagtggaggccgtcagattactgatacttatccttaaacttttctaccctgagtgcgagataagaacgatgggtggaagagagcaacgccagagcccaggcgcccagaggactttcttccagcttctgctgtccttctttgtggagagcaagctggagtgcaatggcgcgatcttggcccactgcaacctccacctcccagattgaagcaattctcctgcctcagcctcccgagtagctgggaccacaggaaatggattgcatgattgttttgaccatttttcttcatgctaaataaagtatgcagacttaagcattg

SEQ ID NO: 423375 - DNA, 1359 bp, Homo sapiens
caccaaagagccgtgcaagcagacaggtcacactttcagcagatgagcttgaacctcaggagggttgtggcacaatgaggaaggaaacgtgggtggaaaggcacgctggcctgctctgctggctgggccagtaactggggatggggctggggcagggcccactaagccactggtgactgggggaggggctggggaactgggtagcagacacaggctgaggatcggcacgggagcatggcagccaacgtctcgggtgccaagtcctgccctgccaacttcttggcagctgccgacgacaaactcagtgggttccagggggacttcctgtggcccatactggtggttgagttcctggtggccgtggccagcaatggcctggccctgtaccgcttcagcatccggaagcagcgcccatggcaccccgccgtggtcttctctgtccagctggcagtcagcgacctgctctgcgctctgacgctgcccccgctggccgcctacctctatccccccaagcactggcgctatggggaggccgcgtgccgcctggagcgcttcctcttcacctgcaacctgctgggcagcgtcatcttcatcacctgcatcagcctcaaccgctacctgggcatcgtgcaccccttcttcgcccgaagccacctgcgacccaagcacgcctgggccgtgagcgctgccggctgggtcctggccgccctgctggccatgcccacactcagcttctcccacctgaagaggccgcagcagggggcgggcaactgcagcgtggccaggcccgaggcctgcatcaagtgtctggggacagcagaccacgggctggcggcctacagagcgtatagcctggtgctggcggggttgggctgcggcctgccgctgctgctcacgctggcagcctacggcgccctcgggcgggccgtgctacgcagcccaggcatgactgtggccgagaagctgcgtgtggcagcgttggtggccagtggtgtggccctctacgccagctcctatgtgccctaccacatcatgcgggtgctcaacgtggatgctcggcggcgctggagcacccgctgcccgagctttgcagacatagcccaggccacagcagccctggagctggggccctacgtgggctaccaggtgatgcggggcctcatgcccctggccttctgtgtccaccctctactctacatggccgcagtgcccagcctgggctgctgctgccgacactgccccggctacagggacagctggaacccagaggacgccaagagcactggccaagccctgcccctcaatgccacagccgcccctaaaccgtcagagccccagtcccgtgagctgagccaatga

SEQ ID NO: 423376 - DNA, 1309 bp, Homo sapiens
caccaaagagccgtgcaagcagacaggtcacactttcagcagatgagcttgaacctcaggagggttgtggcacaatgaggaaggaaacgtgggtggaaaggcacgctggcctgctctgctggctgggccagtaactggggatggggctggggcagggcccactaagccactggtgactgggggaggggctggggaactgggtagcagacacaggctgaggatcggcacgggagcatggcagccaacgtctcgggtaaggagaaggcatgttggctgtctctgggggtctgcagattgtcaggaggtgggggtagtgggtattggtaaaacacctaggtctggggctgggcacggtggctcacgcctgtaatcccagcactttgggaggtcgaggggggtggaacacgaggtcaggggttcgagaccaccctgaccaacaaggagaaaccccgtctctactaaaaataaaaaaattagctgggcctggtggcacatgcctgtaatcccagctactcgggaggctgagacaagagaatcacttaaacccgggaggcggaggttgccatgagccgagattgcaccattgcactccagcttgggcaatgagcgaaactccatctcaaaaaaaaaaagcctaggtcaaggctgggtgtggtgatgcgagcctgtgattccagctactcgggaggctgaggcagggggatcacttgaccccaggaggtcgagactgcactgagctgtgattgcaccactgcacctcagcctcggtgacagtgaaatcctgtctccaaaaaaaagccacgtctagacgacacttcctccttaagcaggctggcgttgggagcagggaggcgcctccggagaagcctgtccccagcctgcagaggcaggggtggggtgcacaaggagtgagtgcccctgtgctgctgtgccctgggcactgtggtgagcactggcaccagtaatgggtaagcaggcccccccatcctcccgaaggagggagatttttctcaccgtcatcaggtggcgcagggtatgggggaaaataacgcagggaagggagagtggaggcacgagggctgctgtcaacagtggttagggtggccttggggcctctcgcaggcaggaccacggacgtgggaagaggagcctcaagaatgtctgggtgtggctgggcacggtggctcacacttgtaatctcagcactttgggaggctgaggcgggcagatctgaggtcaggaattcgagacctcttggccaacatggggaaaccccatctctactaaaaatgcaaaatttaaaattaaa

SEQ ID NO: 423377 - DNA, 740 bp, Homo sapiens
agcgcgggcgcaggcgccgagaggcgcacgggagacctcaggcccagactccactccccagctgtgaaaggactgctggccagacccccaagctagcccgccaggcctccatagagctgcccagcatgactgcgtccagtaccaagagttggtgggagacgggtgaggtacaggctcagtctgcggccaagactccgtcctgcaagactctttggcagttgcactgggtactggctgagttctggaaaacaggaatgtgagcagagtgctgcagatctccttgtcaggagcacctaagaactggcatgactctacaccctctctccttctgcaatgacctcgtgtcaagatggcagacctgcagagatgaatgtgcctggatacctgagtcaccaggtggaggaaactcccattgacatgcatcacactccacatatgaaacccttctttttctgcactgtcactggggttagggattattactcactgcaacttagcctagcattaagttgcttgactaatacaagtttcaataaatgtcgcttcatttccaaaaaaacacaaaacaatacaaacaagaaacaaccccaagggagctcaatatccggggggcgggagaagacgggcgtactagaacgggccatgtggcccacacggtccctgacccagtttcttggcccaggggggaacggccggccccaaagaggccgaataatcgaacccggtccgaaatcgccaca

SEQ ID NO: 423378 - DNA, 657 bp, Homo sapiens
agcgcgggcgcaggcgccgagaggcgcacgggagacctcaggcccagactccactccccagctgtgaaaggactgctggccagacccccaagctagcccgccaggcctccatagagctgcccagcatgactgcgtccagtaccaagagttggtgggagacgggtgaggtacaggctcagtctgcggccaagactccgtcctgcaaggatattgtggctggagacatgagcaagaaaagcctctgggagcagaagggaggctccaagacctcatcaacaattaagatggactctgtgactacatgactaataaaatatggcagaaatgacaccatgcagtttccaagcccaggccttaggagacaggcagcttccagttcagtcttttggagggtcagctctggggccctcagccatcacgcatggagtccaaccaccctgagacgtcatgctggagacccacctgtggatgccccagtcaagagtcctggctgagcccagcctcccagccacccccacccaaggcatcagaccacgaagcttctggccaaggcttcaccaacttcacttgatgctgtgaggaacagaactgcccatccaagccctgccagaatttctaacccacaaagccatgagtcacaataaatgccatgggaca

SEQ ID NO: 423379 - DNA, 492 bp, Homo sapiens
agcgcgggcgcaggcgccgagaggcgcacgggagacctcaggcccagactccactccccagctgtgaaaggactgctggccagacccccaagctagcccgccaggcctccatagagctgcccagcatgactgcgtccagtaccaagagttggtgggagacgggtgaggtacaggctcagtctgcggccaagactccgtcctgcaaggatattgtggctggagacatgagcaagaaaagcctctgggagcagaagggaggctccaagacctcatcaacaattaaggtagagcctaaatgtggttggtgcaggcaggaaatattaactcatttcattgtcacacgaaaccagaagacataaaacagttaaaataggccaggcacagtggctcacacctgtaatcccagcactttgggaggccgaggcgggtggatcacgaggtcaggaggagaccatcctggccaacgtggtgaaactcggtctatactaaaaa

SEQ ID NO: 423380 - DNA, 1771 bp, Homo sapiens
agcgcgggcgcaggcgccgagaggcgcacgggagacctcaggcccagactccactccccagctgtgaaaggactgctggccagacccccaagctagcccgccaggcctccatagagctgcccagcatgactgcgtccagtaccaagagttggtgggagacgggtgaggtacaggctcagtctgcggccaagactccgtcctgcaagggaagtcgcaggaatgtgagaaggccaggaaggattgtgagccaataatacatcttgacaatccacaatagatggaagctattattgattcattatctcaaaatggctccaccagccaaccccttctatccatccccagtgccacctcctaattcaggtcctcgacgctttttgcttgcatggctgccagagcctttgggcaggtctctctgtgttgatgtgttcacccccactcctatctcctccatccaacgctctaccaccaaggcaatcctcctaaaacacaaccacagtgttcttcacactccctatgattccctgcaacccacattattaatcattaatccaattaataaaaattaatgtactaatccccagctcctcagtgtggcccttcacaatctgcttgtccagcctcgtctcttgcctccccagctttccccagcagacccctctcccatccattccaatgccatcctcttctcccagcctagttctttcaggccctgtgcctttggcacttgcccctgcctgaaatgtccttcccacttcttcttgaagggggtgagtgccaactcacctttccaaccgcacaccaatgcacaccaggatctcccccaagactccagggtagtagtcaccatctgtatttctgcagcacactgcacctgcctctagcacagctcgacagcccactgaagtgaatgatctgttcgatcagtgccgacttgcctttctttcccagctgcaaaccacccaaggtgaagtcatcttagcctcttggagtcagcctgactggggtgaacccattgatatgtattgcataaatgaacatatgacagtagtgatgaaggatctccagctatccgtgtactctctatgcttcccagactctttggcagttgcactgggtactggctgagttctggaaaacaggaatgtgagcagagtgctgcagatctccttgtcaggagcacctaagaactggcatgactctacaccctctctccttctgcaatgacctcgtgtcaagatggcagacctgcagagatgaatgtgcctggatacctgagtcaccaggtggaggaaactcccattgacatgcatcacactccacatatgaaacccttctttttctgcactgtcactggggttagggattattactcactgcaacttagcctagcattaagttgcttgactaatacaagtttcaataaatgtcgcttcatttcccatggcttctgactgaatgctgtgcaatatccacaaaccatccagattgtggtttataaataccacccttcactaaaaggactcagagctccttgtagaaatggctgatgctaaggctggggtagggaagtacaaggtgagcccagagtgctgtgtggtgccagaaagcaaggaagcatttaaaaaatgacagggacatgtcaaaggacacatcaatcaacttcaaggggcttccactggccaaatctgggatgatgtgagcatccaaattaataatgataatggtagattatagtctattgaataaaatgagaacctataactataga

SEQ ID NO: 423381 - DNA, 1026 bp, Homo sapiens
agcgcgggcgcaggcgccgagaggcgcacgggagacctcaggcccagactccactccccagctgtgaaaggactgctggccagacccccaagctagcccgccaggcctccatagagctgcccagcatgactgcgtccagtaccaagagttggtgggagacgggtgaggtacaggctcagtctgcggccaagactccgtcctgcaagctgcaaaccacccaaggtgaagtcatcttagcctcttggagtcagcctgactggggtgaacccattgatatgtattgcataaatgaacatatgacagtagtgatgaaggatctccagctatccgtgtactctctatgcttcccagactctttggcagttgcactgggtactggctgagttctggaaaacaggaatgtgagcagagtgctgcagatctccttgtcaggagcacctaagaactggcatgactctacaccctctctccttctgcaatgacctcgtgtcaagatggcagacctgcagagatgaatgtgcctggatacctgagtcaccaggtggaggaaactcccattgacatgcatcacactccacatatgaaacccttctttttctgcactgtcactggggttagggattattactcactgcaacttagcctagcattaagttgcttgactaatacaagtttcaataaatgtcgcttcatttcccatggcttctgactgaatgctgtgcaatatccacaaaccatccagattgtggtttataaataccacccttcactaaaaggactcagagctccttgtagaaatggctgatgctaaggctggggtagggaagtacaaggtgagcccagagtgctgtgtggtgccagaaagcaaggaagcatttaaaaaatgacagggacatgtcaaaggacacatcaatcaacttcaaggggcttccactggccaaatctgggatgatgtgagcatccaaattaataatgataatggtagattatagtctattgaataaaatgagaacctataactataga

SEQ ID NO: 423382 - DNA, 1737 bp, Homo sapiens
gttccctggagcttgctcttctcattgtgcaggggtggggtcagtgctgccacccaacaccacattcagttagagcctccagtcagaccaggcatgcactaactctgctcatgcatctctagccaaagctggtcatgtgcacagcaagaaatctgctctgtcctgtccacagggaagtcgcaggaatgtgagaaggccaggaaggattgtgagccaataatacatcttgacaatccacaatagatggaagctattattgattcattatctcaaaatggctccaccagccaaccccttctatccatccccagtgccacctcctaattcaggtcctcgacgctttttgcttgcatggctgccagagcctttgggcaggtctctctgtgttgatgtgttcacccccactcctatctcctccatccaacgctctaccaccaaggcaatcctcctaaaacacaaccacagtgttcttcacactccctatgattccctgcaacccacattattaatcattaatccaattaataaaaattaatgtactaatccccagctcctcagtgtggcccttcacaatctgcttgtccagcctcgtctcttgcctccccagctttccccagcagacccctctcccatccattccaatgccatcctcttctcccagcctagttctttcaggccctgtgcctttggcacttgcccctgcctgaaatgtccttcccacttcttcttgaagggggtgagtgccaactcacctttccaaccgcacaccaatgcacaccaggatctcccccaagactccagggtagtagtcaccatctgtatttctgcagcacactgcacctgcctctagcacagctcgacagcccactgaagtgaatgatctgttcgatcagtgccgacttgcctttctttcccagctgcaaaccacccaaggtgaagtcatcttagcctcttggagtcagcctgactggggtgaacccattgatatgtattgcataaatgaacatatgacagtagtgatgaaggatctccagctatccgtgtactctctatgcttcccagactctttggcagttgcactgggtactggctgagttctggaaaacaggaatgtgagcagagtgctgcagatctccttgtcaggagcacctaagaactggcatgactctacaccctctctccttctgcaatgacctcgtgtcaagatggcagacctgcagagatgaatgtgcctggatacctgagtcaccaggtggaggaaactcccattgacatgcatcacactccacatatgaaacccttctttttctgcactgtcactggggttagggattattactcactgcaacttagcctagcattaagttgcttgactaatacaagtttcaataaatgtcgcttcatttcccatggcttctgactgaatgctgtgcaatatccacaaaccatccagattgtggtttataaataccacccttcactaaaaggactcagagctccttgtagaaatggctgatgctaaggctggggtagggaagtacaaggtgagcccagagtgctgtgtggtgccagaaagcaaggaagcatttaaaaaatgacagggacatgtcaaaggacacatcaatcaacttcaaggggcttccactggccaaatctgggatgatgtgagcatccaaattaataatgataatggtagattatagtctattgaataaaatgagaacctataactataga

SEQ ID NO: 423383 - DNA, 1741 bp, Homo sapiens
agcgcgggcgcaggcgccgagaggcgcacgggagacctcaggcccagactccactccccagctgtgaaaggactgctggccagacccccaagctagcccgccaggcctccatagagctgcccagcatgactgcgtccagtaccaagagttggtgggagacgggtgaggtacaggctcagtctgcggccaagactccgtcctgcaagagccagctcaatcacttctccagaaagacttactgagtcctctgcactgaacaggtgtcctatgctccaggagagccctgggctggctcctagtgcagccgttatgaccctggaatgcaccatctttcacatcactgcctggccttctagaatctcagcttcttaaatcaagaaattgtgtcttgttcatgtctgaattccccaagtgaacacagtgagtgggtgcttgacaaatctttgttggtaatgagcaaaaaaggggattctgtgcccaataccatgaaatcaatgcacagaagattcagtcaatcaagaaaggtgcacagacactggccacacacactgacatttgtttgcagatgttccagtccccctgacttccaccaatccattcattcattccacaagcatttttgctggggtggaagcagggccatacagggtgtgtacatcacagataggggattctgctgcaactatctcccagaccctattctagggccaggggatagaaacagaatcaaaaacatattcattgtcttttttgggcttatattattgaggagagagaaataaacaatttcaaaataaacagtgtcatacagcgctaagtgctgtaaataaaatcaaacagaataacgaaagagaaagtagctagactggagggaaaagctgcttcagaatgagttgtcaaggaagcctctttgcaatcagaaaggtgagaaggatttagtcaggcaaatatcaggagtaaattattcttggaggaaagtaagcccatgcaaaggccctggggcagagtgggcttatttgataaagaggtaaaagggtcaggatatctgtagcaatagtggccaagggagggagaggtatgagacagaggaggtgagccctgttgccatggtgagggcatgaggatttattctaagttccagatacctggagttaaagtcccctgaactggacaacaactacaagccttcatatctcaatgctaccatctttaagcccccgttataagagctcagaggcttcagagatgacaggaaacaccagaacgctatggtggtgcatatctaggtgccttctcccaactcagatcctttgactgtagaaagacacagatttcaaggctgagatccacaaaactctagcaaatactgcacagacactgaccaatgacagcaggtgctgcctgtcaccctggagcaccaggcagggttccaaagcacccttgctgtgccagcctctgattgctggttatagggaggtctggggtagtcccaaaagctgggatgtgcaaggcagctggggtcagtcaggaggctcagggcagtggcaggaaaatattttcctccctggtagagccacagcggggtatccaggctgaatattattggcgagaaggaccatggcacagcaccaagacctgcaggacaaactttgttggagctgaatccagaaaaacaatcttcttctaaaccactctcctgcccctcatttaattattgtgcttttgggtgcacttggactac

SEQ ID NO: 423384 - DNA, 1637 bp, Homo sapiens
ccttttgtctactgaacatgagactgcttggaaactgggcaacgtggatttttataagttgtacaaagcacttagcaattttcaaacctctccatcctgcagagccagctcaatcacttctccagaaagacttactgagtcctctgcactgaacaggtgtcctatgctccaggagagccctgggctggctcctagtgcagccgttatgaccctggaatgcaccatctttcacatcactgcctggccttctagaatctcagcttcttaaatcaagaaattgtgtcttgttcatgtctgaattccccaagtgaacacagtgagtgggtgcttgacaaatctttgttggtaatgagcaaaaaaggggattctgtgcccaataccatgaaatcaatgcacagaagattcagtcaatcaagaaaggtgcacagacactggccacacacactgacatttgtttgcagatgttccagtccccctgacttccaccaatccattcattcattccacaagcatttttgctggggtggaagcagggccatacagggtgtgtacatcacagataggggattctgctgcaactatctcccagaccctattctagggccaggggatagaaacagaatcaaaaacatattcattgtcttttttgggcttatattattgaggagagagaaataaacaatttcaaaataaacagtgtcatacagcgctaagtgctgtaaataaaatcaaacagaataacgaaagagaaagtagctagactggagggaaaagctgcttcagaatgagttgtcaaggaagcctctttgcaatcagaaaggtgagaaggatttagtcaggcaaatatcaggagtaaattattcttggaggaaagtaagcccatgcaaaggccctggggcagagtgggcttatttgataaagaggtaaaagggtcaggatatctgtagcaatagtggccaagggagggagaggtatgagacagaggaggtgagccctgttgccatggtgagggcatgaggatttattctaagttccagatacctggagttaaagtcccctgaactggacaacaactacaagccttcatatctcaatgctaccatctttaagcccccgttataagagctcagaggcttcagagatgacaggaaacaccagaacgctatggtggtgcatatctaggtgccttctcccaactcagatcctttgactgtagaaagacacagatttcaaggctgagatccacaaaactctagcaaatactgcacagacactgaccaatgacagcaggtgctgcctgtcaccctggagcaccaggcagggttccaaagcacccttgctgtgccagcctctgattgctggttatagggaggtctggggtagtcccaaaagctgggatgtgcaaggcagctggggtcagtcaggaggctcagggcagtggcaggaaaatattttcctccctggtagagccacagcggggtatccaggctgaatattattggcgagaaggaccatggcacagcaccaagacctgcaggacaaactttgttggagctgaatccagaaaaacaatcttcttctaaaccactctcctgcccctcatttaattattgtgcttttgggtgcacttggactac

SEQ ID NO: 423385 - DNA, 1028 bp, Homo sapiens
tacatgacatcagcagatgtcctcctccatgacaacaccgcccactaatcaccacccaacaatgcacaccaggatctcccccaagactccagggtagtagtcaccatctgtatttctgcagcacactgcacctgcctctagcacagctcgacagcccactgaagtgaatgatctgttcgatcagtgccgacttgcctttctttcccagctgcaaaccacccaaggtgaagtcatcttagcctcttggagtcagcctgactggggtgaacccattgatatgtattgcataaatgaacatatgacagtagtgatgaaggatctccagctatccgtgtactctctatgcttcccagactctttggcagttgcactgggtactggctgagttctggaaaacaggaatgtgagcagagtgctgcagatctccttgtcaggagcacctaagaactggcatgactctacaccctctctccttctgcaatgacctcgtgtcaagatggcagacctgcagagatgaatgtgcctggatacctgagtcaccaggtggaggaaactcccattgacatgcatcacactccacatatgaaacccttctttttctgcactgtcactggggttagggattattactcactgcaacttagcctagcattaagttgcttgactaatacaagtttcaataaatgtcgcttcatttcccatggcttctgactgaatgctgtgcaatatccacaaaccatccagattgtggtttataaataccacccttcactaaaaggactcagagctccttgtagaaatggctgatgctaaggctggggtagggaagtacaaggtgagcccagagtgctgtgtggtgccagaaagcaaggaagcatttaaaaaatgacagggacatgtcaaaggacacatcaatcaacttcaaggggcttccactggccaaatctgggatgatgtgagcatccaaattaataatgataatggtagattatagtctattgaataaaatgagaacctataactataga

SEQ ID NO: 423386 - DNA, 1195 bp, Homo sapiens
agcgcgggcgcaggcgccgagaggcgcacgggagacctcaggcccagactccactccccagctgtgaaaggactgctggccagacccccaagctagcccgccaggcctccatagagctgcccagcatgactgcgtccagtaccaagagttggtgggagacgggtgaggtacaggctcagtctgcggccaagactccgtcctgcaaggtcgacagccaaaagcgggaggtatccaaagctgcaagagaagagaaaatggcctgtggtggggagcagcttccaagccaccatggaggccccactcaagtcccaggcctcatgggagctgaccctgatgcacggggactgagtcacccctgacagaacaataaggagacctcgtggcatttcccatctccacagaaaccaccaaatccatgtctgccatgatcctgctcacttcctcacccacccttccctgcaatccatccctaatgagcgctctttgaacccatccaactctctccatctctacagccctcgcccagcctcagtttcctcatttgaaagatgggaattctaacacgtgtctgagagggcttagatgagaattaagtttgcaaaactgaaagcagtgacttttgtttgtgttgctcacggaacctacacactgttccctgcttctcaggctcttctctgtcccagttctctccctttctgccaccccttgagttgtcaggctcctcactcctgcttcaggctgcacccttcttcagcttcctccactccctggctgtggcaggcagcctctagcatgaccctcaatgatccccagctcctgcagtcaccctcttgtggagtccccacccctttagtgtgggatgcacctaacgactcacttccaactcacaaaatatggcaaaagacacaggaagtcacttctgaaattaggttgcaaaaggacctgttatccctcttgctcatcttctcctgaaagacaggtggcagagctgccatgctgcgaagcaccctacgcggcaaggggcccagggagtactcctgtcaacagccagcaaggaactcagaccctcagcccaacaagccacagctgaatcctgccaacagtcacatgagtagatgagcaagagggataacaggtccttttgcaacctaatttcagaagtgacttcctgtgtccttttgatcttggtgttgat

SEQ ID NO: 423387 - DNA, 656 bp, Homo sapiens
cccccccttttttggggtttgccccaaaggggtgggaaaggcccccaaccccccttttaaaagggaaagccttgggggcaatgactctacaccctctctccttctgcaatgacctcgtgtcaagatggcagacctgcagagatgaatgtgcctggatacctgagtcaccaggtggaggaaactcccattgacatgcatcacactccacatatgaaacccttctttttctgcactgtcactggggttagggattattactcactgcaacttagcctagcattaagttgcttgactaatacaagtttcaataaatgtcgcttcatttcccatggcttctgactgaatgctgtgcaatatccacaaaccatccagattgtggtttataaataccacccttcactaaaaggactcagagctccttgtagaaatggctgatgctaaggctggggtagggaagtacaaggtgagcccagagtgctgtgtggtgccagaaagcaaggaagcatttaaaaaatgacagggacatgtcaaaggacacatcaatcaacttcaaggggcttccactggccaaatctgggatgatgtgagcatccaaattaataatgataatggtagattatagtctattgaataaaatgagaacctataactataga

SEQ ID NO: 423388 - DNA, 629 bp, Homo sapiens
agcgcgggcgcaggcgccgagaggcgcacgggagacctcaggcccagactccactccccagctgtgaaaggactgctggccagacccccaagctagcccgccaggcctccatagagctgcccagcatgactgcgtccagtaccaagagttggtgggagacgggtgaggtacaggctcagtctgcggccaagactccgtcctgcaaggatattgtggctggagacatgagcaagaaaagcctctgggagcagaagggaggctccaagacctcatcaacaattaagactctttggcagttgcactgggtactggctgagttctggaaaacaggaatgtgagcagagtgctgcagatctccttgtcaggagcacctaagaactggcatgactctacaccctctctccttctgcaatgacctcgtgtcaagatggcccacccacccatttatccgctcatccacctagtgaatggggagcccatccatccatgcatcaatccattacccttcccttaacaatcctctttttctcaattctgattctggggacaatcatagaaattgctgtcgccttaatccaagcttaagttttcacacttatagtaagcctcaacctggtcgacaacacata

SEQ ID NO: 423389 - DNA, 1022 bp, Homo sapiens
tgagttgtcaggctcctcactcctgcttcaggctgcacccttcttcagcttcctccactccctggctgtggcaggcagcctctagcatgaccctcaatgatccccagctcctgcagtcaccctcttgtggagtccccacccctttagtgtgggatgcacctaacgactcacttccaactcacaaaatatggcaaaagacacaggaagtcacttctgaaattaggttgcaaaaggacctgttatccctcttgctcatcttctcctgaaagacaggtggcagagctgccatgctgcgaagcaccctacgcggcaaggggcccagggagtactcctgtcaacagccagcaaggaactcagaccctcagcccaacaagccacagctgaatcctgccaacagtcacatgagtagatttggaaacaaatcctctgccacctctcggaaagtcaagccttgaaatgaatgcagccccagccaacagtttcagcctgggaatggccctgtgcagagatactcagctaaaactgtagttggattcataagtcagagaaactatgaaatcataaatgtacattgttttaagttgctgagtattggggtggtctcttccatagcaatacgtaactgagacacatagccttcatttgtatctccatacagaacactccctggtatatacagccgacctctgtatccagggacctgtgtctgtggattgaaccaaccacagatcaaaaatattcaaaaagtaggctgggcacagtggttcacacctataatcccagaactttgggaggccgaggcaggtggatcacctgaggtcaggagttcaaggccagcctggccaacatggtgaaaccccatctctactaaaaatgcaaaaaattagcaaggtgtagcggcatgtgcctgtaatcccagctactcagggggctgaggcaggagaatcccctgaacccaggaggcgaagcttgcagtaagccaagatcatgccactgcactccagcctgggcaacagtgaagc

SEQ ID NO: 423390 - DNA, 689 bp, Homo sapiens
ccttttgtctactgaacatgagactgcttggaaactgggcaacgtggatttttataagttgtacaaagcacttagcaattttcaaacctctccatcctgcagagccagctcaatcacttctccagaaagacttactgagtcctctgcactgaacaggtgtcctatgctccaggagagccctgggctggctcctagtgcagccgttatgaccctggaatgcaccatctttcacatcactgcctggccttctagaatctcagcttcttaaatcaagaaattgtgtcttgttcatgtctgaattccccaagtgaacacagtgagtgggtgcttgacaaatctttgttggtaatgagcaaaaaaggggattctgtgcccaataccatgaaatcaatgcacagaagattcagtcaatcaagaaaggtgcacagacactggccacacacactgacatttgtttgcagatgttccagtccccctgacttccaccaatccattcattcattccacaagcatttttgctggggtggaagcagggccatacagggtgtgtacatcacagatagggtgggtttgtataatgagtataaaaaacttctagcagaagatgacaaagtatatcaagaaagggctctcttcgaaatcacaccactgcactccagcctgggtaacagagggagattccatctaaa

SEQ ID NO: 423391 - DNA, 959 bp, Homo sapiens
agcgcgggcgcaggcgccgagaggcgcacgggagacctcaggcccagactccactccccagctgtgaaaggactgctggccagacccccaagctagcccgccaggcctccatagagctgcccagcatgactgcgtccagtaccaagagttggtgggagacgggtgaggtacaggctcagtctgcggccaagactccgtcctgcaaggatattgtggctggagacatgagcaagaaaagcctctgggagcagaagggaggctccaagacctcatcaacaattaagactctttggcagttgcactgggtactggctgagttctggaaaacaggaatgtgagcagagtgctgcagatctccttgtcaggagcacctaagaactggcatgactctacaccctctctccttctgcaatgacctcgtgtcaagatggcagacctgcagagatgaatgtgcctggatacctgagtcaccaggtggaggaaactcccattgacatgcatcacactccacatatgaaacccttctttttctgcactgtcactggggttagggattattactcactgcaacttagcctagcattaagttgcttgactaatacaagtttcaataaatgtcgcttcatttcccatggcttctgactgaatgctgtgcaatatccacaaaccatccagattgtggtttataaataccacccttcactaaaaggactcagagctccttgtagaaatggctgatgctaaggctggggtagggaagtacaaggtgagcccagagtgctgtgtggtgccagaaagcaaggaagcatttaaaaaatgacagggacatgtcaaaggacacatcaatcaacttcaaggggcttccactggccaaatctgggatgatgtgagcatccaaattaataatgataatggtagattatagtctattgaataaaatgagaacctataactataga

SEQ ID NO: 423392 - DNA, 881 bp, Homo sapiens
agcgcgggcgcaggcgccgagaggcgcacgggagacctcaggcccagactccactccccagctgtgaaaggactgctggccagacccccaagctagcccgccaggcctccatagagctgcccagcatgactgcgtccagtaccaagagttggtgggagacgggtgaggtacaggctcagtctgcggccaagactccgtcctgcaagactctttggcagttgcactgggtactggctgagttctggaaaacaggaatgtgagcagagtgctgcagatctccttgtcaggagcacctaagaactggcatgactctacaccctctctccttctgcaatgacctcgtgtcaagatggcagacctgcagagatgaatgtgcctggatacctgagtcaccaggtggaggaaactcccattgacatgcatcacactccacatatgaaacccttctttttctgcactgtcactggggttagggattattactcactgcaacttagcctagcattaagttgcttgactaatacaagtttcaataaatgtcgcttcatttcccatggcttctgactgaatgctgtgcaatatccacaaaccatccagattgtggtttataaataccacccttcactaaaaggactcagagctccttgtagaaatggctgatgctaaggctggggtagggaagtacaaggtgagcccagagtgctgtgtggtgccagaaagcaaggaagcatttaaaaaatgacagggacatgtcaaaggacacatcaatcaacttcaaggggcttccactggccaaatctgggatgatgtgagcatccaaattaataatgataatggtagattatagtctattgaataaaatgagaacctataactataga

SEQ ID NO: 423393 - DNA, 579 bp, Homo sapiens
agcgcgggcgcaggcgccgagaggcgcacgggagacctcaggcccagactccactccccagctgtgaaaggactgctggccagacccccaagctagcccgccaggcctccatagagctgcccagcatgactgcgtccagtaccaagagttggtgggagacgggtgaggtacaggctcagtctgcggccaagactccgtcctgcaagatggactctgtgactacatgactaataaaatatggcagaaatgacaccatgcagtttccaagcccaggccttaggagacaggcagcttccagttcagtcttttggagggtcagctctggggccctcagccatcacgcatggagtccaaccaccctgagacgtcatgctggagacccacctgtggatgccccagtcaagagtcctggctgagcccagcctcccagccacccccacccaaggcatcagaccacgaagcttctggccaaggcttcaccaacttcacttgatgctgtgaggaacagaactgcccatccaagccctgccagaatttctaacccacaaagccatgagtcacaataaatgccatgggaca

SEQ ID NO: 423394 - DNA, 644 bp, Homo sapiens
agcgcgggcgcaggcgccgagaggcgcacgggagacctcaggcccagactccactccccagctgtgaaaggactgctggccagacccccaagctagcccgccaggcctccatagagctgcccagcatgactgcgtccagtaccaagagttggtgggagacgggtgaggtacaggctcagtctgcggccaagactccgtcctgcaagatggactctgtgactacatgactaataaaatatggcagaaatgacaccatgcagtttccaagcccaggccttaggagacaggcagcttccagttcagtcttttggagggtcagctctggggccctcagccatcacgcatggagtccaaccaccctgagacgtcatgctggagacccacctgtggatgccccagtcaagagtcctggctgagcccagcctcccagccacccccacccaaggcatcagaccacgaagcttctggccaaggcttcaccaacttcacttgatgctgtgaggaacagaactgcccatccaagccctgccagaatttctaacccacaaagccatgagtcacaataaatgccatgggacaaaaacaaaaaatgcatgttgcttttgtcatacattagtggtagttcatcgcacggcaatagaaaa

SEQ ID NO: 423395 - DNA, 793 bp, Homo sapiens
agcgcgggcgcaggcgccgagaggcgcacgggagacctcaggcccagactccactccccagctgtgaaaggactgctggccagacccccaagctagcccgccaggcctccatagagctgcccagcatgactgcgtccagtaccaagagttggtgggagacgggtgaggtacaggctcagtctgcggccaagactccgtcctgcaagagccagctcaatcacttctccagaaagacttactgagtcctctgcactgaacaggtgtcctatgctccaggagagccctgggctggctcctagtgcagccgttatgaccctggaatgcaccatctttcacatcactgcctggccttctagaatctcagcttcttaaatcaagaaattgtgtcttgttcatgtctgaattccccaagtgaacacagtgagtgggtgcttgacaaatctttgttggtaatgagcaaaaaaggggattctgtgcccaataccatgaaatcaatgcacagaagattcagtcaatcaagaaaggtgcacagacactggccacacacactgacatttgtttgcagatgttccagtccccctgacttccaccaatccattcattcattccacaagcatttttgctggggtggaagcagggccatacagggtgtgtacatcacagatagggtgggtttgtataatgagtataaaaaacttctagcagaagatgacaaagtatatcaagaaagggctctcttcgaaatcacaccactgcactccagcctgggtaacagagggagattccatctaaa

SEQ ID NO: 423396 - DNA, 722 bp, Homo sapiens
agcgcgggcgcaggcgccgagaggcgcacgggagacctcaggcccagactccactccccagctgtgaaaggactgctggccagacccccaagctagcccgccaggcctccatagagctgcccagcatgactgcgtccagtaccaagagttggtgggagacgggtgaggtacaggctcagtctgcggccaagactccgtcctgcaaggatattgtggctggagacatgagcaagaaaagcctctgggagcagaagggaggctccaagacctcatcaacaattaagatggactctgtgactacatgactaataaaatatggcagaaatgacaccatgcagtttccaagcccaggccttaggagacaggcagcttccagttcagtcttttggagggtcagctctggggccctcagccatcacgcatggagtccaaccaccctgagacgtcatgctggagacccacctgtggatgccccagtcaagagtcctggctgagcccagcctcccagccacccccacccaaggcatcagaccacgaagcttctggccaaggcttcaccaacttcacttgatgctgtgaggaacagaactgcccatccaagccctgccagaatttctaacccacaaagccatgagtcacaataaatgccatgggacaaaaacaaaaaatgcatgttgcttttgtcatacattagtggtagttcatcgcacggcaatagaaaa

SEQ ID NO: 423397 - DNA, 330 bp, Homo sapiens
tctgccaggtactttggaagtagtggttagaaacatagacactggtcgggtgcagtggctcacgcctataatcccagcactttgggaggctgaggcaggtggatcacaaggccaggagtttgagactagcctggccaacacggtgaaaccctgtttctactaaaaatacaaaaattagccggctgtggtggtgcatgcctatgatcacagctactcaggaggctaaggcaggagagttgcttgaacccgggaggcggaggttgcagtgagttgagatcgcaccactgcactccagcctgggcaacagagcaagactccgtctcaaaacaa

SEQ ID NO: 423398 - DNA, 1090 bp, Homo sapiens
gccaatgtccctgtggccactcagctgagaccgagggcgacctgggcagctgcccggtgtctgtcacctccgtgtcccacatagatgccaggctctgcttctgtggttctggaggtcattagtcaattgtatgtggtgctgtctgtcctcctgattgcagaggaggaaggaaccccttaaatgagcgggttctgagtgctggggccgctggtctgctctgcctggtgggattctccagtgctggcttcatctgtgccccagccccactctcaccaacaaggagggcgtgaaaatgacaaggaatccatccctagagttcacaggagatctagggcagagtttccaagctgcagctgctctggccctgtgtgagctgctgctctgaggaagccccaggctgaggcagctaccaggcggaggctgggtttggaggcctccacatcagggaattgagcggtaggggtttcagccttcacgttggtcgccgcactgtatgggaagtggggtctggggtctgcttgcccagtctcaccgtcctcttcctccccaaagccgcctggataaggggctggccgcactggtgcgggagcgtggcgcggatctggtggtcatcgagggcatgggccgtgctgtccacacaaactaccacgcagccctgcgctgcgagagcctcaagctggccgtcatcaagaacgcgtggctggccgagcggctgggcggccggctcttcagcgtcatcttcaagtacgaggtcccagccgagtgaggcgctgcagctgccggactcttctgcttgtcacttgtcaggaatgtgtttttaccaccacagggaaactgcgttcaaatcaacgtatttatatggtactgctgtgacgcggcacatacaccccagccgcacagatgcgtgtgacccagaggcgagacgcagctttgtcctgggagacgttcatattggaatctatttaactgctaaagaaccttttatatatatatatatataaatagagagatctatacaggtatgtctgacgggacgcagcaccgtgggcacgcaccaaatagagtttttaaaagaggccggagccatctg

SEQ ID NO: 423399 - DNA, 2589 bp, Homo sapiens
tgatgagctggccgggcactttcaaaatggcggagtgtggagcgagcggcagcgggagcagcggggacagtctggacaagagcatcacgctgccccccgacgagatcttccgcaacctggagaacgccaagcgcttcgccatcgacataggacacagaacgtgaacatgagccgccctatgagatttcagttcaagaagagatcactgctcgactgcacttcattaagtttgagaatacctacatcgaagcctgcctggacttcatcaaagaccatctcgtcaacacagagaccaaggtcatccaggcgaccgggggcggggcctacaagttcaaggacctcatcgaagagaagctgcggctgaaagtcgacaaggaggacgtgatgacgtgcctgattaaggggtgcaacttcgtgctcaagaacatcccccatgaggccttcgtgtaccagaaggattccgaccctgagttccggttccagaccaaccacccccacattttcccctatcttcttgtcaatatcggctctggagtctccatcgtgaaggtggagacggaggacaggttcgagtgggtcggcggcagctccattggaggcggcaccttctgggggcttggcgctctgctcaccaaaacgaagaagtttgacgagctcctgcacctggcctcgaggggccagcacagcaatgtggacatgctggtgcgggacgtctacggcggcgcccaccagactctcgggctgagcgggaacctcatcgccagcagcttcgggaagtcggccaccgccgaccaagagttctccaaagaagacatggcgaagagcctgctgcacatgatcagcaacgacattgggcagctggcctgcctccacgcacggctgcacagcctggaccgcgtgtactttggaggcttctttatccggggccaccccgtgaccatgcgcaccatcacctatagcatcaacttcttctccaagggggaagtgcaggcgctgtttctgaggcacgaaggctacctgggagccatcggagcgttcctgaaaggagctgagcaggacaatcctaaccagtacagctggggagagaactatgcaggcagctccgggctgatgagtgcatcacccgagctcggcccggcgcagcgggcgcggagtggcacttttgacttgctggaaatggaccggctggagaggccactggttgacctgccgctcctcctggacccgccctcctacgtgcccgacacggtggacctcaccgatgacgctctggcccgaaaatactggctcacctgctttgaggaggccctggacggggtagtgaagcgcgcagtggcgagccagccagactctgtggatgcagccgagagggcggagaagttccggcagaagtactggaacaagcttcagaccctgaggcagcagcccttcgcctatgggaccctgaccgtgcgcagcctgctggacaccagggagcactgtctgaacgagttcaacttcccggatccctactccaaagtgaagcagcgggagaatggcgtggcgctgaggtgcttccccggggtcgtgcgctccctggacgcgctgggctgggaggaacggcagctggcgctggtgaaaggcctcctggcggggaatgtcttcgactggggggccaaagccgtgtctgctgtccttgaatccgacccctactttgggtttgaagaagcaaagaggaagttacaagaaagaccctggctcgtggattcctacagcgagtggcttcagagattaaaggggccccctcataaatgtgccttaattttcgcagataacagtggaatagacatcattttgggagtcttcccctttgtcagggagctactccttagagggacagaggtcatcctggcgtgcaactcaggccccgccctgaacgacgtgacccacagcgagtccctcatcgtggcagagcgtattgcgggcatggaccctgtcgtgcactctgcgctccaggaagagaggctgctgctggtgcagacgggctccagctccccgtgcctcgacctcagccgcctggataaggggctggccgcactggtgcgggagcgtggcgcggatctggtggtcatcgagggcatgggccgtgctgtccacacaaactaccacgcagccctgcgctgcgagagcctcaagctggccgtcatcaagaacgcgtggctggccgagcggctgggcggccggctcttcagcgtcatcttcaagtacgaggtcccagccgagtgaggcgctgcagctgccggactcttctgcttgtcacttgtcaggaatgtgtttttaccaccacagggaaactgcgttcaaatcaacgtatttatatggtactgctgtgacgcggcacatacaccccagccgcacagatgcgtgtgacccagaggcgagacgcagctttgtcctgggagacgttcatattggaatctatttaactgctaaagaaccttttatatatatatatatataaatagagagatctatacaggtatgtctgacgggacgcagcaccgtgggcacgcaccaaatagagtttttaaaagaggccggagccatctg

SEQ ID NO: 423400 - DNA, 1648 bp, Homo sapiens
gacgcaaccccagtgtcaaaccagggggtaagtcaaggtatccggctcaggccgccgggcagctgagggggcccagtgggggtctcgtctgtggcccagagacgtggcggaagaaggcagtacatctcccttcttagagagagagtggaagcttctgagtgtggcttgggtcgttctgaaccatggtgacgtttccaccctgccactgcctgtcttccagtttgacttgctggaaatggaccggctggagaggccactggttgacctgccgctcctcctggacccgccctcctacgtgcccgacacggtggacctcaccgatgacgctctggcccgaaaatactggctcacctgctttgaggaggccctggacggggtagtgaagcgcgcagtggcgagccagccagactctgtggatgcagccgagagggcggagaagttccggcagaagtactggaacaagcttcagaccctgaggcagcagcccttcgcctatgggaccctgaccgtgcgcagcctgctggacaccagggagcactgtctgaacgagttcaacttcccggatccctactccaaagtgaagcagcgggagaatggcgtggcgctgaggtgcttccccggggtcgtgcgctccctggacgcgctgggctgggaggaacggcagctggcgctggtgaaaggcctcctggcggggaatgtcttcgactggggggccaaagccgtgtctgctgtccttgaatccgacccctactttgggtttgaagaagcaaagaggaagttacaagaaagaccctggctcgtggattcctacagcgagtggcttcagagattaaaggggccccctcataaatgtgccttaattttcgcagataacagtggaatagacatcattttgggagtcttcccctttgtcagggagctactccttagagggacagaggtcatcctggcgtgcaactcaggccccgccctgaacgacgtgacccacagcgagtccctcatcgtggcagagcgtattgcgggcatggaccctgtcgtgcactctgcgctccaggaagagaggctgctgctggtgcagacgggctccagctccccgtgcctcgacctcagccgcctggataaggggctggccgcactggtgcgggagcgtggcgcggatctggtggtcatcgagggcatgggccgtgctgtccacacaaactaccacgcagccctgcgctgcgagagcctcaagctggccgtcatcaagaacgcgtggctggccgagcggctgggcggccggctcttcagcgtcatcttcaagtacgaggtcccagccgagtgaggcgctgcagctgccggactcttctgcttgtcacttgtcaggaatgtgtttttaccaccacagggaaactgcgttcaaatcaacgtatttatatggtactgctgtgacgcggcacatacaccccagccgcacagatgcgtgtgacccagaggcgagacgcagctttgtcctgggagacgttcatattggaatctatttaactgctaaagaaccttttatatatatatatatataaatagagagatctatacaggtatgtctgacgggacgcagcaccgtgggcacgcaccaaatagagtttttaaaagaggccggagccatctg

SEQ ID NO: 423401 - DNA, 2287 bp, Homo sapiens
tgatgagctggccgggcactttcaaaatggcggagtgtggagcgagcggcagcgggagcagcggggacagtctggacaagagcatcacgctgccccccgacgagatcttccgcaacctggagaacgccaagcgcttcgccatcgacataggcgggtcgttaaccaagctggcctactattcaacggtacagcacaaagtcgccaaggtgcggtctttcgaccactccggaaaggacacagaacgtgaacatgagccgccctatgagatttcagttcaagaagagatcactgctcgactgcacttcattaagtttgagaatacctacatcgaagcctgcctggacttcatcaaagaccatctcgtcaacacagagaccaaggtcatccaggcgaccgggggcggggcctacaagttcaaggacctcatcgaagagaagctgcggctgaaagtcgacaaggaggacgtgatgacgtgcctgattaaggggtgcaacttcgtgctcaagaacatcccccatgaggccttcgtgtaccagaaggattccgaccctgagttccggttccagaccaaccacccccacattttcccctatcttcttgtcaatatcggctctggagtctccatcgtgaaggtggagacggaggacaggttcgagtgggtcggcggcagctccattggaggcggcaccttctgggggcttggcgctctgctcaccaaaacgaagaagtttgacgagctcctgcacctggcctcgaggggccagcacagcaatgtggacatgctggtgcgggacgtctacggcggcgcccaccagactctcgggctgagcgggaacctcatcgccagcagcttcgggaagtcggccaccgccgaccaagagttctccaaagaagacatggcgaagagcctgctgcacatgatcagcaacgacattgggcagctggcctgcctccacgcacggctgcacagcctggaccgcgtgtactttggaggcttctttatccggggccaccccgtgaccatgcgcaccatcacctatagcatcaacttcttctccaagggggaagtgcaggcgctgtttctgaggcacgaaggctacctgggagccatcggagcgttcctgaaaggagctgagcaggacaatcctaaccagtacagctggggagagaactatgcaggcagctccgggctgatgagtgcatcacccgagctcggcccggcgcagcgggcgcggagtggcacttttgacttgctggaaatggaccggctggagaggccactggttgacctgccgctcctcctggacccgccctcctacgtgcccgacacggtggacctcaccgatgacgctctggcccgaaaatactggctcacctgctttgaggaggccctggacggggtagtgaagcgcgcagtggcgagccagccagactctgtggatgcagccgagagggcggagaagttccggcagaagtactggaacaagcttcagaccctgaggcagcagcccttcgcctatgggaccctgaccgtgcgcagcctgctggacaccagggagcactgtctgaacgagttcaacttcccggatccctactccaaagtgaagcagcgggagaatggcgtggcgctgaggtgcttccccggggtcgtgcgctccctggacgcgctgggctgggaggaacggcagctggcgctggtgaaaggcctcctggcggggaatgtcttcgactggggggccaaagccgtgtctgcgtaggtgtctgcgggctcggagcaggctctgcagcctgtgggtgcctgtcctgccccaggcttgcgggcaaggaggtggagcgggtcccttgggggtcacatggcgcttggtggcttggtggctcagggctttggggcccagggagtgcacatggcagcagcgccaggggctgggcagggcgcagcgcccttgtctgtcccctcaggttctgaggaggccccttccttaagcatgggtgccgcagaggcctaagggtgtggatttgaaaatcggggctggcattttctattgtcagaatccaaattcatgtttcctatgtgtggtaggaattaaacatttctgatgtgatgatcaaagggtgctttgcaaagcagtcccctagactggcctgtaggacacgcaggtgtctagcacctggcgccgtctcctggggctctgaatcttgaaaatgaacccccccaccatcatttaccttcactcccaaagaagctgcttccagtctctgggcctccccaggcggccgcaccacctct

SEQ ID NO: 423402 - DNA, 2672 bp, Homo sapiens
tgatgagctggccgggcactttcaaaatggcggagtgtggagcgagcggcagcgggagcagcggggacagtctggacaagagcatcacgctgccccccgacgagatcttccgcaacctggagaacgccaagcgcttcgccatcgacataggcgggtcgttaaccaagctggcctactattcaacggtacagcacaaagtcgccaaggtgcggtctttcgaccactccggaaaggacacagaacgtgaacatgagccgccctatgagatttcagttcaagaagagatcactgctcgactgcacttcattaagtttgagaatacctacatcgaagcctgcctggacttcatcaaagaccatctcgtcaacacagagaccaaggtcatccaggcgaccgggggcggggcctacaagttcaaggacctcatcgaagagaagctgcggctgaaagtcgacaaggaggacgtgatgacgtgcctgattaaggggtgcaacttcgtgctcaagaacatcccccatgaggccttcgtgtaccagaaggattccgaccctgagttccggttccagaccaaccacccccacattttcccctatcttcttgtcaatatcggctctggagtctccatcgtgaaggtggagacggaggacaggttcgagtgggtcggcggcagctccattggaggcggcaccttctgggggcttggcgctctgctcaccaaaacgaagaagtttgacgagctcctgcacctggcctcgaggggccagcacagcaatgtggacatgctggtgcgggacgtctacggcggcgcccaccagactctcgggctgagcgggaacctcatcgccagcagcttcgggaagtcggccaccgccgaccaagagttctccaaagaagacatggcgaagagcctgctgcacatgatcagcaacgacattgggcagctggcctgcctccacgcacggctgcacagcctggaccgcgtgtactttggaggcttctttatccggggccaccccgtgaccatgcgcaccatcacctatagcatcaacttcttctccaagggggaagtgcaggcgctgtttctgaggcacgaaggctacctgggagccatcggagcgttcctgaaaggagctgagcaggacaatcctaaccagtacagctggggagagaactatgcaggcagctccgggctgatgagtgcatcacccgagctcggcccggcgcagcgggcgcggagtggcacttttgacttgctggaaatggaccggctggagaggccactggttgacctgccgctcctcctggacccgccctcctacgtgcccgacacggtggacctcaccgatgacgctctggcccgaaaatactggctcacctgctttgaggaggccctggacggggtagtgaagcgcgcagtggcgagccagccagactctgtggatgcagccgagagggcggagaagttccggcagaagtactggaacaagcttcagaccctgaggcagcagcccttcgcctatgggaccctgaccgtgcgcagcctgctggacaccagggagcactgtctgaacgagttcaacttcccggatccctactccaaagtgaagcagcgggagaatggcgtggcgctgaggtgcttccccggggtcgtgcgctccctggacgcgctgggctgggaggaacggcagctggcgctggtgaaaggcctcctggcggggaatgtcttcgactggggggccaaagccgtgtctgctgtccttgaatccgacccctactttgggtttgaagaagcaaagaggaagttacaagaaagaccctggctcgtggattcctacagcgagtggcttcagagattaaaggggccccctcataaatgtgccttaattttcgcagataacagtggaatagacatcattttgggagtcttcccctttgtcagggagctactccttagagggacagaggtcatcctggcgtgcaactcaggccccgccctgaacgacgtgacccacagcgagtccctcatcgtggcagagcgtattgcgggcatggaccctgtcgtgcactctgcgctccaggaagagaggctgctgctggtgcagacgggctccagctccccgtgcctcgacctcagccgcctggataaggggctggccgcactggtgcgggagcgtggcgcggatctggtggtcatcgagggcatgggccgtgctgtccacacaaactaccacgcagccctgcgctgcgagagcctcaagctggccgtcatcaagaacgcgtggctggccgagcggctgggcggccggctcttcagcgtcatcttcaagtacgaggtcccagccgagtgaggcgctgcagctgccggactcttctgcttgtcacttgtcaggaatgtgtttttaccaccacagggaaactgcgttcaaatcaacgtatttatatggtactgctgtgacgcggcacatacaccccagccgcacagatgcgtgtgacccagaggcgagacgcagctttgtcctgggagacgttcatattggaatctatttaactgctaaagaaccttttatatatatatatatataaatagagagatctatacaggtatgtctgacgggacgcagcaccgtgggcacgcaccaaatagagtttttaaaagaggccggagccatctg

SEQ ID NO: 423403 - DNA, 3110 bp, Homo sapiens
ggccgtcctgggtggctgggggccggggtccagcgttacccgccgcgaggtgggagggtcggcggaattttatgtcttcggccacatcggcatctgggcgccccggctccgccgcttggctggtggctggcctgagatttggggtccttagttctggtcgagacgaggacgagctcggcgggaagcccttggcagagtggccccgaaaaggccgcgcgttcccgcggcgtggccagctgtggcccgcgggccggacagtccgtgcacaggccccgctctctggagagtggacgccgggcgtgagttcaggcggccgtggacgtgggacctgggaactcgtgcctctggtttaaaagccacccgtgccttccgtggcctttaaggcggcctgcacttctgccctggcctctccagggtccgctgcagaccctcctgcctgatggctgtgctctcagtaatgacggcgggccaggctctgttctagacctttttcccacgctcctgactcccggacacctcccagccacctctaggggaggaacgcgaattactcccttttcgcagatgaggataccaagccccagaaaggcgggtcgttaaccaagctggcctactattcaacggtacagcacaaagtcgccaaggtgcggtctttcgaccactccggaaaggacacagaacgtgaacatgagccgccctatgagatttcagttcaagaagagatcactgctcgactgcacttcattaagtttgagaatacctacatcgaagcctgcctggacttcatcaaagaccatctcgtcaacacagagaccaaggtcatccaggcgaccgggggcggggcctacaagttcaaggacctcatcgaagagaagctgcggctgaaagtcgacaaggaggacgtgatgacgtgcctgattaaggggtgcaacttcgtgctcaagaacatcccccatgaggccttcgtgtaccagaaggattccgaccctgagttccggttccagaccaaccacccccacattttcccctatcttcttgtcaatatcggctctggagtctccatcgtgaaggtggagacggaggacaggttcgagtgggtcggcggcagctccattggaggcggcaccttctgggggcttggcgctctgctcaccaaaacgaagaagtttgacgagctcctgcacctggcctcgaggggccagcacagcaatgtggacatgctggtgcgggacgtctacggcggcgcccaccagactctcgggctgagcgggaacctcatcgccagcagcttcgggaagtcggccaccgccgaccaagagttctccaaagaagacatggcgaagagcctgctgcacatgatcagcaacgacattgggcagctggcctgcctccacgcacggctgcacagcctggaccgcgtgtactttggaggcttctttatccggggccaccccgtgaccatgcgcaccatcacctatagcatcaacttcttctccaagggggaagtgcaggcgctgtttctgaggcacgaaggctacctgggagccatcggagcgttcctgaaaggagctgagcaggacaatcctaaccagtacagctggggagagaactatgcaggcagctccgggctgatgagtgcatcacccgagctcggcccggcgcagcgggcgcggagtggcacttttgacttgctggaaatggaccggctggagaggccactggttgacctgccgctcctcctggacccgccctcctacgtgcccgacacggtggacctcaccgatgacgctctggcccgaaaatactggctcacctgctttgaggaggccctggacggggtagtgaagcgcgcagtggcgagccagccagactctgtggatgcagccgagagggcggagaagttccggcagaagtactggaacaagcttcagaccctgaggcagcagcccttcgcctatgggaccctgaccgtgcgcagcctgctggacaccagggagcactgtctgaacgagttcaacttcccggatccctactccaaagtgaagcagcgggagaatggcgtggcgctgaggtgcttccccggggtcgtgcgctccctggacgcgctgggctgggaggaacggcagctggcgctggtgaaaggcctcctggcggggaatgtcttcgactggggggccaaagccgtgtctgctgtccttgaatccgacccctactttgggtttgaagaagcaaagaggaagttacaagaaagaccctggctcgtggattcctacagcgagtggcttcagagattaaaggggccccctcataaatgtgccttaattttcgcagataacagtggaatagacatcattttgggagtcttcccctttgtcagggagctactccttagagggacagaggtcatcctggcgtgcaactcaggccccgccctgaacgacgtgacccacagcgagtccctcatcgtggcagagcgtattgcgggcatggaccctgtcgtgcactctgcgctccaggaagagaggctgctgctggtgcagacgggctccagctccccgtgcctcgacctcagccgcctggataaggggctggccgcactggtgcgggagcgtggcgcggatctggtggtcatcgagggcatgggccgtgctgtccacacaaactaccacgcagccctgcgctgcgagagcctcaagctggccgtcatcaagaacgcgtggctggccgagcggctgggcggccggctcttcagcgtcatcttcaagtacgaggtcccagccgagtgaggcgctgcagctgccggactcttctgcttgtcacttgtcaggaatgtgtttttaccaccacagggaaactgcgttcaaatcaacgtatttatatggtactgctgtgacgcggcacatacaccccagccgcacagatgcgtgtgacccagaggcgagacgcagctttgtcctgggagacgttcatattggaatctatttaactgctaaagaaccttttatatatatatatatataaatagagagatctatacaggtatgtctgacgggacgcagcaccgtgggcacgcaccaaatagagtttttaaaagaggccggagccatctg

SEQ ID NO: 423404 - DNA, 1245 bp, Homo sapiens
ctgcggctgaaagtcgacaaggaggacgtgatgacgtgcctgaacgacgtgacccacagcgagtccctcatcgtggcagagcgtattgcgggcatggaccctgtcgtgcgcagcctgctggacaccagggagcactgtctgaacgagttcaacttcccggatccctactccaaagtgaagcagcgggagaatggcgtggcgctgaggtgcttccccggggtcgtgcgctccctggacgcgctgggctgggaggaacggcagctggcgctggtgaaaggcctcctggcggggaatgtcttcgactggggggccaaagccgtgtctgctgtccttgaatccgacccctactttgggtttgaagaagcaaagaggaagttacaagaaagaccctggctcgtggattcctacagcgagtggcttcagagattaaaggggccccctcataaatgtgccttaattttcgcagataacagtggaatagacatcattttgggagtcttcccctttgtcagggagctactccttagagggacagaggtcatcctggcgtgcaactcaggccccgccctgaacgacgtgacccacagcgagtccctcatcgtggcagagcgtattgcgggcatggaccctgtcgtgcactctgcgctccaggaagagaggctgctgctggtgcagacgggctccagctccccgtgcctcgacctcagccgcctggataaggggctggccgcactggtgcgggagcgtggcgcggatctggtggtcatcgagggcatgggccgtgctgtccacacaaactaccacgcagccctgcgctgcgagagcctcaagctggccgtcatcaagaacgcgtggctggccgagcggctgggcggccggctcttcagcgtcatcttcaagtacgaggtcccagccgagtgaggcgctgcagctgccggactcttctgcttgtcacttgtcaggaatgtgtttttaccaccacagggaaactgcgttcaaatcaacgtatttatatggtactgctgtgacgcggcacatacaccccagccgcacagatgcgtgtgacccagaggcgagacgcagctttgtcctgggagacgttcatattggaatctatttaactgctaaagaaccttttatatatatatatatataaatagagagatctatacaggtatgtctgacgggacgcagcaccgtgggcacgcaccaaatagagtttttaaaagaggccggagccatctg

SEQ ID NO: 423405 - DNA, 1152 bp, Homo sapiens
ttgtgaagagtacactttgaaacgtatcatgttctacgcacatgtgtagggtattattatagttcaagagaaagagggaacccgctggtgtctgagaagaaacccgctggtgtctgagaagaaacggtgaagggtgcactacgaagggaatataaactaatcaaacattcttgaatggcaatgacagtcactaaagttgacacttcctgcagtcttttagtttagaaaccacacttcccgagacgtcccccatcccaacagggataaaatcctctagctcaactcaggtatatccccactattgggccagggagacctgcggatggcgagagcaggttctcttaggagggtgtggattgtgagcttgtgcgctggcgaggagcagaaggtcagggaggcaccgtagttaatgaatcaataaaccaaacagccgatcaatcacttcctgcagtccgagtccggcgagggctaatcgattggtccgggtattttgaaaggaaaaacggcggtggatatgttgtcaaacggaggggtgcaggagaggcggggccaggcctccaggtgacccctctggcttcctgggcctgcagaggcgccgaaacgtgcaggcgccggcgtccatgaggcgtggggcgcgccgggcgagtccctgcttgcaggaggcgcccgagaggccgtcgcgtaccctggcaagaggagctggttagcacctcccgaccccgagaaggcccagggggcgcccggcgggcggggcggggaccgggcgaggcccgcctcccattggccgcatagcgccgcccagcgcgggccgccgttataaagcagccgccggcgccgggtgcctcacagcacgctgccacgccgacgcagacccctctctgcacgccagcccgcccgcacccaccatggccacagttcagcagctggaaggaagatggcgcctggtggacagcaaaggctttgatgaatacatgaaggagctagggtgaggcacccggcctggcagcgcctgcaacgtggcgtgttgtgcggtcgtctgtccctaggtccccgtcagcgtgccagattctggggcaggagatgctcggcggcctacccccatcccctcccatcttccccaccacgcggccgttgggtgcagcgcgcgcagca

SEQ ID NO: 423406 - DNA, 383 bp, Homo sapiens
  misc_feature (364)..(364): n is a, c, g, or t
  misc_feature (383)..(383): n is a, c, g, or t
ggaccctctccctactgtatcctactcatggtgcattggttcagcatcaggagtgggatgggaaggaaagcacaataacaagaaaattgaaagatgggaaattagtggtggagtgtgtcatgaacaatgtcacctgtactcggatctatgaaaaagtagaataaaaattccatcatcactttggacaggagttaattaagagaatgaccaagctcagttcaatgagcaaatctccatactgtttctttcttttttttttcattactgtgttcaattatctttatcataaacattttacatgcagctatttcaaagtgtgttggattaattaggatcatccctttggttaataaataaatgtacngtagggagaggtccggccn

SEQ ID NO: 423407 - DNA, 311 bp, Homo sapiens
  misc_feature (12)..(12): n is a, c, g, or t
  misc_feature (15)..(15): n is a, c, g, or t
  misc_feature (18)..(18): n is a, c, g, or t
agctgaggtganctnggnacccgactacatacttccgcccgcacccaccatggccacagttcagcagctggaaggaagatggcgcctggtggacagcaaaggctttgatgaatacatgaaggagctaggagtgggaatagctttgcgaaaaatgggcgcaatggccaagccagattgtatcatcacttgtgatggtaaaaacctcaccataaaaactgagagcactttgaaaacaacacagttttcttgtaccctgggacggaagtatgtagtactacatacttccggaagtatgtagtcgggtaccgagc

SEQ ID NO: 423408 - DNA, 1888 bp, Homo sapiens
ttgtgaagagtacactttgaaacgtatcatgttctacgcacatgtgtagggtattattatagttcaagagaaagagggaacccgctggtgtctgagaagaaacccgctggtgtctgagaagaaacggtgaagggtgcactacgaagggaatataaactaatcaaacattcttgaatggcaatgacagtcactaaagttgacacttcctgcagtcttttagtttagaaaccacacttcccgagacgtcccccatcccaacagggataaaatcctctagctcaactcaggtatatccccactattgggccagggagacctgcggatggcgagagcaggttctcttaggagggtgtggattgtgagcttgtgcgctggcgaggagcagaaggtcagggaggcaccgtagttaatgaatcaataaaccaaacagccgatcaatcacttcctgcagtccgagtccggcgagggctaatcgattggtccgggtattttgaaaggaaaaacggcggtggatatgttgtcaaacggaggggtgcaggagaggcggggccaggcctccaggtgacccctctggcttcctgggcctgcagaggcgccgaaacgtgcaggcgccggcgtccatgaggcgtggggcgcgccgggcgagtccctgcttgcaggaggcgcccgagaggccgtcgcgtaccctggcaagaggagctggttagcacctcccgaccccgagaaggcccagggggcgcccggcgggcggggcggggaccgggcgaggcccgcctcccattggccgcatagcgccgcccagcgcgggccgccgttataaagcagccgccggcgccgggtgcctcacagcacgctgccacgccgacgcagacccctctctgcacgccagcccgcccgcacccaccatggccacagttcagcagctggaaggaagatggcgcctggtggacagcaaaggctttgatgaatacatgaaggagctaggagtgggaatagctttgcgaaaaatgggcgcaatggccaagccagattgtatcatcacttgtgatggtaaaaacctcaccataaaaactgagagcactttgaaaacaacacagttttcttgtaccctgggagagaagtttgaagaaaccacagctgatggcagaaaaactcagactgtctgcaactttacagatggtgcattggttcagcatcaggagtgggatgggaaggaaagcacaataacaagaaaattgaaagatgggaaattagtggtggagtgtgtcatgaacaatgtcacctgtactcggatctatgaaaaagtagaataaaaattccatcatcactttggacaggagttaattaagagaatgaccaagctcagttcaatgagcaaatctccatactgtttctttcttttttttttcattactgtgttcaattatctttatcataaacattttacatgcagctatttcaaagtgtgttggattaattaggatcatccctttggttaataaataaatgtgtttgtgctaatatatcttgtatgcattctttaaaccttacaggaaattagtgatgagttttaataattattaattgagtaaaggttggggcagtcttgagggtactatattgagatgacactctagcaatttatatagatagctactcttacaggaaatactgtaccaattatttaagcttgccctatactatttgaactttgtatgaattcaggaatcttgaatttctggcagagaccattctcaataaaaggtgactacaacataaactttattattcaaattagagcaaaggtttaattaaccagcattgactaaaatactttttgtgtgtatttatatacaaatataagtaatactatgtatggaataaccag

SEQ ID NO: 423409 - DNA, 1637 bp, Homo sapiens
ttgtgaagagtacactttgaaacgtatcatgttctacgcacatgtgtagggtattattatagttcaagagaaagagggaacccgctggtgtctgagaagaaacccgctggtgtctgagaagaaacggtgaagggtgcactacgaagggaatataaactaatcaaacattcttgaatggcaatgacagtcactaaagttgacacttcctgcagtcttttagtttagaaaccacacttcccgagacgtcccccatcccaacagggataaaatcctctagctcaactcaggtatatccccactattgggccagggagacctgcggatggcgagagcaggttctcttaggagggtgtggattgtgagcttgtgcgctggcgaggagcagaaggtcagggaggcaccgtagttaatgaatcaataaaccaaacagccgatcaatcacttcctgcagtccgagtccggcgagggctaatcgattggtccgggtattttgaaaggaaaaacggcggtggatatgttgtcaaacggaggggtgcaggagaggcggggccaggcctccaggtgacccctctggcttcctgggcctgcagaggcgccgaaacgtgcaggcgccggcgtccatgaggcgtggggcgcgccgggcgagtccctgcttgcaggaggcgcccgagaggccgtcgcgtaccctggcaagaggagctggttagcacctcccgaccccgagaaggcccagggggcgcccggcgggcggggcggggaccgggcgaggcccgcctcccattggccgcatagcgccgcccagcgcgggccgccgttataaagcagccgccggcgccgggtgcctcacagcacgctgccacgccgacgcagacccctctctgcacgccagcccgcccgcacccaccatggccacagttcagcagctggaaggaagatggcgcctggtggacagcaaaggctttgatgaatacatgaaggagctaggagtgggaatagctttgcgaaaaatgggcgcaatggccaagccagattgtatcatcacttgtgatggtaaaaacctcaccataaaaactgagagcactttgaaaacaacacagttttcttgtaccctgggagagaagtttgaagaaaccacagctgatggcagaaaaactcagactgtctgcaactttacagatggtgcattggttcagcatcaggagtgggatgggaaggaaagcacaataacaagaaaattgaaagatgggaaattagtggtggagtgtgtcatgaacaatgtcacctgtactcggatctatgaaaaagtagaataaaaattccatcatcactttggacaggagttaattaagagaatgaccaagctcagttcaatgagcaaatctccatactgtttctttcttttttttttcattactgtgttcaattatctttatcataaacattttacatgcagctatttcaaagtgtgttggattaattaggatcatccctttggttaataaataaatgtaaaaaacaacctttctcttttcctctaatttcataataaaataaactctagggggggcccggtcccattggcccttatggaggcgtataccaattaatgggccgctgtttaaaatcttttgactggg

SEQ ID NO: 423410 - DNA, 1834 bp, Homo sapiens
ttgtgaagagtacactttgaaacgtatcatgttctacgcacatgtgtagggtattattatagttcaagagaaagagggaacccgctggtgtctgagaagaaacccgctggtgtctgagaagaaacggtgaagggtgcactacgaagggaatataaactaatcaaacattcttgaatggcaatgacagtcactaaagttgacacttcctgcagtcttttagtttagaaaccacacttcccgagacgtcccccatcccaacagggataaaatcctctagctcaactcaggtatatccccactattgggccagggagacctgcggatggcgagagcaggttctcttaggagggtgtggattgtgagcttgtgcgctggcgaggagcagaaggtcagggaggcaccgtagttaatgaatcaataaaccaaacagccgatcaatcacttcctgcagtccgagtccggcgagggctaatcgattggtccgggtattttgaaaggaaaaacggcggtggatatgttgtcaaacggaggggtgcaggagaggcggggccaggcctccaggtgacccctctggcttcctgggcctgcagaggcgccgaaacgtgcaggcgccggcgtccatgaggcgtggggcgcgccgggcgagtccctgcttgcaggaggcgcccgagaggccgtcgcgtaccctggcaagaggagctggttagcacctcccgaccccgagaaggcccagggggcgcccggcgggcggggcggggaccgggcgaggcccgcctcccattggccgcatagcgccgcccagcgcgggccgccgttataaagcagccgccggcgccgggtgcctcacagcacgctgccacgccgacgcagacccctctctgcacgccagcccgcccgcacccaccatggccacagttcagcagctggaaggaagatggcgcctggtggacagcaaaggctttgatgaatacatgaaggagctaggagtgggaatagctttgcgaaaaatgggcgcaatggccaagccagattgtatcatcacttgtgatggtaaaaacctcaccataaaaactgagagcactttgaaaacaacacagttttcttgtaccctgggagagaagtttgaagaaaccacagctgatggcagaaaaactcagactgtctgcaactttacagatggtgcattggttcagcatcaggagtgggatgggaaggaaagcacaataacaagaaaattgaaagatgggaaattagtggtggagtgtgtcatgaacaatgtcacctgtactcggatctatgaaaaagtagaataaaaattccatcatcactttggacaggagttaattaagagaatgaccaagctcagttcaatgagcaaatctccatactgtttctttcttttttttttcattactgtgttcaattatctttatcataaacattttacatgcagctatttcaaagtgtgttggattaattaggatcatccctttggttaataaataaatgtagggtttactcacataacatgtgtcagtgagttcacctgccctgtgctgtttaccacgtcaactgcctgctctgcaaggccatccatgagcagatgaactgcaaggagtatcaggaggacctggcccctgcgggctcaaaacgactgtggctgccggcaaacgacaggagatgctgaaggtgatgcttgcacaagcggcgaggtcatgccctgcccagtgcagatcgtgtaccagaagaaaggcggttgcgactggatcccgtgacccggctgcaaacgagatctgatgtcccaagggcccactggggcctggggccagagacc

SEQ ID NO: 423411 - DNA, 1794 bp, Homo sapiens
caatcatgctgcgtaggttgtagtctcctcatttatgaaacagtgatttggcctggatctaagattccttatacatgttaactaactctaaggggaaagagatagatcataaattacatgttaacgttgaggggaaattgatagatcataaattaaaatataatttaatatgttatatatttctattgatttatatacctatgaaatagtttttatattgaaaggtaggattttttttcccatttgttagcatcatgattgtgctgctgagttttaaaagattgtgctatttgaatatctcaggatcaatttctattttgtgtagtctattaatcaaatatttatcgagaacatttatatgccagactgtgctggagtcatagaatgtaatggttggcagaatctagtaaaaagaaaaagattgagcaaactcctgaatttgcaattttgaatgctttatctccaccttctatcaactgctttgagtaaataaaatttggaagtccacatttcttccctaactttctgaaagccagcatagcatggtggccagagctcagatttggagccagggtgccagtgctcttggttcccagctccatcactttctagttgaatgatcttgggcaagttacttccgtgcctcgctttctcatcagtaaaatggagacagtaacatctgccttttacagggctgttgtaaggcttacctgaatttcatatatgtaaagtgctggctcataccgtgggatatatgtttacaatagttatcaataagcaaataagtgaaaatatgccgcacaaagtgattacaatggaattattgcttttatcatgtaaatgataactttggtcttcctgttatttaacatgacttaacattctacagggagtgggaatagctttgcgaaaaatgggcgcaatggccaagccagattgtatcatcacttgtgatggtaaaaacctcaccataaaaactgagagcactttgaaaacaacacagttttcttgtaccctgggagagaagtttgaagaaaccacagctgatggcagaaaaactcagactgtctgcaactttacagatggtgcattggttcagcatcaggagtgggatgggaaggaaagcacaataacaagaaaattgaaagatgggaaattagtggtggagtgtgtcatgaacaatgtcacctgtactcggatctatgaaaaagtagaataaaaattccatcatcactttggacaggagttaattaagagaatgaccaagctcagttcaatgagcaaatctccatactgtttctttcttttttttttcattactgtgttcaattatctttatcataaacattttacatgcagctatttcaaagtgtgttggattaattaggatcatccctttggttaataaataaatgtgtttgtgctaatatatcttgtatgcattctttaaaccttacaggaaattagtgatgagttttaataattattaattgagtaaaggttggggcagtcttgagggtactatattgagatgacactctagcaatttatatagatagctactcttacaggaaatactgtaccaattatttaagcttgccctatactatttgaactttgtatgaattcaggaatcttgaatttctggcagagaccattctcaataaaaggtgactacaacataaactttattattcaaattagagcaaaggtttaattaaccagcattgactaaaatactttttgtgtgtatttatatacaaatataagtaatactatgtatggaataaccag

SEQ ID NO: 423412 - DNA, 1050 bp, Homo sapiens
gccaggatccaaatccagatcagaagaacccatcagaatcatgacagtaccatcccctggaattcaagcctgacctccacagctctagctgccgtgtcccacccacagagcagatcctctaggtattttgttgtcttcagatccaggagtgggaatagctttgcgaaaaatgggcgcaatggccaagccagattgtatcatcacttgtgatggtaaaaacctcaccataaaaactgagagcactttgaaaacaacacagttttcttgtaccctgggagagaagtttgaagaaaccacagctgatggcagaaaaactcagactgtctgcaactttacagatggtgcattggttcagcatcaggagtgggatgggaaggaaagcacaataacaagaaaattgaaagatgggaaattagtggtggagtgtgtcatgaacaatgtcacctgtactcggatctatgaaaaagtagaataaaaattccatcatcactttggacaggagttaattaagagaatgaccaagctcagttcaatgagcaaatctccatactgtttctttcttttttttttcattactgtgttcaattatctttatcataaacattttacatgcagctatttcaaagtgtgttggattaattaggatcatccctttggttaataaataaatgtgtttgtgctaatatatcttgtatgcattctttaaaccttacaggaaattagtgatgagttttaataattattaattgagtaaaggttggggcagtcttgagggtactatattgagatgacactctagcaatttatatagatagctactcttacaggaaatactgtaccaattatttaagcttgccctatactatttgaactttgtatgaattcaggaatcttgaatttctggcagagaccattctcaataaaaggtgactacaacataaactttattattcaaattagagcaaaggtttaattaaccagcattgactaaaatactttttgtgtgtatttatatacaaatataagtaatactatgtatggaataaccag

SEQ ID NO: 423413 - DNA, 983 bp, Homo sapiens
atgtgtacgcgtatgtgttgcattcacacccatgtgcaggaagggggacgcgagatggcatgaaacacggcagaagcaggagtgggaatagctttgcgaaaaatgggcgcaatggccaagccagattgtatcatcacttgtgatggtaaaaacctcaccataaaaactgagagcactttgaaaacaacacagttttcttgtaccctgggagagaagtttgaagaaaccacagctgatggcagaaaaactcagactgtctgcaactttacagatggtgcattggttcagcatcaggagtgggatgggaaggaaagcacaataacaagaaaattgaaagatgggaaattagtggtggagtgtgtcatgaacaatgtcacctgtactcggatctatgaaaaagtagaataaaaattccatcatcactttggacaggagttaattaagagaatgaccaagctcagttcaatgagcaaatctccatactgtttctttcttttttttttcattactgtgttcaattatctttatcataaacattttacatgcagctatttcaaagtgtgttggattaattaggatcatccctttggttaataaataaatgtgtttgtgctaatatatcttgtatgcattctttaaaccttacaggaaattagtgatgagttttaataattattaattgagtaaaggttggggcagtcttgagggtactatattgagatgacactctagcaatttatatagatagctactcttacaggaaatactgtaccaattatttaagcttgccctatactatttgaactttgtatgaattcaggaatcttgaatttctggcagagaccattctcaataaaaggtgactacaacataaactttattattcaaattagagcaaaggtttaattaaccagcattgactaaaatactttttgtgtgtatttatatacaaatataagtaatactatgtatggaataaccag

SEQ ID NO: 423414 - DNA, 2427 bp, Homo sapiens
ttgtgaagagtacactttgaaacgtatcatgttctacgcacatgtgtagggtattattatagttcaagagaaagagggaacccgctggtgtctgagaagaaacccgctggtgtctgagaagaaacggtgaagggtgcactacgaagggaatataaactaatcaaacattcttgaatggcaatgacagtcactaaagttgacacttcctgcagtcttttagtttagaaaccacacttcccgagacgtcccccatcccaacagggataaaatcctctagctcaactcaggtatatccccactattgggccagggagacctgcggatggcgagagcaggttctcttaggagggtgtggattgtgagcttgtgcgctggcgaggagcagaaggtcagggaggcaccgtagttaatgaatcaataaaccaaacagccgatcaatcacttcctgcagtccgagtccggcgagggctaatcgattggtccgggtattttgaaaggaaaaacggcggtggatatgttgtcaaacggaggggtgcaggagaggcggggccaggcctccaggtgacccctctggcttcctgggcctgcagaggcgccgaaacgtgcaggcgccggcgtccatgaggcgtggggcgcgccgggcgagtccctgcttgcaggaggcgcccgagaggccgtcgcgtaccctggcaagaggagctggttagcacctcccgaccccgagaaggcccagggggcgcccggcgggcggggcggggaccgggcgaggcccgcctcccattggccgcatagcgccgcccagcgcgggccgccgttataaagcagccgccggcgccgggtgcctcacagcacgctgccacgccgacgcagacccctctctgcacgccagcccgcccgcacccaccatggccacagttcagcagctggaaggaagatggcgcctggtggacagcaaaggctttgatgaatacatgaaggagctaggagtgggaatagctttgcgaaaaatgggcgcaatggccaagccagattgtatcatcacttgtgatggtaaaaacctcaccataaaaactgagagcactttgaaaacaacacagttttcttgtaccctgggagagaagtttgaagaaaccacagctgatggcagaaaaactcagactgtctgcaactttacagatggtgcattggttcagcatcaggagtgggatgggaaggaaagcacaataacaagaaaattgaaagatgggaaattagtggtggtaagtgtcaaactgctgtgtctcagtcagcttcttgtgtgcattcatagttcacataactgttctatatcattgatcattaacagaactcagtttggaagaaaaaaaagcaaaataacaagttaaatactagaacactaattattaagaaagtcctagtggagatagagaagtgacatgacataggagaggatttggctggagttggggggagttcttgctttgctgccacgtcacagtgaaatcttggcaagccaccaaactgcacacatttttctatatctttaaaataaggaatatttgccataaccaaaagaataaagatatattcaacacattagttttctgtaaaacatgcatattataagcaaaacaacagcttctggcttctctcaaacccgtgaattctgaaagaaattttctccatctatgaagtagattacgtgatttcgtgggactttgattctaatgttttaataccaccactgctctggaatctaaggctaacctaactcttttaatatctttccttcttctaggagtgtgtcatgaacaatgtcacctgtactcggatctatgaaaaagtagaataaaaattccatcatcactttggacaggagttaattaagagaatgaccaagctcagttcaatgagcaaatctccatactgtttctttcttttttttttcattactgtgttcaattatctttatcataaacattttacatgcagctatttcaaagtgtgttggattaattaggatcatccctttggttaataaataaatgtgtttgtgctaatatatcttgtatgcattctttaaaccttacaggaaattagtgatgagttttaataattattaattgagtaaaggttggggcagtcttgagggtactatattgagatgacactctagcaatttatatagatagctactcttacaggaaatactgtaccaattatttaagcttgccctatactatttgaactttgtatgaattcaggaatcttgaatttctggcagagaccattctcaataaaaggtgactacaacataaactttattattcaaattagagcaaaggtttaattaaccagcattgactaaaatactttttgtgtgtatttatatacaaatataagtaatactatgtatggaataaccag

SEQ ID NO: 423415 - DNA, 2761 bp, Homo sapiens
ttgtgaagagtacactttgaaacgtatcatgttctacgcacatgtgtagggtattattatagttcaagagaaagagggaacccgctggtgtctgagaagaaacccgctggtgtctgagaagaaacggtgaagggtgcactacgaagggaatataaactaatcaaacattcttgaatggcaatgacagtcactaaagttgacacttcctgcagtcttttagtttagaaaccacacttcccgagacgtcccccatcccaacagggataaaatcctctagctcaactcaggtatatccccactattgggccagggagacctgcggatggcgagagcaggttctcttaggagggtgtggattgtgagcttgtgcgctggcgaggagcagaaggtcagggaggcaccgtagttaatgaatcaataaaccaaacagccgatcaatcacttcctgcagtccgagtccggcgagggctaatcgattggtccgggtattttgaaaggaaaaacggcggtggatatgttgtcaaacggaggggtgcaggagaggcggggccaggcctccaggtgacccctctggcttcctgggcctgcagaggcgccgaaacgtgcaggcgccggcgtccatgaggcgtggggcgcgccgggcgagtccctgcttgcaggaggcgcccgagaggccgtcgcgtaccctggcaagaggagctggttagcacctcccgaccccgagaaggcccagggggcgcccggcgggcggggcggggaccgggcgaggcccgcctcccattggccgcatagcgccgcccagcgcgggccgccgttataaagcagccgccggcgccgggtgcctcacagcacgctgccacgccgacgcagacccctctctgcacgccagcccgcccgcacccaccatggccacagttcagcagctggaaggaagatggcgcctggtggacagcaaaggctttgatgaatacatgaaggagctaggagtgggaatagctttgcgaaaaatgggcgcaatggccaagccagattgtatcatcacttgtgatggtaaaaacctcaccataaaaactgagagcactttgaaaacaacacagttttcttgtaccctgggagagaagtttgaagaaaccacagctgatggcagaaaaactcaggtcagtcgtgacatgttatgaaatcacagaagcttctagaatgataggctgtatcaataacattttactgtttataggcaagaacttaatgaaaaagttattttatgaattgaattttgtcaaattagcaaaagtatcaacttcatcatagaattggcatcttttattagctactaggttgaaaaccacaaactattgtgaataaaatcaatatgggttaatgaagtagactcagaaaggagaaggtgaaacaaatgttgattaaggaggttatgagtcatggaaactcttgtaatgtacttggaagattaaaacgtttactttgtttttgcagactgtctgcaactttacagatggtgcattggttcagcatcaggagtgggatgggaaggaaagcacaataacaagaaaattgaaagatgggaaattagtggtggtaagtgtcaaactgctgtgtctcagtcagcttcttgtgtgcattcatagttcacataactgttctatatcattgatcattaacagaactcagtttggaagaaaaaaaagcaaaataacaagttaaatactagaacactaattattaagaaagtcctagtggagatagagaagtgacatgacataggagaggatttggctggagttggggggagttcttgctttgctgccacgtcacagtgaaatcttggcaagccaccaaactgcacacatttttctatatctttaaaataaggaatatttgccataaccaaaagaataaagatatattcaacacattagttttctgtaaaacatgcatattataagcaaaacaacagcttctggcttctctcaaacccgtgaattctgaaagaaattttctccatctatgaagtagattacgtgatttcgtgggactttgattctaatgttttaataccaccactgctctggaatctaaggctaacctaactcttttaatatctttccttcttctaggagtgtgtcatgaacaatgtcacctgtactcggatctatgaaaaagtagaataaaaattccatcatcactttggacaggagttaattaagagaatgaccaagctcagttcaatgagcaaatctccatactgtttctttcttttttttttcattactgtgttcaattatctttatcataaacattttacatgcagctatttcaaagtgtgttggattaattaggatcatccctttggttaataaataaatgtgtttgtgctaatatatcttgtatgcattctttaaaccttacaggaaattagtgatgagttttaataattattaattgagtaaaggttggggcagtcttgagggtactatattgagatgacactctagcaatttatatagatagctactcttacaggaaatactgtaccaattatttaagcttgccctatactatttgaactttgtatgaattcaggaatcttgaatttctggcagagaccattctcaataaaaggtgactacaacataaactttattattcaaattagagcaaaggtttaattaaccagcattgactaaaatactttttgtgtgtatttatatacaaatataagtaatactatgtatggaataaccag

SEQ ID NO: 423416 - DNA, 2333 bp, Homo sapiens
caatcatgctgcgtaggttgtagtctcctcatttatgaaacagtgatttggcctggatctaagattccttatacatgttaactaactctaaggggaaagagatagatcataaattacatgttaacgttgaggggaaattgatagatcataaattaaaatataatttaatatgttatatatttctattgatttatatacctatgaaatagtttttatattgaaaggtaggattttttttcccatttgttagcatcatgattgtgctgctgagttttaaaagattgtgctatttgaatatctcaggatcaatttctattttgtgtagtctattaatcaaatatttatcgagaacatttatatgccagactgtgctggagtcatagaatgtaatggttggcagaatctagtaaaaagaaaaagattgagcaaactcctgaatttgcaattttgaatgctttatctccaccttctatcaactgctttgagtaaataaaatttggaagtccacatttcttccctaactttctgaaagccagcatagcatggtggccagagctcagatttggagccagggtgccagtgctcttggttcccagctccatcactttctagttgaatgatcttgggcaagttacttccgtgcctcgctttctcatcagtaaaatggagacagtaacatctgccttttacagggctgttgtaaggcttacctgaatttcatatatgtaaagtgctggctcataccgtgggatatatgtttacaatagttatcaataagcaaataagtgaaaatatgccgcacaaagtgattacaatggaattattgcttttatcatgtaaatgataactttggtcttcctgttatttaacatgacttaacattctacagggagtgggaatagctttgcgaaaaatgggcgcaatggccaagccagattgtatcatcacttgtgatggtaaaaacctcaccataaaaactgagagcactttgaaaacaacacagttttcttgtaccctgggagagaagtttgaagaaaccacagctgatggcagaaaaactcagactgtctgcaactttacagatggtgcattggttcagcatcaggagtgggatgggaaggaaagcacaataacaagaaaattgaaagatgggaaattagtggtggtaagtgtcaaactgctgtgtctcagtcagcttcttgtgtgcattcatagttcacataactgttctatatcattgatcattaacagaactcagtttggaagaaaaaaaagcaaaataacaagttaaatactagaacactaattattaagaaagtcctagtggagatagagaagtgacatgacataggagaggatttggctggagttggggggagttcttgctttgctgccacgtcacagtgaaatcttggcaagccaccaaactgcacacatttttctatatctttaaaataaggaatatttgccataaccaaaagaataaagatatattcaacacattagttttctgtaaaacatgcatattataagcaaaacaacagcttctggcttctctcaaacccgtgaattctgaaagaaattttctccatctatgaagtagattacgtgatttcgtgggactttgattctaatgttttaataccaccactgctctggaatctaaggctaacctaactcttttaatatctttccttcttctaggagtgtgtcatgaacaatgtcacctgtactcggatctatgaaaaagtagaataaaaattccatcatcactttggacaggagttaattaagagaatgaccaagctcagttcaatgagcaaatctccatactgtttctttcttttttttttcattactgtgttcaattatctttatcataaacattttacatgcagctatttcaaagtgtgttggattaattaggatcatccctttggttaataaataaatgtgtttgtgctaatatatcttgtatgcattctttaaaccttacaggaaattagtgatgagttttaataattattaattgagtaaaggttggggcagtcttgagggtactatattgagatgacactctagcaatttatatagatagctactcttacaggaaatactgtaccaattatttaagcttgccctatactatttgaactttgtatgaattcaggaatcttgaatttctggcagagaccattctcaataaaaggtgactacaacataaactttattattcaaattagagcaaaggtttaattaaccagcattgactaaaatactttttgtgtgtatttatatacaaatataagtaatactatgtatggaataaccag

SEQ ID NO: 423417 - DNA, 1274 bp, Homo sapiens
ttgtgaagagtacactttgaaacgtatcatgttctacgcacatgtgtagggtattattatagttcaagagaaagagggaacccgctggtgtctgagaagaaacccgctggtgtctgagaagaaacggtgaagggtgcactacgaagggaatataaactaatcaaacattcttgaatggcaatgacagtcactaaagttgacacttcctgcagtcttttagtttagaaaccacacttcccgagacgtcccccatcccaacagggataaaatcctctagctcaactcaggtatatccccactattgggccagggagacctgcggatggcgagagcaggttctcttaggagggtgtggattgtgagcttgtgcgctggcgaggagcagaaggtcagggaggcaccgtagttaatgaatcaataaaccaaacagccgatcaatcacttcctgcagtccgagtccggcgagggctaatcgattggtccgggtattttgaaaggaaaaacggcggtggatatgttgtcaaacggaggggtgcaggagaggcggggccaggcctccaggtgacccctctggcttcctgggcctgcagaggcgccgaaacgtgcaggcgccggcgtccatgaggcgtggggcgcgccgggcgagtccctgcttgcaggaggcgcccgagaggccgtcgcgtaccctggcaagaggagctggttagcacctcccgaccccgagaaggcccagggggcgcccggcgggcggggcggggaccgggcgaggcccgcctcccattggccgcatagcgccgcccagcgcgggccgccgttataaagcagccgccggcgccgggtgcctcacagcacgctgccacgccgacgcagacccctctctgcacgccagcccgcccgcacccaccatggccacagttcagcagctggaaggaagatggcgcctggtggacagcaaaggctttgatgaatacatgaaggagctaggagtgggaatagctttgcgaaaaatgggcgcaatggccaagccagattgtatcatcacttgtgatggtaaaaacctcaccataaaaactgagagcactttgaaaacaacacagttttcttgtaccctgggaggtccaggccctggaccctctctgcaactccccgatgttgcaggtggcacccaaataaatgaatcaagaaaagtaaatattttgaagaaggtgataaattgatgaagtcagtacaaacatatagatatacctacatagtagctaagtgaattgacagag

SEQ ID NO: 423418 - DNA, 722 bp, Homo sapiens
  misc_feature (12)..(12): n is a, c, g, or t
  misc_feature (15)..(15): n is a, c, g, or t
  misc_feature (18)..(18): n is a, c, g, or t
agctgaggtganctnggnacccgactacatacttccgcccgcacccaccatggccacagttcagcagctggaaggaagatggcgcctggtggacagcaaaggctttgatgaatacatgaaggagctaggagtgggaatagctttgcgaaaaatgggcgcaatggccaagccagattgtatcatcacttgtgatggtaaaaacctcaccataaaaactgagagcactttgaaaacaacacagttttcttgtaccctgggagagaagtttgaagaaaccacagctgatggcagaaaaactcagactgtctgcaactttacagatggtgcattggttcagcatcaggagtgggatgggaaggaaagcacaataacaagaaaattgaaagatgggaaattagtggtggagtgtgtcatgaacaatgtcacctgtactcggaagtatgtagtcgactacatacttccgggcctttgcccaggctgtttcctctgccggggactccttttccttccacccattctctcttgctaatttttacttattgttctgtgtctgtctttctctttctttctttcttttctttctttctttctttcttccttccttcctttctttcttcctcttctttctctctctccttctttcttttctttttctttctttcttttctttctttcttctttctttctttccttctttccttctttcttcggaagtatgtagt

SEQ ID NO: 423419 - DNA, 1172 bp, Homo sapiens
ttgtgaagagtacactttgaaacgtatcatgttctacgcacatgtgtagggtattattatagttcaagagaaagagggaacccgctggtgtctgagaagaaacccgctggtgtctgagaagaaacggtgaagggtgcactacgaagggaatataaactaatcaaacattcttgaatggcaatgacagtcactaaagttgacacttcctgcagtcttttagtttagaaaccacacttcccgagacgtcccccatcccaacagggataaaatcctctagctcaactcaggtatatccccactattgggccagggagacctgcggatggcgagagcaggttctcttaggagggtgtggattgtgagcttgtgcgctggcgaggagcagaaggtcagggaggcaccgtagttaatgaatcaataaaccaaacagccgatcaatcacttcctgcagtccgagtccggcgagggctaatcgattggtccgggtattttgaaaggaaaaacggcggtggatatgttgtcaaacggaggggtgcaggagaggcggggccaggcctccaggtgacccctctggcttcctgggcctgcagaggcgccgaaacgtgcaggcgccggcgtccatgaggcgtggggcgcgccgggcgagtccctgcttgcaggaggcgcccgagaggccgtcgcgtaccctggcaagaggagctggttagcacctcccgaccccgagaaggcccagggggcgcccggcgggcggggcggggaccgggcgaggcccgcctcccattggccgcatagcgccgcccagcgcgggccgccgttataaagcagccgccggcgccgggtgcctcacagcacgctgccacgccgacgcagacccctctctgcacgccagcccgcccgcacccaccatggccacagttcagcagctggaaggaagatggcgcctggtggacagcaaaggctttgatgaatacatgaaggagctaggagtgggaatagctttgcgaaaaatgggcgcaatggccaagccatgagatttccttcatactgggccaggaatttgacgaagtcactgcagatgacaggaaagtcaagagcaccataaccttagatgggggtgtcctggtacatgtgcagaaatgggatggaaaatcaaccaccataaagagaaaacg

SEQ ID NO: 423420 - DNA, 1670 bp, Homo sapiens
ttgtgaagagtacactttgaaacgtatcatgttctacgcacatgtgtagggtattattatagttcaagagaaagagggaacccgctggtgtctgagaagaaacccgctggtgtctgagaagaaacggtgaagggtgcactacgaagggaatataaactaatcaaacattcttgaatggcaatgacagtcactaaagttgacacttcctgcagtcttttagtttagaaaccacacttcccgagacgtcccccatcccaacagggataaaatcctctagctcaactcaggtatatccccactattgggccagggagacctgcggatggcgagagcaggttctcttaggagggtgtggattgtgagcttgtgcgctggcgaggagcagaaggtcagggaggcaccgtagttaatgaatcaataaaccaaacagccgatcaatcacttcctgcagtccgagtccggcgagggctaatcgattggtccgggtattttgaaaggaaaaacggcggtggatatgttgtcaaacggaggggtgcaggagaggcggggccaggcctccaggtgacccctctggcttcctgggcctgcagaggcgccgaaacgtgcaggcgccggcgtccatgaggcgtggggcgcgccgggcgagtccctgcttgcaggaggcgcccgagaggccgtcgcgtacccatggccacagttcagcagctggaaggaagatggcgcctggtggacagcaaaggctttgatgaatacatgaaggagctaggagtgggaatagctttgcgaaaaatgggcgcaatggccaagccagattgtatcatcacttgtgatggtaaaaacctcaccataaaaactgagagcactttgaaaacaacacagttttcttgtaccctgggagagaagtttgaagaaaccacagctgatggcagaaaaactcagactgtctgcaactttacagatggtgcattggttcagcatcaggagtgggatgggaaggaaagcacaataacaagaaaattgaaagatgggaaattagtggtggagtgtgtcatgaacaatgtcacctgtactcggatctatgaaaaagtagaataaaaattccatcatcactttggacaggagttaattaagagaatgaccaagctcagttcaatgagcaaatctccatactgtttctttcttttttttttcattactgtgttcaattatctttatcataaacattttacatgcagctatttcaaagtgtgttggattaattaggatcatccctttggttaataaataaatgtgtttgtgctaatatatcttgtatgcattctttaaaccttacaggaaattagtgatgagttttaataattattaattgagtaaaggttggggcagtcttgagggtactatattgagatgacactctagcaatttatatagatagctactcttacaggaaatactgtaccaattatttaagcttgccctatactatttgaactttgtatgaattcaggaatcttgaatttctggcagagaccattctcaataaaaggtgactacaacataaactttattattcaaattagagcaaaggtttaattaaccagcattgactaaaatactttttgtgtgtatttatatacaaatataagtaatactatgtatggaataaccag

SEQ ID NO: 423421 - DNA, 1103 bp, Homo sapiens
cacactgaaatcaaactcacgtattcaaattttttttagattggcagaagcaggaagcacacagcacgctgccacgccgacgcagacccctctctgcacgccagcccgcccgcacccaccatggccacagttcagcagctggaaggaagatggcgcctggtggacagcaaaggctttgatgaatacatgaaggagctaggagtgggaatagctttgcgaaaaatgggcgcaatggccaagccagattgtatcatcacttgtgatggtaaaaacctcaccataaaaactgagagcactttgaaaacaacacagttttcttgtaccctgggagagaagtttgaagaaaccacagctgatggcagaaaaactcagactgtctgcaactttacagatggtgcattggttcagcatcaggagtgggatgggaaggaaagcacaataacaagaaaattgaaagatgggaaattagtggtggagtgtgtcatgaacaatgtcacctgtactcggatctatgaaaaagtagaataaaaattccatcatcactttggacaggagttaattaagagaatgaccaagctcagttcaatgagcaaatctccatactgtttctttcttttttttttcattactgtgttcaattatctttatcataaacattttacatgcagctatttcaaagtgtgttggattaattaggatcatccctttggttaataaataaatgtgtttgtgctaatatatcttgtatgcattctttaaaccttacaggaaattagtgatgagttttaataattattaattgagtaaaggttggggcagtcttgagggtactatattgagatgacactctagcaatttatatagatagctactcttacaggaaatactgtaccaattatttaagcttgccctatactatttgaactttgtatgaattcaggaatcttgaatttctggcagagaccattctcaataaaaggtgactacaacataaactttattattcaaattagagcaaaggtttaattaaccagcattgactaaaatactttttgtgtgtatttatatacaaatataagtaatactatgtatggaataaccag

SEQ ID NO: 423422 - DNA, 1612 bp, Homo sapiens
  misc_feature (1526)..(1526): n is a, c, g, or t
ttgtgaagagtacactttgaaacgtatcatgttctacgcacatgtgtagggtattattatagttcaagagaaagagggaacccgctggtgtctgagaagaaacccgctggtgtctgagaagaaacggtgaagggtgcactacgaagggaatataaactaatcaaacattcttgaatggcaatgacagtcactaaagttgacacttcctgcagtcttttagtttagaaaccacacttcccgagacgtcccccatcccaacagggataaaatcctctagctcaactcaggtatatccccactattgggccagggagacctgcggatggcgagagcaggttctcttaggagggtgtggattgtgagcttgtgcgctggcgaggagcagaaggtcagggaggcaccgtagttaatgaatcaataaaccaaacagccgatcaatcacttcctgcagtccgagtccggcgagggctaatcgattggtccgggtattttgaaaggaaaaacggcggtggatatgttgtcaaacggaggggtgcaggagaggcggggccaggcctccaggtgacccctctggcttcctgggcctgcagaggcgccgaaacgtgcaggcgccggcgtccatgaggcgtggggcgcgccgggcgagtccctgcttgcaggaggcgcccgagaggccgtcgcgtaccctggcaagaggagctggttagcacctcccgaccccgagaaggcccagggggcgcccggcgggcggggcggggaccgggcgaggcccgcctcccattggccgcatagcgccgcccagcgcgggccgccgttataaagcagccgccggcgccgggtgcctcacagcacgctgccacgccgacgcagacccctctctgcacgccagcccgcccgcacccaccatggccacagttcagcagctggaaggaagatggcgcctggtggacagcaaaggctttgatgaatacatgaaggagctaggagtgggaatagctttgcgaaaaatgggcgcaatggccaagccagattgtatcatcacttgtgatggtaaaaacctcaccataaaaactgagagcactttgaaaacaacacagttttcttgtaccctgggagagaagtttgaagaaaccacagctgatggcagaaaaactcagactgtctgcaactttacagatggtgcattggttcagcatcaggagtgggatgggaaggaaagcacaataacaagaaaattgaaagatgggaaattagtggtggagtgtgtcatgaacaatgtcacctgtactcggatctatgaaaaagtagaataaaaattccatcatcactttggacaggagttaattaagagaatgaccaagctcagttcaatgagcaaatctccatactgtttctttcttttttttttcattactgtgttcaattatctttatcataaacattttacatgcagctatttcaaagtgtgttggattaattaggatcatccctttggttaataaataaatgtaaaaaaaaaaacaaanaaacagtatggagatttgctcattgaactgagcttggtcattctcttaattaactcctgtccaaagtgatgatggaatttttagtc

SEQ ID NO: 423423 - DNA, 1565 bp, Homo sapiens
  misc_feature (1512)..(1515): n is a, c, g, or t
  misc_feature (1525)..(1525): n is a, c, g, or t
  misc_feature (1556)..(1556): n is a, c, g, or t
ttgtgaagagtacactttgaaacgtatcatgttctacgcacatgtgtagggtattattatagttcaagagaaagagggaacccgctggtgtctgagaagaaacccgctggtgtctgagaagaaacggtgaagggtgcactacgaagggaatataaactaatcaaacattcttgaatggcaatgacagtcactaaagttgacacttcctgcagtcttttagtttagaaaccacacttcccgagacgtcccccatcccaacagggataaaatcctctagctcaactcaggtatatccccactattgggccagggagacctgcggatggcgagagcaggttctcttaggagggtgtggattgtgagcttgtgcgctggcgaggagcagaaggtcagggaggcaccgtagttaatgaatcaataaaccaaacagccgatcaatcacttcctgcagtccgagtccggcgagggctaatcgattggtccgggtattttgaaaggaaaaacggcggtggatatgttgtcaaacggaggggtgcaggagaggcggggccaggcctccaggtgacccctctggcttcctgggcctgcagaggcgccgaaacgtgcaggcgccggcgtccatgaggcgtggggcgcgccgggcgagtccctgcttgcaggaggcgcccgagaggccgtcgcgtaccctggcaagaggagctggttagcacctcccgaccccgagaaggcccagggggcgcccggcgggcggggcggggaccgggcgaggcccgcctcccattggccgcatagcgccgcccagcgcgggccgccgttataaagcagccgccggcgccgggtgcctcacagcacgctgccacgccgacgcagacccctctctgcacgccagcccgcccgcacccaccatggccacagttcagcagctggaaggaagatggcgcctggtggacagcaaaggctttgatgaatacatgaaggagctaggagtgggaatagctttgcgaaaaatgggcgcaatggccaagccagattgtatcatcacttgtgatggtaaaaacctcaccataaaaactgagagcactttgaaaacaacacagttttcttgtaccctgggagagaagtttgaagaaaccacagctgatggcagaaaaactcagactgtctgcaactttacagatggtgcattggttcagcatcaggagtgggatgggaaggaaagcacaataacaagaaaattgaaagatgggaaattagtggtggagtgtgtcatgaacaatgtcacctgtactcggatctatgaaaaagtagaataaaaattccatcatcactttggacaggagttaattaagagaatgaccaagctcagttcaatgagcaaatctccatactgtttctttcttttttttttcattactgtgttcaattatctttatcataaacattttacatgcagctatttcaaagtgtgttggattaattaggatcatccctttggttaataaataaatgttnnnnaaaaaaaaanaatataaaaatttatattttataattttaantccttcggg

SEQ ID NO: 423424 - DNA, 2557 bp, Homo sapiens
ttgtgaagagtacactttgaaacgtatcatgttctacgcacatgtgtagggtattattatagttcaagagaaagagggaacccgctggtgtctgagaagaaacccgctggtgtctgagaagaaacggtgaagggtgcactacgaagggaatataaactaatcaaacattcttgaatggcaatgacagtcactaaagttgacacttcctgcagtcttttagtttagaaaccacacttcccgagacgtcccccatcccaacagggataaaatcctctagctcaactcaggtatatccccactattgggccagggagacctgcggatggcgagagcaggttctcttaggagggtgtggattgtgagcttgtgcgctggcgaggagcagaaggtcagggaggcaccgtagttaatgaatcaataaaccaaacagccgatcaatcacttcctgcagtccgagtccggcgagggctaatcgattggtccgggtattttgaaaggaaaaacggcggtggatatgttgtcaaacggaggggtgcaggagaggcggggccaggcctccaggtgacccctctggcttcctgggcctgcagaggcgccgaaacgtgcaggcgccggcgtccatgaggcgtggggcgcgccgggcgagtccctgcttgcaggaggcgcccgagaggccgtcgcgtaccctggcaagaggagctggttagcacctcccgaccccgagaaggcccagggggcgcccggcgggcggggcggggaccgggcgaggcccgcctcccattggccgcatagcgccgcccagcgcgggccgccgttataaagcagccgccggcgccgggtgcctcacagcacgctgccacgccgacgcagacccctctctgcacgccagcccgcccgcacccaccatggccacagttcagcagctggaaggaagatggcgcctggtggacagcaaaggctttgatgaatacatgaaggagctaggagtgggaatagctttgcgaaaaatgggcgcaatggccaagccagattgtatcatcacttgtgatggtaaaaacctcaccataaaaactgagagcactttgaaaacaacacagttttcttgtaccctgggagagaagtttgaagaaaccacagctgatggcagaaaaactcagactgtctgcaactttacagatggtgcattggttcagcatcaggagtgggatgggaaggaaagcacaataacaagaaaattgaaagatgggaaattagtggtggagtgtgtcatgaacaatgtcacctgtactcggatctatgaaaaagtagaataaaaattccatcatcactttggacaggagttaattaagagaatgaccaagctcagttcaatgagcaaatctccatactgtttctttcttttttttttcattactgtgttcaattatctttatcataaacattttacatgaaaaaaaaaaaaaaaaaaaaaaaaaaaaaaaaaaaaaaaaaaaaaaaaaaaaaaaaaaaaaaaaaaaaaaaaaaaaagaaagaaaagaaaaaaaaaagaaagaaaaaaaaaagagaaacaacaaaaaaaagaaaagaaaaaacaaaaacaacaccagacgagacgggagcgggggcggcgagcagactcaactcgataggtcggagagggacgcacaatgctcgcaccgcagatgttagttaggacggaaggaggcgcgcgggaggggagtcgcaagagcgtacgatcagagagagagagcaggcggcgcaggcggagagcaaacgcacgaggcggacgcaggacgcaggacgcagagtgagacgggagagacagagaagcagagagagagaaagaacgaaaagcagtgaggagagtgaaggcagcaaaagagcagaacgaggacggcacgagactgagaggagataagagagaaggaaagagagcagaaggaatagaacgagagagaagcgagcaaggagagcgaaggcagggggagaggcagagaagcagagagagagagaaggagggcggagagcagcggagcagacgcggagcaagggcagttagagagagataaaagtagataggcaagcacaggggaggaagggagtaggagtaacagtggacgggatgagaagaagtgaagggagtaaggagaggaggggaagaggaggggagagaggaggggagggggagagcttagaggagcagactgaggaggaagggagaggagatagagaaggaggggggagtagaagagagaggagggagaggacgagagagtagagagagagcaaggggaggacggaacgaggagagagagcgagaggagagcgcggagagcggaggagcgggagacaaggcgagagcaggagagagtgtagacgatggaaaggcaggggaaggggaagatagaggaaggaggcagcgaagagagcggagcgaggatgagaagcagtagggagagacagagagggagggagcgaagagaaggagagagacgtagagagatagaagagaaagatgccgaggcagaccggaagacgatgagaggagtgaagactg

SEQ ID NO: 423425 - DNA, 1521 bp, Homo sapiens
ttgtgaagagtacactttgaaacgtatcatgttctacgcacatgtgtagggtattattatagttcaagagaaagagggaacccgctggtgtctgagaagaaacccgctggtgtctgagaagaaacggtgaagggtgcactacgaagggaatataaactaatcaaacattcttgaatggcaatgacagtcactaaagttgacacttcctgcagtcttttagtttagaaaccacacttcccgagacgtcccccatcccaacagggataaaatcctctagctcaactcaggtatatccccactattgggccagggagacctgcggatggcgagagcaggttctcttaggagggtgtggattgtgagcttgtgcgctggcgaggagcagaaggtcagggaggcaccgtagttaatgaatcaataaaccaaacagccgatcaatcacttcctgcagtccgagtccggcgagggctaatcgattggtccgggtattttgaaaggaaaaacggcggtggatatgttgtcaaacggaggggtgcaggagaggcggggccaggcctccaggtgacccctctggcttcctgggcctgcagaggcgccgaaacgtgcaggcgccggcgtccatgaggcgtggggcgcgccgggcgagtccctgcttgcaggaggcgcccgagaggccgtcgcgtaccctggcaagaggagctggttagcacctcccgaccccgagaaggcccagggggcgcccggcgggcggggcggggaccgggcgaggcccgcctcccattggccgcatagcgccgcccagcgcgggccgccgttataaagcagccgccggcgccgggtgcctcacagcacgctgccacgccgacgcagacccctctctgcacgccagcccgcccgcacccaccatggccacagttcagcagctggaaggaagatggcgcctggtggacagcaaaggctttgatgaatacatgaaggagctaggagtgggaatagctttgcgaaaaatgggcgcaatggccaagccagattgtatcatcacttgtgatggtaaaaacctcaccataaaaactgagagcactttgaaaacaacacagttttcttgtaccctgggagagaagtttgaagaaaccacagctgatggcagaaaaactcagactgtctgcaactttacagatggtgcattggttcagcatcaggagtgggatgggaaggaaagcacaataacaagaaaattgaaagatgggaaattagtggtggagtgtgtcatgaacaatgtcacctgtactcggaagtatgtagtcgactacatacttccgccattcggggctctgtagtcctttctctcaattttcttttaaagactacatacttccgaatttcgcgcacggcatcgatgaccaacagcacaaggatgacgatgagaaccacgaagaaggtgttgccataggacactaacaactccaccaggcgggacttgaaaatcttctgacaatctttaggagacatgagggaatgcga

SEQ ID NO: 423426 - DNA, 778 bp, Homo sapiens
ggaccctctccctactgtatcctactcctgatggcagaaaaactcagactgtctgcaactttacagatggtgcattggttcagcatcaggagtgggatgggaaggaaagcacaataacaagaaaattgaaagatgggaaattagtggtggagtgtgtcatgaacaatgtcacctgtactcggatctatgaaaaagtagaataaaaattccatcatcactttggacaggagttaattaagagaatgaccaagctcagttcaatgagcaaatctccatactgtttctttcttttttttttcattactgtgttcaattatctttatcataaacattttacatgcagctatttcaaagtgtgttggattaattaggatcatccctttggttaataaataaatgtgtttgtgctaatatatcttgtatgcattctttaaaccttacaggaaattagtgatgagttttaataattattaattgagtaaaggttggggcagtcttgagggtactatattgagatgacactctagcaatttatatagatagctactcttacaggaaatactgtaccaattatttaagcttgccctatactatttgaactttgtatgaattcaggaatcttgaatttctggcagagaccattctcaataaaaggtgactacaacataaactttattattcaaattagagcaaaggtttaattaaccagcattgactaaaatactttttgtgtgtatttatatacaaatataagtaatactatgtatggaataaccag

SEQ ID NO: 423427 - DNA, 1628 bp, Homo sapiens
ttgtgaagagtacactttgaaacgtatcatgttctacgcacatgtgtagggtattattatagttcaagagaaagagggaacccgctggtgtctgagaagaaacccgctggtgtctgagaagaaacggtgaagggtgcactacgaagggaatataaactaatcaaacattcttgaatggcaatgacagtcactaaagttgacacttcctgcagtcttttagtttagaaaccacacttcccgagacgtcccccatcccaacagggataaaatcctctagctcaactcaggtatatccccactattgggccagggagacctgcggatggcgagagcaggttctcttaggagggtgtggattgtgagcttgtgcgctggcgaggagcagaaggtcagggaggcaccgtagttaatgaatcaataaaccaaacagccgatcaatcacttcctgcagtccgagtccggcgagggctaatcgattggtccgggtattttgaaaggaaaaacggcggtggatatgttgtcaaacggaggggtgcaggagaggcggggccaggcctccaggtgacccctctggcttcctgggcctgcagaggcgccgaaacgtgcaggcgccggcgtccatgaggcgtggggcgcgccgggcgagtccctgcttgcaggaggcgcccgagaggccgtcgcgtaccctggcaagaggagctggttagcacctcccgaccccgagaaggcccagggggcgcccggcgggcggggcggggaccgggcgaggcccgcctcccattggccgcatagcgccgcccagcgcgggccgccgttataaagcagccgccggcgccgggtgcctcacagcacgctgccacgccgacgcagacccctctctgcacgccagcccgcccgcacccaccatggccacagttcagcagctggaaggaagatggcgcctggtggacagcaaaggctttgatgaatacatgaaggagctagagatggcgcctggtggacagcaaaggctttgatgaatacatgaaggagctgagtgggaatagctttgcgaaaaatgggcgcaatggccaagccagattgtatcatcacttgtgatggtaaaaacctcaccataaaaactgagagcactttgaaaacaacacagttttcttgtaccctgggagagaagtttgaagaaaccacagctgatggcagaaaaactcagactgtctgcaactttacagatggtgcattggttcagcatcaggagtgggatgggaaggaaagcacaataacaagaaaattgaaagatgggaaattagtggtggagtgtgtcatgaacaatgtcacctgtactcggaagtatgtagtcgactacatacttccgggcctttgcccaggctgtttcctctgccggggactccttttccttccacccattctctcttgctaatttttacttattgttctgtgtctgtctttctctttctttctttcttttctttctttctttctttcttccttccttcctttctttcttcctcttctttctctctctccttctttcttttctttttctttctttcttttctttctttcttctttctttctttccttctttccttctttcttcggaagtatgtagt

SEQ ID NO: 423428 - DNA, 248 bp, Homo sapiens
acggggtttcagcaccttgaccaggctggtctcgaactcctgaccatgtgatccgcccgcctcagcctcccaaagtgctgggattataggcgtgagccaccacgcccagccttttttttttttttaattttaaattgtggtaaaatatatgaacaataaaccctccctccccatccccctcccccagcccctgacccccactgtacattccgctttctatctccatgaaactgctgagtgcggggacc

SEQ ID NO: 423429 - DNA, 1691 bp, Homo sapiens
ccttttgcagcaagttctttcctgcactaatcacaattcttggaagaggagaactggacgttgtgaacagagttagctggtaaatgtcctcttaaaagatccaaaaaatgagacttctagcaaagattatttgccttatgttatgggctatttgtgtagcagaagattgcaatgaacttcctccaagaagaaatacagaaattctgacaggttcctggtctgaccaaacatatccagaaggcacccaggctatctataaatgccgccctggatatagatctcttggaaatgtaataatggtatgcaggaagggagaatgggttgctcttaatccattaaggaaatgtcagaaaaggccctgtggacatcctggagatactccttttggtacttttacccttacaggaggaaatgtgtttgaatatggtgtaaaagctgtgtatacatgtaatgaggggtatcaattgctaggtgagattaattaccgtgaatgtgacacagatggatggaccaatgatattcctatatgtgaagttgtgaagtgtttaccagtgacagcaccagagaatggaaaaattgtcagtagtgcaatggaaccagatcgggaataccattttggacaagcagtacggtttgtatgtaactcaggctacaagattgaaggagatgaagaaatgcattgttcagacgatggtttttggagtaaagagaaaccaaagtgtgtggaaatttcatgcaaatccccagatgttataaatggatctcctatatctcagaagattatttataaggagaatgaacgatttcaatataaatgtaacatgggttatgaatacagtgaaagaggagatgctgtatgcactgaatctggatggcgtccgttgccttcatgtgaagaaaaatcatgtgataatccttatattccaaatggtgactactcacctttaaggattaaacacagaactggagatgaaatcacgtaccagtgtagaaatggtttttatcctgcaacccggggaaatacagccaaatgcacaagtactggctggatacctgctccgagatgtaccttgaaaccttgtgattatccagacattaaacatggaggtctatatcatgagaatatgcgtagaccatactttccagtagctgtaggaaaatattactcctattactgtgatgaacattttgagactccgtcaggaagttactgggatcacattcattgcacacaagatggatggtcgccagcagtaccatgcctcagaaaatgttattttccttatttggaaaatggatataatcaaaattatggaagaaagtttgtacagggtaaatctatagacgttgcctgccatcctggctacgctcttccaaaagcgcagaccacagttacatgtatggagaatggctggtctcctactcccagatgcatccgtgtcagctttaccctctgaacttctgatcgaaggtcatccctctccagcttgagtggatcaaagatgacaagggccaatggaaccaagtttgagtcttgccaggtcaatacttgggtcctgagtatggtgactagtatctgttttgttatgtgtgtattattccagccagaatgggaaatgctaattcagctcctccaggcagcccaatggggctggtggctttgagattattaaactctttctctgctgcaa

SEQ ID NO: 423430 - DNA, 730 bp, Homo sapiens
  misc_feature (21)..(21): n is a, c, g, or t
  misc_feature (56)..(56): n is a, c, g, or t
  misc_feature (65)..(65): n is a, c, g, or t
  misc_feature (83)..(83): n is a, c, g, or t
  misc_feature (96)..(96): n is a, c, g, or t
gcacgcaaaaaagacccagcngggtagctcccggtccgcgcgacaaggaccacgcnccagcgccngcagcagcgacatctctntagccctcgtgcngaattcggcacgaggagagagtacgttatcaatgtaggagcccttatgaaatgtttggggatgaagaagtgatgtgtttaaatggaaactggacggaaccacctcaatgcaaagattctacaggaaaatgtgggccccctccacctattgacaatggggacattacttcattcccgttgtcagtatatgctccagcttcatcagttgagtaccaatgccagaacttgtatcaacttgagggtaacaagcgaataacatgtagaaatggacaatggtcagaaccaccaaaatgcttacatccgtgtgtaatatcccgagaaattatggaaaattataacatagcattaaggtggacagccaaacagaagctttattcgagaacaggtgaatcagttgaatttgtgtgtaaacggggatatcgtctttcatcacgttctcacacattgcgaacaacatgttgggatgggaaactggagtatccaacttgtgcaaaaagatagaatcaatcataaatattgttttgactcctttttattcatacgtaaaattttggattaatttgtgaaaatgtaattataagctgagaccggtggctctcttcttaaaagcaccatattaaatcctggaaaactaa

SEQ ID NO: 423431 - DNA, 3995 bp, Homo sapiens
ccttttgcagcaagttctttcctgcactaatcacaattcttggaagaggagaactggacgttgtgaacagagttagctggtaaatgtcctcttaaaagatccaaaaaatgagacttctagcaaagattatttgccttatgttatgggctatttgtgtagcagaagattgcaatgaacttcctccaagaagaaatacagaaattctgacaggttcctggtctgaccaaacatatccagaaggcacccaggctatctataaatgccgccctggatatagatctcttggaaatgtaataatggtatgcaggaagggagaatgggttgctcttaatccattaaggaaatgtcagaaaaggccctgtggacatcctggagatactccttttggtacttttacccttacaggaggaaatgtgtttgaatatggtgtaaaagctgtgtatacatgtaatgaggggtatcaattgctaggtgagattaattaccgtgaatgtgacacagatggatggaccaatgatattcctatatgtgaagttgtgaagtgtttaccagtgacagcaccagagaatggaaaaattgtcagtagtgcaatggaaccagatcgggaataccattttggacaagcagtacggtttgtatgtaactcaggctacaagattgaaggagatgaagaaatgcattgttcagacgatggtttttggagtaaagagaaaccaaagtgtgtggaaatttcatgcaaatccccagatgttataaatggatctcctatatctcagaagattatttataaggagaatgaacgatttcaatataaatgtaacatgggttatgaatacagtgaaagaggagatgctgtatgcactgaatctggatggcgtccgttgccttcatgtgaagaaaaatcatgtgataatccttatattccaaatggtgactactcacctttaaggattaaacacagaactggagatgaaatcacgtaccagtgtagaaatggtttttatcctgcaacccggggaaatacagccaaatgcacaagtactggctggatacctgctccgagatgtaccttgaaaccttgtgattatccagacattaaacatggaggtctatatcatgagaatatgcgtagaccatactttccagtagctgtaggaaaatattactcctattactgtgatgaacattttgagactccgtcaggaagttactgggatcacattcattgcacacaagatggatggtcgccagcagtaccatgcctcagaaaatgttattttccttatttggaaaatggatataatcaaaattatggaagaaagtttgtacagggtaaatctatagacgttgcctgccatcctggctacgctcttccaaaagcgcagaccacagttacatgtatggagaatggctggtctcctactcccagatgcatccgtgtcaaaacatgttccaaatcaagtatagatattgagaatgggtttatttctgaatctcagtatacatatgccttaaaagaaaaagcgaaatatcaatgcaaactaggatatgtaacagcagatggtgaaacatcaggatcaattacatgtgggaaagatggatggtcagctcaacccacgtgcattaaatcttgtgatatcccagtatttatgaatgccagaactaaaaatgacttcacatggtttaagctgaatgacacattggactatgaatgccatgatggttatgaaagcaatactggaagcaccactggttccatagtgtgtggttacaatggttggtctgatttacccatatgttatgaaagagaatgcgaacttcctaaaatagatgtacacttagttcctgatcgcaagaaagaccagtataaagttggagaggtgttgaaattctcctgcaaaccaggatttacaatagttggacctaattccgttcagtgctaccactttggattgtctcctgacctcccaatatgtaaagagcaagtacaatcatgtggtccacctcctgaactcctcaatgggaatgttaaggaaaaaacgaaagaagaatatggacacagtgaagtggtggaatattattgcaatcctagatttctaatgaagggacctaataaaattcaatgtgttgatggagagtggacaactttaccagtgtgtattgtggaggagagtacctgtggagatatacctgaacttgaacatggctgggcccagctttcttcccctccttattactatggagattcagtggaattcaattgctcagaatcatttacaatgattggacacagatcaattacgtgtattcatggagtatggacccaacttccccagtgtgtggcaatagataaacttaagaagtgcaaatcatcaaatttaattatacttgaggaacatttaaaaaacaagaaggaattcgatcataattctaacataaggtacagatgtagaggaaaagaaggatggatacacacagtctgcataaatggaagatgggatccagaagtgaactgctcaatggcacaaatacaattatgcccacctccacctcagattcccaattctcacaatatgacaaccacactgaattatcgggatggagaaaaagtatctgttctttgccaagaaaattatctaattcaggaaggagaagaaattacatgcaaagatggaagatggcagtcaataccactctgtgttgaaaaaattccatgttcacaaccacctcagatagaacacggaaccattaattcatccaggtcttcacaagaaagttatgcacatgggactaaattgagttatacttgtgagggtggtttcaggatatctgaagaaaatgaaacaacatgctacatgggaaaatggagttctccacctcagtgtgaaggccttccttgtaaatctccacctgagatttctcatggtgttgtagctcacatgtcagacagttatcagtatggagaagaagttacgtacaaatgttttgaaggttttggaattgatgggcctgcaattgcaaaatgcttaggagaaaaatggtctcaccctccatcatgcataaaaacagattgtctcagtttacctagctttgaaaatgccatacccatgggagagaagaaggatgtgtataaggcgggtgagcaagtgacttacacttgtgcaacatattacaaaatggatggagccagtaatgtaacatgcattaatagcagatggacaggaaggccaacatgcagagacacctcctgtgtgaatccgcccacagtacaaaatgcttatatagtgtcgagacagatgagtaaatatccatctggtgagagagtacgttatcaatgtaggagcccttatgaaatgtttggggatgaagaagtgatgtgtttaaatggaaactggacggaaccacctcaatgcaaagattctacaggaaaatgtgggccccctccacctattgacaatggggacattacttcattcccgttgtcagtatatgctccagcttcatcagttgagtaccaatgccagaacttgtatcaacttgagggtaacaagcgaataacatgtagaaatggacaatggtcagaaccaccaaaatgcttacatccgtgtgtaatatcccgagaaattatggaaaattataacatagcattaaggtggacagccaaacagaagctttattcgagaacaggtgaatcagttgaatttgtgtgtaaacggggatatcgtctttcatcacgttctcacacattgcgaacaacatgttgggatgggaaactggagtatccaacttgtgcaaaaagatagaatcaatcataaagtgcacacctttattcagaactttagtattaaatcagttctcaatttcattttttatgtattgttttgactcctttttattcatacgtaaaattttggattaatttgtgaaaatgtaattataagctgagaccggtggctctcttcttaaaagcaccatattaaatcctggaaaactaa

SEQ ID NO: 423432 - DNA, 4112 bp, Homo sapiens
  misc_feature (4060)..(4060): n is a, c, g, or t
ccttttgcagcaagttctttcctgcactaatcacaattcttggaagaggagaactggacgttgtgaacagagttagctggtaaatgtcctcttaaaagatccaaaaaatgagacttctagcaaagattatttgccttatgttatgggctatttgtgtagcagaagattgcaatgaacttcctccaagaagaaatacagaaattctgacaggttcctggtctgaccaaacatatccagaaggcacccaggctatctataaatgccgccctggatatagatctcttggaaatgtaataatggtatgcaggaagggagaatgggttgctcttaatccattaaggaaatgtcagaaaaggccctgtggacatcctggagatactccttttggtacttttacccttacaggaggaaatgtgtttgaatatggtgtaaaagctgtgtatacatgtaatgaggggtatcaattgctaggtgagattaattaccgtgaatgtgacacagatggatggaccaatgatattcctatatgtgaagttgtgaagtgtttaccagtgacagcaccagagaatggaaaaattgtcagtagtgcaatggaaccagatcgggaataccattttggacaagcagtacggtttgtatgtaactcaggctacaagattgaaggagatgaagaaatgcattgttcagacgatggtttttggagtaaagagaaaccaaagtgtgtggaaatttcatgcaaatccccagatgttataaatggatctcctatatctcagaagattatttataaggagaatgaacgatttcaatataaatgtaacatgggttatgaatacagtgaaagaggagatgctgtatgcactgaatctggatggcgtccgttgccttcatgtgaagaaaaatcatgtgataatccttatattccaaatggtgactactcacctttaaggattaaacacagaactggagatgaaatcacgtaccagtgtagaaatggtttttatcctgcaacccggggaaatacagccaaatgcacaagtactggctggatacctgctccgagatgtaccttgaaaccttgtgattatccagacattaaacatggaggtctatatcatgagaatatgcgtagaccatactttccagtagctgtaggaaaatattactcctattactgtgatgaacattttgagactccgtcaggaagttactgggatcacattcattgcacacaagatggatggtcgccagcagtaccatgcctcagaaaatgttattttccttatttggaaaatggatataatcaaaattatggaagaaagtttgtacagggtaaatctatagacgttgcctgccatcctggctacgctcttccaaaagcgcagaccacagttacatgtatggagaatggctggtctcctactcccagatgcatccgtgtcaaaacatgttccaaatcaagtatagatattgagaatgggtttatttctgaatctcagtatacatatgccttaaaagaaaaagcgaaatatcaatgcaaactaggatatgtaacagcagatggtgaaacatcaggatcaattacatgtgggaaagatggatggtcagctcaacccacgtgcattaaatcttgtgatatcccagtatttatgaatgccagaactaaaaatgacttcacatggtttaagctgaatgacacattggactatgaatgccatgatggttatgaaagcaatactggaagcaccactggttccatagtgtgtggttacaatggttggtctgatttacccatatgttatgaaagagaatgcgaacttcctaaaatagatgtacacttagttcctgatcgcaagaaagaccagtataaagttggagaggtgttgaaattctcctgcaaaccaggatttacaatagttggacctaattccgttcagtgctaccactttggattgtctcctgacctcccaatatgtaaagagcaagtacaatcatgtggtccacctcctgaactcctcaatgggaatgttaaggaaaaaacgaaagaagaatatggacacagtgaagtggtggaatattattgcaatcctagatttctaatgaagggacctaataaaattcaatgtgttgatggagagtggacaactttaccagtgtgtattgtggaggagagtacctgtggagatatacctgaacttgaacatggctgggcccagctttcttcccctccttattactatggagattcagtggaattcaattgctcagaatcatttacaatgattggacacagatcaattacgtgtattcatggagtatggacccaacttccccagtgtgtggcaatagataaacttaagaagtgcaaatcatcaaatttaattatacttgaggaacatttaaaaaacaagaaggaattcgatcataattctaacataaggtacagatgtagaggaaaagaaggatggatacacacagtctgcataaatggaagatgggatccagaagtgaactgctcaatggcacaaatacaattatgcccacctccacctcagattcccaattctcacaatatgacaaccacactgaattatcgggatggagaaaaagtatctgttctttgccaagaaaattatctaattcaggaaggagaagaaattacatgcaaagatggaagatggcagtcaataccactctgtgttgaaaaaattccatgttcacaaccacctcagatagaacacggaaccattaattcatccaggtcttcacaagaaagttatgcacatgggactaaattgagttatacttgtgagggtggtttcaggatatctgaagaaaatgaaacaacatgctacatgggaaaatggagttctccacctcagtgtgaaggccttccttgtaaatctccacctgagatttctcatggtgttgtagctcacatgtcagacagttatcagtatggagaagaagttacgtacaaatgttttgaaggttttggaattgatgggcctgcaattgcaaaatgcttaggagaaaaatggtctcaccctccatcatgcataaaaacagattgtctcagtttacctagctttgaaaatgccatacccatgggagagaagaaggatgtgtataaggcgggtgagcaagtgacttacacttgtgcaacatattacaaaatggatggagccagtaatgtaacatgcattaatagcagatggacaggaaggccaacatgcagagacacctcctgtgtgaatccgcccacagtacaaaatgcttatatagtgtcgagacagatgagtaaatatccatctggtgagagagtacgttatcaatgtaggagcccttatgaaatgtttggggatgaagaagtgatgtgtttaaatggaaactggacggaaccacctcaatgcaaagattctacaggaaaatgtgggccccctccacctattgacaatggggacattacttcattcccgttgtcagtatatgctccagcttcatcagttgagtaccaatgccagaacttgtatcaacttgagggtaacaagcgaataacatgtagaaatggacaatggtcagaaccaccaaaatgcttacatccgtgtgtaatatcccgagaaattatggaaaattataacatagcattaaggtggacagccaaacagaagctttattcgagaacaggtgaatcagttgaatttgtgtgtaaacggggatatcgtctttcatcacgttctcacacattgcgaacaacatgttgggatgggaaactggagtatccaacttgtgcaaaaagatagaatcaatcataaagtgcacacctttattcagaactttagtattaaatcagttctcaatttcattttttatgtattgttttgactcctttttattcatacgtaaaattttggattaatttgtgaaaatgtaattataagctgagaccggtggctctcttcttaaaagcaccatattaaatcctggaaaactaaaaaaaaaaaaggacagctcgaggggcgggcaagaagacgttcaacgacgggctaccgcatagggngaggggagaggagactaggaagggatagggcgtgaggaaaggagatatagag

SEQ ID NO: 423433 - DNA, 3974 bp, Homo sapiens
ccttttgcagcaagttctttcctgcactaatcacaattcttggaagaggagaactggacgttgtgaacagagttagctggtaaatgtcctcttaaaagatccaaaaaatgagacttctagcaaagattatttgccttatgttatgggctatttgtgtagcagaagattgcaatgaacttcctccaagaagaaatacagaaattctgacaggttcctggtctgaccaaacatatccagaaggcacccaggctatctataaatgccgccctggatatagatctcttggaaatgtaataatggtatgcaggaagggagaatgggttgctcttaatccattaaggaaatgtcagaaaaggccctgtggacatcctggagatactccttttggtacttttacccttacaggaggaaatgtgtttgaatatggtgtaaaagctgtgtatacatgtaatgaggggtatcaattgctaggtgagattaattaccgtgaatgtgacacagatggatggaccaatgatattcctatatgtgaagttgtgaagtgtttaccagtgacagcaccagagaatggaaaaattgtcagtagtgcaatggaaccagatcgggaataccattttggacaagcagtacggtttgtatgtaactcaggctacaagattgaaggagatgaagaaatgcattgttcagacgatggtttttggagtaaagagaaaccaaagtgtgtggaaatttcatgcaaatccccagatgttataaatggatctcctatatctcagaagattatttataaggagaatgaacgatttcaatataaatgtaacatgggttatgaatacagtgaaagaggagatgctgtatgcactgaatctggatggcgtccgttgccttcatgtgaagaaaaatcatgtgataatccttatattccaaatggtgactactcacctttaaggattaaacacagaactggagatgaaatcacgtaccagtgtagaaatggtttttatcctgcaacccggggaaatacagccaaatgcacaagtactggctggatacctgctccgagatgtacctacattaaacatggaggtctatatcatgagaatatgcgtagaccatactttccagtagctgtaggaaaatattactcctattactgtgatgaacattttgagactccgtcaggaagttactgggatcacattcattgcacacaagatggatggtcgccagcagtaccatgcctcagaaaatgttattttccttatttggaaaatggatataatcaaaattatggaagaaagtttgtacagggtaaatctatagacgttgcctgccatcctggctacgctcttccaaaagcgcagaccacagttacatgtatggagaatggctggtctcctactcccagatgcatccgtgtcaaaacatgttccaaatcaagtatagatattgagaatgggtttatttctgaatctcagtatacatatgccttaaaagaaaaagcgaaatatcaatgcaaactaggatatgtaacagcagatggtgaaacatcaggatcaattacatgtgggaaagatggatggtcagctcaacccacgtgcattaaatcttgtgatatcccagtatttatgaatgccagaactaaaaatgacttcacatggtttaagctgaatgacacattggactatgaatgccatgatggttatgaaagcaatactggaagcaccactggttccatagtgtgtggttacaatggttggtctgatttacccatatgttatgaaagagaatgcgaacttcctaaaatagatgtacacttagttcctgatcgcaagaaagaccagtataaagttggagaggtgttgaaattctcctgcaaaccaggatttacaatagttggacctaattccgttcagtgctaccactttggattgtctcctgacctcccaatatgtaaagagcaagtacaatcatgtggtccacctcctgaactcctcaatgggaatgttaaggaaaaaacgaaagaagaatatggacacagtgaagtggtggaatattattgcaatcctagatttctaatgaagggacctaataaaattcaatgtgttgatggagagtggacaactttaccagtgtgtattgtggaggagagtacctgtggagatatacctgaacttgaacatggctgggcccagctttcttcccctccttattactatggagattcagtggaattcaattgctcagaatcatttacaatgattggacacagatcaattacgtgtattcatggagtatggacccaacttccccagtgtgtggcaatagataaacttaagaagtgcaaatcatcaaatttaattatacttgaggaacatttaaaaaacaagaaggaattcgatcataattctaacataaggtacagatgtagaggaaaagaaggatggatacacacagtctgcataaatggaagatgggatccagaagtgaactgctcaatggcacaaatacaattatgcccacctccacctcagattcccaattctcacaatatgacaaccacactgaattatcgggatggagaaaaagtatctgttctttgccaagaaaattatctaattcaggaaggagaagaaattacatgcaaagatggaagatggcagtcaataccactctgtgttgaaaaaattccatgttcacaaccacctcagatagaacacggaaccattaattcatccaggtcttcacaagaaagttatgcacatgggactaaattgagttatacttgtgagggtggtttcaggatatctgaagaaaatgaaacaacatgctacatgggaaaatggagttctccacctcagtgtgaaggccttccttgtaaatctccacctgagatttctcatggtgttgtagctcacatgtcagacagttatcagtatggagaagaagttacgtacaaatgttttgaaggttttggaattgatgggcctgcaattgcaaaatgcttaggagaaaaatggtctcaccctccatcatgcataaaaacagattgtctcagtttacctagctttgaaaatgccatacccatgggagagaagaaggatgtgtataaggcgggtgagcaagtgacttacacttgtgcaacatattacaaaatggatggagccagtaatgtaacatgcattaatagcagatggacaggaaggccaacatgcagagacacctcctgtgtgaatccgcccacagtacaaaatgcttatatagtgtcgagacagatgagtaaatatccatctggtgagagagtacgttatcaatgtaggagcccttatgaaatgtttggggatgaagaagtgatgtgtttaaatggaaactggacggaaccacctcaatgcaaagattctacaggaaaatgtgggccccctccacctattgacaatggggacattacttcattcccgttgtcagtatatgctccagcttcatcagttgagtaccaatgccagaacttgtatcaacttgagggtaacaagcgaataacatgtagaaatggacaatggtcagaaccaccaaaatgcttacatccgtgtgtaatatcccgagaaattatggaaaattataacatagcattaaggtggacagccaaacagaagctttattcgagaacaggtgaatcagttgaatttgtgtgtaaacggggatatcgtctttcatcacgttctcacacattgcgaacaacatgttgggatgggaaactggagtatccaacttgtgcaaaaagatagaatcaatcataaagtgcacacctttattcagaactttagtattaaatcagttctcaatttcattttttatgtattgttttgactcctttttattcatacgtaaaattttggattaatttgtgaaaatgtaattataagctgagaccggtggctctcttcttaaaagcaccatattaaatcctggaaaactaa

SEQ ID NO: 423434 - DNA, 3818 bp, Homo sapiens
cccccgggctgcaggagcttcggcacgagaatgcttacatccgtgtgtaatatcccgagaaattatggaaaattataacatagcattaaggtggacagccaaacagaagctttattcgagaacaggtgaatcagttgaatttgtgtgtaaacgggatatcgtctttcatcacgttctcacacattgcgaacaacatgttgggatgggaaactggagtatccaacttgtgcaaaaagatagaatcaatcataaagtgcacacctttattcagaactttagtattaaatcagttctcaatttcattttttatggaatgtgacacagatggatggaccaatgatattcctatatgtgaagttgtgaagtgtttaccagtgacagcaccagagaatggaaaaattgtcagtagtgcaatggaaccagatcgggaataccattttggacaagcagtacggtttgtatgtaactcaggctacaagattgaaggagatgaagaaatgcattgttcagacgatggtttttggagtaaagagaaaccaaagtgtgtggaaatttcatgcaaatccccagatgttataaatggatctcctatatctcagaagattatttataaggagaatgaacgatttcaatataaatgtaacatgggttatgaatacagtgaaagaggagatgctgtatgcactgaatctggatggcgtccgttgccttcatgtgaagaaaaatcatgtgataatccttatattccaaatggtgactactcacctttaaggattaaacacagaactggagatgaaatcacgtaccagtgtagaaatggtttttatcctgcaacccggggaaatacagccaaatgcacaagtactggctggatacctgctccgagatgtaccttgaaaccttgtgattatccagacattaaacatggaggtctatatcatgagaatatgcgtagaccatactttccagtagctgtaggaaaatattactcctattactgtgatgaacattttgagactccgtcaggaagttactgggatcacattcattgcacacaagatggatggtcgccagcagtaccatgcctcagaaaatgttattttccttatttggaaaatggatataatcaaaattatggaagaaagtttgtacagggtaaatctatagacgttgcctgccatcctggctacgctcttccaaaagcgcagaccacagttacatgtatggagaatggctggtctcctactcccagatgcatccgtgtcaaaacatgttccaaatcaagtatagatattgagaatgggtttatttctgaatctcagtatacatatgccttaaaagaaaaagcgaaatatcaatgcaaactaggatatgtaacagcagatggtgaaacatcaggatcaattacatgtgggaaagatggatggtcagctcaacccacgtgcattaaatcttgtgatatcccagtatttatgaatgccagaactaaaaatgacttcacatggtttaagctgaatgacacattggactatgaatgccatgatggttatgaaagcaatactggaagcaccactggttccatagtgtgtggttacaatggttggtctgatttacccatatgttatgaaagagaatgcgaacttcctaaaatagatgtacacttagttcctgatcgcaagaaagaccagtataaagttggagaggtgttgaaattctcctgcaaaccaggatttacaatagttggacctaattccgttcagtgctaccactttggattgtctcctgacctcccaatatgtaaagagcaagtacaatcatgtggtccacctcctgaactcctcaatgggaatgttaaggaaaaaacgaaagaagaatatggacacagtgaagtggtggaatattattgcaatcctagatttctaatgaagggacctaataaaattcaatgtgttgatggagagtggacaactttaccagtgtgtattgtggaggagagtacctgtggagatatacctgaacttgaacatggctgggcccagctttcttcccctccttattactatggagattcagtggaattcaattgctcagaatcatttacaatgattggacacagatcaattacgtgtattcatggagtatggacccaacttccccagtgtgtggcaatagataaacttaagaagtgcaaatcatcaaatttaattatacttgaggaacatttaaaaaacaagaaggaattcgatcataattctaacataaggtacagatgtagaggaaaagaaggatggatacacacagtctgcataaatggaagatgggatccagaagtgaactgctcaatggcacaaatacaattatgcccacctccacctcagattcccaattctcacaatatgacaaccacactgaattatcgggatggagaaaaagtatctgttctttgccaagaaaattatctaattcaggaaggagaagaaattacatgcaaagatggaagatggcagtcaataccactctgtgttgaaaaaattccatgttcacaaccacctcagatagaacacggaaccattaattcatccaggtcttcacaagaaagttatgcacatgggactaaattgagttatacttgtgagggtggtttcaggatatctgaagaaaatgaaacaacatgctacatgggaaaatggagttctccacctcagtgtgaaggccttccttgtaaatctccacctgagatttctcatggtgttgtagctcacatgtcagacagttatcagtatggagaagaagttacgtacaaatgttttgaaggttttggaattgatgggcctgcaattgcaaaatgcttaggagaaaaatggtctcaccctccatcatgcataaaaacagattgtctcagtttacctagctttgaaaatgccatacccatgggagagaagaaggatgtgtataaggcgggtgagcaagtgacttacacttgtgcaacatattacaaaatggatggagccagtaatgtaacatgcattaatagcagatggacaggaaggccaacatgcagagacacctcctgtgtgaatccgcccacagtacaaaatgcttatatagtgtcgagacagatgagtaaatatccatctggtgagagagtacgttatcaatgtaggagcccttatgaaatgtttggggatgaagaagtgatgtgtttaaatggaaactggacggaaccacctcaatgcaaagattctacaggaaaatgtgggccccctccacctattgacaatggggacattacttcattcccgttgtcagtatatgctccagcttcatcagttgagtaccaatgccagaacttgtatcaacttgagggtaacaagcgaataacatgtagaaatggacaatggtcagaaccaccaaaatgcttacatccgtgtgtaatatcccgagaaattatggaaaattataacatagcattaaggtggacagccaaacagaagctttattcgagaacaggtgaatcagttgaatttgtgtgtaaacggggatatcgtctttcatcacgttctcacacattgcgaacaacatgttgggatgggaaactggagtatccaacttgtgcaaaaagatagaatcaatcataaagtgcacacctttattcagaactttagtattaaatcagttctcaatttcattttttatgtattgttttgactcctttttattcatacgtaaaattttggattaatttgtgaaaatgtaattataagctgagaccggtggctctcttcttaaaagcaccatattaaatcctggaaaactaa

SEQ ID NO: 423435 - DNA, 3803 bp, Homo sapiens
ccttttgcagcaagttctttcctgcactaatcacaattcttggaagaggagaactggacgttgtgaacagagttagctggtaaatgtcctcttaaaagatccaaaaaatgagacttctagcaaagattatttgccttatgttatgggctatttgtgtagcagaagattgcaatgaacttcctccaagaagaaatacagaaattctgacaggttcctggtctgaccaaacatatccagaaggcacccaggctatctataaatgccgccctggatatagatctcttggaaatgtaataatggtatgcaggaagggagaatgggttgctcttaatccattaaggaaatgtcagaaaaggccctgtggacatcctggagatactccttttggtacttttacccttacaggaggaaatgtgtttgaatatggtgtaaaagctgtgtatacatgtaatgaggggtatcaattgctaggtgagattaattaccgtgaatgtgacacagatggatggaccaatgatattcctatatgtgaagaaatttcatgcaaatccccagatgttataaatggatctcctatatctcagaagattatttataaggagaatgaacgatttcaatataaatgtaacatgggttatgaatacagtgaaagaggagatgctgtatgcactgaatctggatggcgtccgttgccttcatgtgaagaaaaatcatgtgataatccttatattccaaatggtgactactcacctttaaggattaaacacagaactggagatgaaatcacgtaccagtgtagaaatggtttttatcctgcaacccggggaaatacagccaaatgcacaagtactggctggatacctgctccgagatgtaccttgaaaccttgtgattatccagacattaaacatggaggtctatatcatgagaatatgcgtagaccatactttccagtagctgtaggaaaatattactcctattactgtgatgaacattttgagactccgtcaggaagttactgggatcacattcattgcacacaagatggatggtcgccagcagtaccatgcctcagaaaatgttattttccttatttggaaaatggatataatcaaaattatggaagaaagtttgtacagggtaaatctatagacgttgcctgccatcctggctacgctcttccaaaagcgcagaccacagttacatgtatggagaatggctggtctcctactcccagatgcatccgtgtcaaaacatgttccaaatcaagtatagatattgagaatgggtttatttctgaatctcagtatacatatgccttaaaagaaaaagcgaaatatcaatgcaaactaggatatgtaacagcagatggtgaaacatcaggatcaattacatgtgggaaagatggatggtcagctcaacccacgtgcattaaatcttgtgatatcccagtatttatgaatgccagaactaaaaatgacttcacatggtttaagctgaatgacacattggactatgaatgccatgatggttatgaaagcaatactggaagcaccactggttccatagtgtgtggttacaatggttggtctgatttacccatatgttatgaaagagaatgcgaacttcctaaaatagatgtacacttagttcctgatcgcaagaaagaccagtataaagttggagaggtgttgaaattctcctgcaaaccaggatttacaatagttggacctaattccgttcagtgctaccactttggattgtctcctgacctcccaatatgtaaagagcaagtacaatcatgtggtccacctcctgaactcctcaatgggaatgttaaggaaaaaacgaaagaagaatatggacacagtgaagtggtggaatattattgcaatcctagatttctaatgaagggacctaataaaattcaatgtgttgatggagagtggacaactttaccagtgtgtattgtggaggagagtacctgtggagatatacctgaacttgaacatggctgggcccagctttcttcccctccttattactatggagattcagtggaattcaattgctcagaatcatttacaatgattggacacagatcaattacgtgtattcatggagtatggacccaacttccccagtgtgtggcaatagataaacttaagaagtgcaaatcatcaaatttaattatacttgaggaacatttaaaaaacaagaaggaattcgatcataattctaacataaggtacagatgtagaggaaaagaaggatggatacacacagtctgcataaatggaagatgggatccagaagtgaactgctcaatggcacaaatacaattatgcccacctccacctcagattcccaattctcacaatatgacaaccacactgaattatcgggatggagaaaaagtatctgttctttgccaagaaaattatctaattcaggaaggagaagaaattacatgcaaagatggaagatggcagtcaataccactctgtgttgaaaaaattccatgttcacaaccacctcagatagaacacggaaccattaattcatccaggtcttcacaagaaagttatgcacatgggactaaattgagttatacttgtgagggtggtttcaggatatctgaagaaaatgaaacaacatgctacatgggaaaatggagttctccacctcagtgtgaaggccttccttgtaaatctccacctgagatttctcatggtgttgtagctcacatgtcagacagttatcagtatggagaagaagttacgtacaaatgttttgaaggttttggaattgatgggcctgcaattgcaaaatgcttaggagaaaaatggtctcaccctccatcatgcataaaaacagattgtctcagtttacctagctttgaaaatgccatacccatgggagagaagaaggatgtgtataaggcgggtgagcaagtgacttacacttgtgcaacatattacaaaatggatggagccagtaatgtaacatgcattaatagcagatggacaggaaggccaacatgcagagacacctcctgtgtgaatccgcccacagtacaaaatgcttatatagtgtcgagacagatgagtaaatatccatctggtgagagagtacgttatcaatgtaggagcccttatgaaatgtttggggatgaagaagtgatgtgtttaaatggaaactggacggaaccacctcaatgcaaagattctacaggaaaatgtgggccccctccacctattgacaatggggacattacttcattcccgttgtcagtatatgctccagcttcatcagttgagtaccaatgccagaacttgtatcaacttgagggtaacaagcgaataacatgtagaaatggacaatggtcagaaccaccaaaatgcttacatccgtgtgtaatatcccgagaaattatggaaaattataacatagcattaaggtggacagccaaacagaagctttattcgagaacaggtgaatcagttgaatttgtgtgtaaacggggatatcgtctttcatcacgttctcacacattgcgaacaacatgttgggatgggaaactggagtatccaacttgtgcaaaaagatagaatcaatcataaagtgcacacctttattcagaactttagtattaaatcagttctcaatttcattttttatgtattgttttgactcctttttattcatacgtaaaattttggattaatttgtgaaaatgtaattataagctgagaccggtggctctcttcttaaaagcaccatattaaatcctggaaaactaa

SEQ ID NO: 423436 - DNA, 5019 bp, Homo sapiens
ccttttgcagcaagttctttcctgcactaatcacaattcttggaagaggagaactggacgttgtgaacagagttagctggtaaatgtcctcttaaaagatccaaaaaatgagacttctagcaaagattatttgccttatgttatgggctatttgtgtagcagaagattgcaatgaacttcctccaagaagaaatacagaaattctgacaggttcctggtctgaccaaacatatccagaaggcacccaggctatctataaatgccgccctggatatagatctcttggaaatgtaataatggtatgcaggaagggagaatgggttgctcttaatccattaaggaaatgtcagaaaaggccctgtggacatcctggagatactccttttggtacttttacccttacaggaggaaatgtgtttgaatatggtgtaaaagctgtgtatacatgtaatgaggggtatcaattgctaggtgagattaattaccgtgaatgtgacacagatggatggaccaatgatattcctatatgtgaagttgtgaagtgtttaccagtgacagcaccagagaatggaaaaattgtcagtagtgcaatggaaccagatcgggaataccattttggacaagcagtacggtttgtatgtaactcaggctacaagattgaaggagatgaagaaatgcattgttcagacgatggtttttggagtaaagagaaaccaaagtgtgtggaaatttcatgcaaatccccagatgttataaatggatctcctatatctcagaagattatttataaggagaatgaacgatttcaatataaatgtaacatgggttatgaatacagtgaaagaggagatgctgtatgcactgaatctggatggcgtccgttgccttcatgtgaagaaaaatcatgtgataatccttatattccaaatggtgactactcacctttaaggattaaacacagaactggagatgaaatcacgtaccagtgtagaaatggtttttatcctgcaacccggggaaatacagccaaatgcacaagtactggctggatacctgctccgagatgtaccttgaaaccttgtgattatccagacattaaacatggaggtctatatcatgagaatatgcgtagaccatactttccagtagctgtaggaaaatattactcctattactgtgatgaacattttgagactccgtcaggaagttactgggatcacattcattgcacacaagatggatggtcgccagcagtaccatgcctcagaaaatgttattttccttatttggaaaatggatataatcaaaattatggaagaaagtttgtacagggtaaatctatagacgttgcctgccatcctggctacgctcttccaaaagcgcagaccacagttacatgtatggagaatggctggtctcctactcccagatgcatccgtgtcaaaacatgttccaaatcaagtatagatattgagaatgggtttatttctgaatctcagtatacatatgccttaaaagaaaaagcgaaatatcaatgcaaactaggatatgtaacagcagatggtgaaacatcaggatcaattacatgtgggaaagatggatggtcagctcaacccacgtgcattaaatcttgtgatatcccagtatttatgaatgccagaactaaaaatgacttcacatggtttaagctgaatgacacattggactatgaatgccatgatggttatgaaagcaatactggaagcaccactggttccatagtgtgtggttacaatggttggtctgatttacccatatgttatgaaagagaatgcgaacttcctaaaatagatgtacacttagttcctgatcgcaagaaagaccagtataaagttggagaggtgttgaaattctcctgcaaaccaggatttacaatagttggacctaattccgttcagtgctaccactttggattgtctcctgacctcccaatatgtaaagagcaagtacaatcatgtggtccacctcctgaactcctcaatgggaatgttaaggaaaaaacgaaagaagaatatggacacagtgaagtggtggaatattattgcaatcctagatttctaatgaagggacctaataaaattcaatgtgttgatggagagtggacaactttaccagtgtgtattgtggaggagagtacctgtggagatatacctgaacttgaacatggctgggcccagctttcttcccctccttattactatggagattcagtggaattcaattgctcagaatcatttacaatgattggacacagatcaattacgtgtattcatggagtatggacccaacttccccagtgtgtggcaatagataaacttaagaagtgcaaatcatcaaatttaattatacttgaggaacatttaaaaaacaagaaggaattcgatcataattctaacataaggtacagatgtagaggaaaagaaggatggatacacacagtctgcataaatggaagatgggatccagaagtgaactgctcaatggcacaaatacaattatgcccacctccacctcagattcccaattctcacaatatgacaaccacactgaattatcgggatggagaaaaagtatctgttctttgccaagaaaattatctaattcaggaaggagaagaaattacatgcaaagatggaagatggcagtcaataccactctgtgttgaaaaaattccatgttcacaaccacctcagatagaacacggaaccattaattcatccaggtcttcacaagaaagttatgcacatgggactaaattgagttatacttgtgagggtggtttcaggatatctgaagaaaatgaaacaacatgctacatgggaaaatggagttctccacctcagtgtgaaggccttccttgtaaatctccacctgagatttctcatggtgttgtagctcacatgtcagacagttatcagtatggagaagaagttacgtacaaatgttttgaaggttttggaattgatgggcctgcaattgcaaaatgcttaggagaaaaatggtctcaccctccatcatgcataagtatggtgcattgaattttattatatgtatgataaatattcttcattcaaagtgtaagtggtaccaataagaaagtaaacagggactctagaaattcataaggttttcttgaatattctggactgctgtgggaaattatagctgtagtaattaaaacatttgacattataagccaaattagttcattttcacatcatcttgtgtgaactttaagcatcctctgatgtatattcttagacttctcatctctgttcttagggcacagctgcctctactcatcaatctccacattattcaatcttctgtcagtttatcaacaatctgcctataagtacattttctgaaatattttaaaaaatcattataagtatttcacatttgatagaagcaaaaaatttggaaatgcacacacaatataggtggtgtattattccgttttcacactgctgtaaagaccttcctgagactgggtaatttatgaacattaccgctgaaggggaagcaggcaccttcttcacaaggtggcaggagagagaggagtgagtgaaggaggaacttctaaacagttattaaatcatcatatcttgtgagaactcactcaccatcgtgagaacagcatgtgggaaactgccaccatgatccaatcacttcccaccaggtctctctctcaacacctggagattattattcaagatgagatttgggtgaggacacaaagcctaaccatatcaggtggcaagtatggacaaaaataatgtgaacaaaaaaatgtgtaatctcaattgctacggctaccaatatttcttcagtcttctaatatcatttctatcttgtatttttaatagatttagaagaatttaatgtaattaagacaaaatggctaatatattttctcaagttataagaaaaatgttgtacagtattcattgattctatatatcgctattttagaatccattacatgtattgtatgtaacctatttttaaagatttgcggaacaaatacatatttttcctatttcagaaacagattgtctcagtttacctagctttgaaaatgccatacccatgggagagaagaaggatgtgtataaggcgggtgagcaagtgacttacacttgtgcaacatattacaaaatggatggagccagtaatgtaacatgcattaatagcagatggacaggaaggccaacatgcagagacacctcctgtgtgaatccgcccacagtacaaaatgcttatatagtgtcgagacagatgagtaaatatccatctggtgagagagtacgttatcaatgtaggagcccttatgaaatgtttggggatgaagaagtgatgtgtttaaatggaaactggacggaaccacctcaatgcaaagattctacaggaaaatgtgggccccctccacctattgacaatggggacattacttcattcccgttgtcagtatatgctccagcttcatcagttgagtaccaatgccagaacttgtatcaacttgagggtaacaagcgaataacatgtagaaatggacaatggtcagaaccaccaaaatgcttacatccgtgtgtaatatcccgagaaattatggaaaattataacatagcattaaggtggacagccaaacagaagctttattcgagaacaggtgaatcagttgaatttgtgtgtaaacggggatatcgtctttcatcacgttctcacacattgcgaacaacatgttgggatgggaaactggagtatccaacttgtgcaaaaagatagaatcaatcataaagtgcacacctttattcagaactttagtattaaatcagttctcaatttcattttttatgtattgttttgactcctttttattcatacgtaaaattttggattaatttgtgaaaatgtaattataagctgagaccggtggctctcttcttaaaagcaccatattaaatcctggaaaactaa

SEQ ID NO: 423437 - DNA, 4961 bp, Homo sapiens
ccttttgcagcaagttctttcctgcactaatcacaattcttggaagaggagaactggacgttgtgaacagagttagctggtaaatgtcctcttaaaagatccaaaaaatgagacttctagcaaagattatttgccttatgttatgggctatttgtgtagcagaagattgcaatgaacttcctccaagaagaaatacagaaattctgacaggttcctggtctgaccaaacatatccagaaggcacccaggctatctataaatgccgccctggatatagatctcttggaaatgtaataatggtatgcaggaagggagaatgggttgctcttaatccattaaggaaatgtcagaaaaggccctgtggacatcctggagatactccttttggtacttttacccttacaggaggaaatgtgtttgaatatggtgtaaaagctgtgtatacatgtaatgaggggtatcaattgctaggtgagattaattaccgtgaatgtgacacagatggatggaccaatgatattcctatatgtgaagttgtgaagtgtttaccagtgacagcaccagagaatggaaaaattgtcagtagtgcaatggaaccagatcgggaataccattttggacaagcagtacggtttgtatgtaactcaggctacaagattgaaggagatgaagaaatgcattgttcagacgatggtttttggagtaaagagaaaccaaagtgtgtggaaatttcatgcaaatccccagatgttataaatggatctcctatatctcagaagattatttataaggagaatgaacgatttcaatataaatgtaacatgggttatgaatacagtgaaagaggagatgctgtatgcactgaatctggatggcgtccgttgccttcatgtgaagaaaaatcatgtgataatccttatattccaaatggtgactactcacctttaaggattaaacacagaactggagatgaaatcacgtaccagtgtagaaatggtttttatcctgcaacccggggaaatacagccaaatgcacaagtactggctggatacctgctccgagatgtaccttgaaaccttgtgattatccagacattaaacatggaggtctatatcatgagaatatgcgtagaccatactttccagtagctgtaggaaaatattactcctattactgtgatgaacattttgagactccgtcaggaagttactgggatcacattcattgcacacaagatggatggtcgccagcagtaccatgcctcagaaaatgttattttccttatttggaaaatggatataatcaaaattatggaagaaagtttgtacagggtaaatctatagacgttgcctgccatcctggctacgctcttccaaaagcgcagaccacagttacatgtatggagaatggctggtctcctactcccagatgcatccgtgtcaaaacatgttccaaatcaagtatagatattgagaatgggtttatttctgaatctcagtatacatatgccttaaaagaaaaagcgaaatatcaatgcaaactaggatatgtaacagcagatggtgaaacatcaggatcaattacatgtgggaaagatggatggtcagctcaacccacgtgcattaaatcttgtgatatcccagtatttatgaatgccagaactaaaaatgacttcacatggtttaagctgaatgacacattggactatgaatgccatgatggttatgaaagcaatactggaagcaccactggttccatagtgtgtggttacaatggttggtctgatttacccatatgttatgaaagagaatgcgaacttcctaaaatagatgtacacttagttcctgatcgcaagaaagaccagtataaagttggagaggtgttgaaattctcctgcaaaccaggatttacaatagttggacctaattccgttcagtgctaccactttggattgtctcctgacctcccaatatgtaaagagcaagtacaatcatgtggtccacctcctgaactcctcaatgggaatgttaaggaaaaaacgaaagaagaatatggacacagtgaagtggtggaatattattgcaatcctagatttctaatgaagggacctaataaaattcaatgtgttgatggagagtggacaactttaccagtgtgtattgtggaggagagtacctgtggagatatacctgaacttgaacatggctgggcccagctttcttcccctccttattactatggagattcagtggaattcaattgctcagaatcatttacaatgattggacacagatcaattacgtgtattcatggagtatggacccaacttccccagtgtgtggcaatagataaacttaagaagtgcaaatcatcaaatttaattatacttgaggaacatttaaaaaacaagaaggaattcgatcataattctaacataaggtacagatgtagaggaaaagaaggatggatacacacagtctgcataaatggaagatgggatccagaagtgaactgctcaatggcacaaatacaattatgcccacctccacctcagattcccaattctcacaatatgacaaccacactgaattatcgggatggagaaaaagtatctgttctttgccaagaaaattatctaattcaggaaggagaagaaattacatgcaaagatggaagatggcagtcaataccactctgtgttgaaaaaattccatgttcacaaccacctcagatagaacacggaaccattaattcatccaggtcttcacaagaaagttatgcacatgggactaaattgagttatacttgtgagggtggtttcaggatatctgaagaaaatgaaacaacatgctacatgggaaaatggagttctccacctcagtgtgaaggccttccttgtaaatctccacctgagatttctcatggtgttgtagctcacatgtcagacagttatcagtatggagaagaagttacgtacaaatgttttgaaggttttggaattgatgggcctgcaattgcaaaatgcttaggagaaaaatggtctcaccctccatcatgcataagtatggtgcattgaattttattatatgtatgataaatattcttcattcaaagtgtaagtggtaccaataagaaagtaaacagggactctagaaattcataaggttttcttgaatattctggactgctgtgggaaattatagctgtagtaattaaaacatttgacattataagccaaattagttcattttcacatcatcttgtgtgaactttaagcatcctctgatgtatattcttagacttctcatctctgttcttagggcacagctgcctctactcatcaatctccacattattcaatcttctgtcagtttatcaacaatctgcctataagtacattttctgaaatattttaaaaaatcattataagtatttcacatttgatagaagcaaaaaatttggaaatgcacacacaatataggtggtgtattattccgttttcacactgctgtaaagaccttcctgagactgggtaatttatgaacattaccgctgaaggggaagcaggcaccttcttcacaaggtggcaggagagagaggagtgagtgaaggaggaacttctaaacagttattaaatcatcatatcttgtgagaactcactcaccatcgtgagaacagcatgtgggaaactgccaccatgatccaatcacttcccaccaggtctctctctcaacacctggagattattattcaagatgagatttgggtgaggacacaaagcctaaccatatcaggtggcaagtatggacaaaaataatgtgaacaaaaaaatgtgtaatctcaattgctacggctaccaatatttcttcagtcttctaatatcatttctatcttgtatttttaatagatttagaagaatttaatgtaattaagacaaaatggctaatatattttctcaagttataagaaaaatgttgtacagtattcattgattctatatatcgctattttagaatccattacatgtattgtatgtaacctatttttaaagatttgcggaacaaatacatatttttcctatttcagaaacagattgtctcagtttacctagctttgaaaatgccatacccatgggagagaagaaggatgtgtataaggcgggtgagcaagtgacttacacttgtgcaacatattacaaaatggatggagccagtaatgtaacatgcattaatagcagatggacaggaaggccaacatgcagagacacctcctgtgtgaatccgcccacagtacaaaatgcttatatagtgtcgagacagatgagtaaatatccatctggtgagagagtacgttatcaatgtaggagcccttatgaaatgtttggggatgaagaagtgatgtgtttaaatggaaactggacggaaccacctcaatgcaaagattctacaggaaaatgtgggccccctccacctattgacaatggggacattacttcattcccgttgtcagtatatgctccagcttcatcagttgagtaccaatgccagaacttgtatcaacttgagggtaacaagcgaataacatgtagaaatggacaatggtcagaaccaccaaaatgcttacatccgtgtgtaatatcccgagaaattatggaaaattataacatagcattaaggtggacagccaaacagaagctttattcgagaacaggtgaatcagttgaatttgtgtgtaaacggggatatcgtctttcatcacgttctcacacattgcgaacaacatgttgggatgggaaactggagtatccaacttgtgcaaaaagatagaatcaatcataaatattgttttgactcctttttattcatacgtaaaattttggattaatttgtgaaaatgtaattataagctgagaccggtggctctcttcttaaaagcaccatattaaatcctggaaaactaa

SEQ ID NO: 423438 - DNA, 4965 bp, Homo sapiens
ccttttgcagcaagttctttcctgcactaatcacaattcttggaagaggagaactggacgttgtgaacagagttagctggtaaatgtcctcttaaaagatccaaaaaatgagacttctagcaaagattatttgccttatgttatgggctatttgtgtagcagaagattgcaatgaacttcctccaagaagaaatacagaaattctgacaggttcctggtctgaccaaacatatccagaaggcacccaggctatctataaatgccgccctggatatagatctcttggaaatgtaataatggtatgcaggaagggagaatgggttgctcttaatccattaaggaaatgtcagaaaaggccctgtggacatcctggagatactccttttggtacttttacccttacaggaggaaatgtgtttgaatatggtgtaaaagctgtgtatacatgtaatgaggggtatcaattgctaggtgagattaattaccgtgaatgtgacacagatggatggaccaatgatattcctatatgtgaagttgtgaagtgtttaccagtgacagcaccagagaatggaaaaattgtcagtagtgcaatggaaccagatcgggaataccattttggacaagcagtacggtttgtatgtaactcaggctacaagattgaaggagatgaagaaatgcattgttcagacgatggtttttggagtaaagagaaaccaaagtgtgtggaaatttcatgcaaatccccagatgttataaatggatctcctatatctcagaagattatttataaggagaatgaacgatttcaatataaatgtaacatgggttatgaatacagtgaaagaggagatgctgtatgcactgaatctggatggcgtccgttgccttcatgtgaagaaaaatcatgtgataatccttatattccaaatggtgactactcacctttaaggattaaacacagaactggagatgaaatcacgtaccagtgtagaaatggtttttatcctgcaacccggggaaatacagccaaatgcacaagtactggctggatacctgctccgagatgtaccttgaaaccttgtgattatccagacattaaacatggaggtctatatcatgagaatatgcgtagaccatactttccagtagctgtaggaaaatattactcctattactgtgatgaacattttgagactccgtcaggaagttactgggatcacattcattgcacacaagatggatggtcgccagcagtaccatgcctcagaaaatgttattttccttatttggaaaatggatataatcaaaattatggaagaaagtttgtacagggtaaatctatagacgttgcctgccatcctggctacgctcttccaaaagcgcagaccacagttacatgtatggagaatggctggtctcctactcccagatgcatccgtgtcaaaacatgttccaaatcaagtatagatattgagaatgggtttatttctgaatctcagtatacatatgccttaaaagaaaaagcgaaatatcaatgcaaactaggatatgtaacagcagatggtgaaacatcaggatcaattacatgtgggaaagatggatggtcagctcaacccacgtgcattaaatcttgtgatatcccagtatttatgaatgccagaactaaaaatgacttcacatggtttaagctgaatgacacattggactatgaatgccatgatggttatgaaagcaatactggaagcaccactggttccatagtgtgtggttacaatggttggtctgatttacccatatgttatgaaagagaatgcgaacttcctaaaatagatgtacacttagttcctgatcgcaagaaagaccagtataaagttggagaggtgttgaaattctcctgcaaaccaggatttacaatagttggacctaattccgttcagtgctaccactttggattgtctcctgacctcccaatatgtaaagagcaagtacaatcatgtggtccacctcctgaactcctcaatgggaatgttaaggaaaaaacgaaagaagaatatggacacagtgaagtggtggaatattattgcaatcctagatttctaatgaagggacctaataaaattcaatgtgttgatggagagtggacaactttaccagtgtgtattgtggaggagagtacctgtggagatatacctgaacttgaacatggctgggcccagctttcttcccctccttattactatggagattcagtggaattcaattgctcagaatcatttacaatgattggacacagatcaattacgtgtattcatggagtatggacccaacttccccagtgtgtggcaatagataaacttaagaagtgcaaatcatcaaatttaattatacttgaggaacatttaaaaaacaagaaggaattcgatcataattctaacataaggtacagatgtagaggaaaagaaggatggatacacacagtctgcataaatggaagatgggatccagaagtgaactgctcaatggcacaaatacaattatgcccacctccacctcagattcccaattctcacaatatgacaaccacactgaattatcgggatggagaaaaagtatctgttctttgccaagaaaattatctaattcaggaaggagaagaaattacatgcaaagatggaagatggcagtcaataccactctgtgttgaaaaaattccatgttcacaaccacctcagatagaacacggaaccattaattcatccaggtcttcacaagaaagttatgcacatgggactaaattgagttatacttgtgagggtggtttcaggatatctgaagaaaatgaaacaacatgctacatgggaaaatggagttctccacctcagtgtgaaggccttccttgtaaatctccacctgagatttctcatggtgttgtagctcacatgtcagacagttatcagtatggagaagaagttacgtacaaatgttttgaaggttttggaattgatgggcctgcaattgcaaaatgcttaggagaaaaatggtctcaccctccatcatgcataagtatggtgcattgaattttattatatgtatgataaatattcttcattcaaagtgtaagtggtaccaataagaaagtaaacagggactctagaaattcataaggttttcttgaatattctggactgctgtgggaaattatagctgtagtaattaaaacatttgacattataagccaaattagttcattttcacatcatcttgtgtgaactttaagcatcctctgatgtatattcttagacttctcatctctgttcttagggcacagctgcctctactcatcaatctccacattattcaatcttctgtcagtttatcaacaatctgcctataagtacattttctgaaatattttaaaaaatcattataagtatttcacatttgatagaagcaaaaaatttggaaatgcacacacaatataggtggtgtattattccgttttcacactgctgtaaagaccttcctgagactgggtaatttatgaacattaccgctgaaggggaagcaggcaccttcttcacaaggtggcaggagagagaggagtgagtgaaggaggaacttctaaacagttattaaatcatcatatcttgtgagaactcactcaccatcgtgagaacagcatgtgggaaactgccaccatgatccaatcacttcccaccaggtctctctctcaacacctggagattattattcaagatgagatttgggtgaggacacaaagcctaaccatatcaggtggcaagtatggacaaaaataatgtgaacaaaaaaatgtgtaatctcaattgctacggctaccaatatttcttcagtcttctaatatcatttctatcttgtatttttaatagatttagaagaatttaatgtaattaagacaaaatggctaatatattttctcaagttataagaaatgtattgtatgtaacctatttttaaagatttgcggaacaaatacatatttttcctatttcagaaacagattgtctcagtttacctagctttgaaaatgccatacccatgggagagaagaaggatgtgtataaggcgggtgagcaagtgacttacacttgtgcaacatattacaaaatggatggagccagtaatgtaacatgcattaatagcagatggacaggaaggccaacatgcagagacacctcctgtgtgaatccgcccacagtacaaaatgcttatatagtgtcgagacagatgagtaaatatccatctggtgagagagtacgttatcaatgtaggagcccttatgaaatgtttggggatgaagaagtgatgtgtttaaatggaaactggacggaaccacctcaatgcaaagattctacaggaaaatgtgggccccctccacctattgacaatggggacattacttcattcccgttgtcagtatatgctccagcttcatcagttgagtaccaatgccagaacttgtatcaacttgagggtaacaagcgaataacatgtagaaatggacaatggtcagaaccaccaaaatgcttacatccgtgtgtaatatcccgagaaattatggaaaattataacatagcattaaggtggacagccaaacagaagctttattcgagaacaggtgaatcagttgaatttgtgtgtaaacggggatatcgtctttcatcacgttctcacacattgcgaacaacatgttgggatgggaaactggagtatccaacttgtgcaaaaagatagaatcaatcataaagtgcacacctttattcagaactttagtattaaatcagttctcaatttcattttttatgtattgttttgactcctttttattcatacgtaaaattttggattaatttgtgaaaatgtaattataagctgagaccggtggctctcttcttaaaagcaccatattaaatcctggaaaactaa

SEQ ID NO: 423439 - DNA, 5291 bp, Homo sapiens
ccttttgcagcaagttctttcctgcactaatcacaattcttggaagaggagaactggacgttgtgaacagagttagctggtaaatgtcctcttaaaagatccaaaaaatgagacttctagcaaagattatttgccttatgttatgggctatttgtgtagcagaagattgcaatgaacttcctccaagaagaaatacagaaattctgacaggttcctggtctgaccaaacatatccagaaggcacccaggctatctataaatgccgccctggatatagatctcttggaaatgtaataatggtatgcaggaagggagaatgggttgctcttaatccattaaggaaatgtcagaaaaggccctgtggacatcctggagatactccttttggtacttttacccttacaggaggaaatgtgtttgaatatggtgtaaaagctgtgtatacatgtaatgaggggtatcaattgctaggtgagattaattaccgtgaatgtgacacagatggatggaccaatgatattcctatatgtgaagttgtgaagtgtttaccagtgacagcaccagagaatggaaaaattgtcagtagtgcaatggaaccagatcgggaataccattttggacaagcagtacggtttgtatgtaactcaggctacaagattgaaggagatgaagaaatgcattgttcagacgatggtttttggagtaaagagaaaccaaagtgtgtggaaatttcatgcaaatccccagatgttataaatggatctcctatatctcagaagattatttataaggagaatgaacgatttcaatataaatgtaacatgggttatgaatacagtgaaagaggagatgctgtatgcactgaatctggatggcgtccgttgccttcatgtgaagaaaaatcatgtgataatccttatattccaaatggtgactactcacctttaaggattaaacacagaactggagatgaaatcacgtaccagtgtagaaatggtttttatcctgcaacccggggaaatacagccaaatgcacaagtactggctggatacctgctccgagatgtaccttgaaaccttgtgattatccagacattaaacatggaggtctatatcatgagaatatgcgtagaccatactttccagtagctgtaggaaaatattactcctattactgtgatgaacattttgagactccgtcaggaagttactgggatcacattcattgcacacaagatggatggtcgccagcagtaccatgcctcagaaaatgttattttccttatttggaaaatggatataatcaaaattatggaagaaagtttgtacagggtaaatctatagacgttgcctgccatcctggctacgctcttccaaaagcgcagaccacagttacatgtatggagaatggctggtctcctactcccagatgcatccgtgtcaaaacatgttccaaatcaagtatagatattgagaatgggtttatttctgaatctcagtatacatatgccttaaaagaaaaagcgaaatatcaatgcaaactaggatatgtaacagcagatggtgaaacatcaggatcaattacatgtgggaaagatggatggtcagctcaacccacgtgcattaaatcttgtgatatcccagtatttatgaatgccagaactaaaaatgacttcacatggtttaagctgaatgacacattggactatgaatgccatgatggttatgaaagcaatactggaagcaccactggttccatagtgtgtggttacaatggttggtctgatttacccatatgttatgaaagagaatgcgaacttcctaaaatagatgtacacttagttcctgatcgcaagaaagaccagtataaagttggagaggtgttgaaattctcctgcaaaccaggatttacaatagttggacctaattccgttcagtgctaccactttggattgtctcctgacctcccaatatgtaaagagcaagtacaatcatgtggtccacctcctgaactcctcaatgggaatgttaaggaaaaaacgaaagaagaatatggacacagtgaagtggtggaatattattgcaatcctagatttctaatgaagggacctaataaaattcaatgtgttgatggagagtggacaactttaccagtgtgtattgtggaggagagtacctgtggagatatacctgaacttgaacatggctgggcccagctttcttcccctccttattactatggagattcagtggaattcaattgctcagaatcatttacaatgattggacacagatcaattacgtgtattcatggagtatggacccaacttccccagtgtgtggcaatagataaacttaagaagtgcaaatcatcaaatttaattatacttgaggaacatttaaaaaacaagaaggaattcgatcataattctaacataaggtacagatgtagaggaaaagaaggatggatacacacagtctgcataaatggaagatgggatccagaagtgaactgctcaatggcacaaatacaattatgcccacctccacctcagattcccaattctcacaatatgacaaccacactgaattatcgggatggagaaaaagtatctgttctttgccaagaaaattatctaattcaggaaggagaagaaattacatgcaaagatggaagatggcagtcaataccactctgtgttgaaaaaattccatgttcacaaccacctcagatagaacacggaaccattaattcatccaggtcttcacaagaaagttatgcacatgggactaaattgagttatacttgtgagggtggtttcaggatatctgaagaaaatgaaacaacatgctacatgggaaaatggagttctccacctcagtgtgaaggccttccttgtaaatctccacctgagatttctcatggtgttgtagctcacatgtcagacagttatcagtatggagaagaagttacgtacaaatgttttgaaggttttggaattgatgggcctgcaattgcaaaatgcttaggagaaaaatggtctcaccctccatcatgcataagtatggtgcattgaattttattatatgtatgataaatattcttcattcaaagtgtaagtggtaccaataagaaagtaaacagggactctagaaattcataaggttttcttgaatattctggactgctgtgggaaattatagctgtagtaattaaaacatttgacattataagccaaattagttcattttcacatcatcttgtgtgaactttaagcatcctctgatgtatattcttagacttctcatctctgttcttagggcacagctgcctctactcatcaatctccacattattcaatcttctgtcagtttatcaacaatctgcctataagtacattttctgaaatattttaaaaaatcattataagtatttcacatttgatagaagcaaaaaatttggaaatgcacacacaatataggtggtgtattattccgttttcacactgctgtaaagaccttcctgagactgggtaatttatgaacattaccgctgaaggggaagcaggcaccttcttcacaaggtggcaggagagagaggagtgagtgaaggaggaacttctaaacagttattaaatcatcatatcttgtgagaactcactcaccatcgtgagaacagcatgtgggaaactgccaccatgatccaatcacttcccaccaggtctctctctcaacacctggagattattattcaagatgagatttgggtgaggacacaaagcctaaccatatcaggtggcaagtatggacaaaaataatgtgaacaaaaaaatgtgtaatctcaattgctacggctaccaatatttcttcagtcttctaatatcatttctatcttgtatttttaatagatttagaagaatttaatgtaattaagacaaaatggctaatatattttctcaagttataagaaaaatgttgtacagtattcattgattctatatatcgctattttagaatccattacatgtattgtatgtaacctatttttaaagatttgcggaacaaatacatatttttcctatttcagaaacagattgtctcagtttacctagctttgaaaatgccatacccatgggagagaagaaggatgtgtataaggcgggtgagcaagtgacttacacttgtgcaacatattacaaaatggatggagccagtaatgtaacatgcattaatagcagatggacaggaaggccaacatgcagagacacctcctgtgtgaatccgcccacagtacaaaatgcttatatagtgtcgagacagatgagtaaatatccatctggtgagagagtacgttatcaatgtaggagcccttatgaaatgtttggggatgaagaagtgatgtgtttaaatggaaactggacggaaccacctcaatgcaaagattctacaggaaaatgtgggccccctccacctattgacaatggggacattacttcattcccgttgtcagtatatgctccagcttcatcagttgagtaccaatgccagaacttgtatcaacttgagggtaacaagcgaataacatgtagaaatggacaatggtcagaaccaccaaaatgcttacatccgtgtgtaatatcccgagaaattatggaaaattataacatagcattaaggtggacagccaaacagaagctttattcgagaacaggtgaatcagttgaatttgtgtgtaaacggggatatcgtctttcatcacgttctcacacattgcgaacaacatgttgggatgggaaactggagtatccaacttgtgcaaaaagatagaatcaatcataaatattgttttgactcctttttattcatacgtaaaattttggattaatttgtgaaaatgtaattataagctgagaccggtggctctcttcttaaaagcaccatattaaatcctggaaaactaaaaaaaaaaaaaaaaaactcgagtttttttttttttttttttttttttttaaaacactctttacgccggcttctattgacttgggttaatcgtgtgaccgcggtggctggcacgaaattgaccaaccctggggttagtatagcttagttaaactttcgtttattgctaaaggttaatcactgctgtttcccgtgggggtgtggctaggctaagcgttttgagctgcattgctgcgtgcttgatgcttgtcccttttgatcgtggtgatttagagggtgaactcactggaacggggatgcttgcatgtgtaatcttactaagagctaataga

SEQ ID NO: 423440 - DNA, 5023 bp, Homo sapiens
ccttttgcagcaagttctttcctgcactaatcacaattcttggaagaggagaactggacgttgtgaacagagttagctggtaaatgtcctcttaaaagatccaaaaaatgagacttctagcaaagattatttgccttatgttatgggctatttgtgtagcagaagattgcaatgaacttcctccaagaagaaatacagaaattctgacaggttcctggtctgaccaaacatatccagaaggcacccaggctatctataaatgccgccctggatatagatctcttggaaatgtaataatggtatgcaggaagggagaatgggttgctcttaatccattaaggaaatgtcagaaaaggccctgtggacatcctggagatactccttttggtacttttacccttacaggaggaaatgtgtttgaatatggtgtaaaagctgtgtatacatgtaatgaggggtatcaattgctaggtgagattaattaccgtgaatgtgacacagatggatggaccaatgatattcctatatgtgaagttgtgaagtgtttaccagtgacagcaccagagaatggaaaaattgtcagtagtgcaatggaaccagatcgggaataccattttggacaagcagtacggtttgtatgtaactcaggctacaagattgaaggagatgaagaaatgcattgttcagacgatggtttttggagtaaagagaaaccaaagtgtgtggaaatttcatgcaaatccccagatgttataaatggatctcctatatctcagaagattatttataaggagaatgaacgatttcaatataaatgtaacatgggttatgaatacagtgaaagaggagatgctgtatgcactgaatctggatggcgtccgttgccttcatgtgaagaaaaatcatgtgataatccttatattccaaatggtgactactcacctttaaggattaaacacagaactggagatgaaatcacgtaccagtgtagaaatggtttttatcctgcaacccggggaaatacagccaaatgcacaagtactggctggatacctgctccgagatgtaccttgaaaccttgtgattatccagacattaaacatggaggtctatatcatgagaatatgcgtagaccatactttccagtagctgtaggaaaatattactcctattactgtgatgaacattttgagactccgtcaggaagttactgggatcacattcattgcacacaagatggatggtcgccagcagtaccatgcctcagaaaatgttattttccttatttggaaaatggatataatcaaaattatggaagaaagtttgtacagggtaaatctatagacgttgcctgccatcctggctacgctcttccaaaagcgcagaccacagttacatgtatggagaatggctggtctcctactcccagatgcatccgtgtcaaaacatgttccaaatcaagtatagatattgagaatgggtttatttctgaatctcagtatacatatgccttaaaagaaaaagcgaaatatcaatgcaaactaggatatgtaacagcagatggtgaaacatcaggatcaattacatgtgggaaagatggatggtcagctcaacccacgtgcattaaatcttgtgatatcccagtatttatgaatgccagaactaaaaatgacttcacatggtttaagctgaatgacacattggactatgaatgccatgatggttatgaaagcaatactggaagcaccactggttccatagtgtgtggttacaatggttggtctgatttacccatatgttatgaaagagaatgcgaacttcctaaaatagatgtacacttagttcctgatcgcaagaaagaccagtataaagttggagaggtgttgaaattctcctgcaaaccaggatttacaatagttggacctaattccgttcagtgctaccactttggattgtctcctgacctcccaatatgtaaagagcaagtacaatcatgtggtccacctcctgaactcctcaatgggaatgttaaggaaaaaacgaaagaagaatatggacacagtgaagtggtggaatattattgcaatcctagatttctaatgaagggacctaataaaattcaatgtgttgatggagagtggacaactttaccagtgtgtattgtggaggagagtacctgtggagatatacctgaacttgaacatggctgggcccagctttcttcccctccttattactatggagattcagtggaattcaattgctcagaatcatttacaatgattggacacagatcaattacgtgtattcatggagtatggacccaacttccccagtgtgtggcaatagataaacttaagaagtgcaaatcatcaaatttaattatacttgaggaacatttaaaaaacaagaaggaattcgatcataattctaacataaggtacagatgtagaggaaaagaaggatggatacacacagtctgcataaatggaagatgggatccagaagtgaactgctcaatggcacaaatacaattatgcccacctccacctcagattcccaattctcacaatatgacaaccacactgaattatcgggatggagaaaaagtatctgttctttgccaagaaaattatctaattcaggaaggagaagaaattacatgcaaagatggaagatggcagtcaataccactctgtgttgaaaaaattccatgttcacaaccacctcagatagaacacggaaccattaattcatccaggtcttcacaagaaagttatgcacatgggactaaattgagttatacttgtgagggtggtttcaggatatctgaagaaaatgaaacaacatgctacatgggaaaatggagttctccacctcagtgtgaaggccttccttgtaaatctccacctgagatttctcatggtgttgtagctcacatgtcagacagttatcagtatggagaagaagttacgtacaaatgttttgaaggttttggaattgatgggcctgcaattgcaaaatgcttaggagaaaaatggtctcaccctccatcatgcataagtatggtgcattgaattttattatatgtatgataaatattcttcattcaaagtgtaagtggtaccaataagaaagtaaacagggactctagaaattcataaggttttcttgaatattctggactgctgtgggaaattatagctgtagtaattaaaacatttgacattataagccaaattagttcattttcacatcatcttgtgtgaactttaagcatcctctgatgtatattcttagacttctcatctctgttcttagggcacagctgcctctactcatcaatctccacattattcaatcttctgtcagtttatcaacaatctgcctataagtacattttctgaaatattttaaaaaatcattataagtatttcacatttgatagaagcaaaaaatttggaaatgcacacacaatataggtggtgtattattccgttttcacactgctgtaaagaccttcctgagactgggtaatttatgaaagaaaaaattttaattgatcacagttcctcatgactgaggaggtgtcatgaaacttaccattaccgctgaaggggaagcaggcaccttcttcacaaggtggcaggagagagaggagtgagtgaaggaggaacttctaaacagttattaaatcatcatatcttgtgagaactcactcaccatcgtgagaacagcatgtgggaaactgccaccatgatccaatcacttcccaccaggtctctctctcaacacctggagattattattcaagatgagatttgggtgaggacacaaagcctaaccatatcaggtggcaagtatggacaaaaataatgtgaacaaaaaaatgtgtaatctcaattgctacggctaccaatatttcttcagtcttctaatatcatttctatcttgtatttttaatagatttagaagaatttaatgtaattaagacaaaatggctaatatattttctcaagttataagaaatgtattgtatgtaacctatttttaaagatttgcggaacaaatacatatttttcctatttcagaaacagattgtctcagtttacctagctttgaaaatgccatacccatgggagagaagaaggatgtgtataaggcgggtgagcaagtgacttacacttgtgcaacatattacaaaatggatggagccagtaatgtaacatgcattaatagcagatggacaggaaggccaacatgcagagacacctcctgtgtgaatccgcccacagtacaaaatgcttatatagtgtcgagacagatgagtaaatatccatctggtgagagagtacgttatcaatgtaggagcccttatgaaatgtttggggatgaagaagtgatgtgtttaaatggaaactggacggaaccacctcaatgcaaagattctacaggaaaatgtgggccccctccacctattgacaatggggacattacttcattcccgttgtcagtatatgctccagcttcatcagttgagtaccaatgccagaacttgtatcaacttgagggtaacaagcgaataacatgtagaaatggacaatggtcagaaccaccaaaatgcttacatccgtgtgtaatatcccgagaaattatggaaaattataacatagcattaaggtggacagccaaacagaagctttattcgagaacaggtgaatcagttgaatttgtgtgtaaacggggatatcgtctttcatcacgttctcacacattgcgaacaacatgttgggatgggaaactggagtatccaacttgtgcaaaaagatagaatcaatcataaagtgcacacctttattcagaactttagtattaaatcagttctcaatttcattttttatgtattgttttgactcctttttattcatacgtaaaattttggattaatttgtgaaaatgtaattataagctgagaccggtggctctcttcttaaaagcaccatattaaatcctggaaaactaa

SEQ ID NO: 423441 - DNA, 5255 bp, Homo sapiens
ccttttgcagcaagttctttcctgcactaatcacaattcttggaagaggagaactggacgttgtgaacagagttagctggtaaatgtcctcttaaaagatccaaaaaatgagacttctagcaaagattatttgccttatgttatgggctatttgtgtagcagaagattgcaatgaacttcctccaagaagaaatacagaaattctgacaggttcctggtctgaccaaacatatccagaaggcacccaggctatctataaatgccgccctggatatagatctcttggaaatgtaataatggtatgcaggaagggagaatgggttgctcttaatccattaaggaaatgtcagaaaaggccctgtggacatcctggagatactccttttggtacttttacccttacaggaggaaatgtgtttgaatatggtgtaaaagctgtgtatacatgtaatgaggggtatcaattgctaggtgagattaattaccgtgaatgtgacacagatggatggaccaatgatattcctatatgtgaagttgtgaagtgtttaccagtgacagcaccagagaatggaaaaattgtcagtagtgcaatggaaccagatcgggaataccattttggacaagcagtacggtttgtatgtaactcaggctacaagattgaaggagatgaagaaatgcattgttcagacgatggtttttggagtaaagagaaaccaaagtgtgtggaaatttcatgcaaatccccagatgttataaatggatctcctatatctcagaagattatttataaggagaatgaacgatttcaatataaatgtaacatgggttatgaatacagtgaaagaggagatgctgtatgcactgaatctggatggcgtccgttgccttcatgtgaagaaaaatcatgtgataatccttatattccaaatggtgactactcacctttaaggattaaacacagaactggagatgaaatcacgtaccagtgtagaaatggtttttatcctgcaacccggggaaatacagccaaatgcacaagtactggctggatacctgctccgagatgtaccttgaaaccttgtgattatccagacattaaacatggaggtctatatcatgagaatatgcgtagaccatactttccagtagctgtaggaaaatattactcctattactgtgatgaacattttgagactccgtcaggaagttactgggatcacattcattgcacacaagatggatggtcgccagcagtaccatgcctcagaaaatgttattttccttatttggaaaatggatataatcaaaattatggaagaaagtttgtacagggtaaatctatagacgttgcctgccatcctggctacgctcttccaaaagcgcagaccacagttacatgtatggagaatggctggtctcctactcccagatgcatccgtgtcaaaacatgttccaaatcaagtatagatattgagaatgggtttatttctgaatctcagtatacatatgccttaaaagaaaaagcgaaatatcaatgcaaactaggatatgtaacagcagatggtgaaacatcaggatcaattacatgtgggaaagatggatggtcagctcaacccacgtgcattaaatcttgtgatatcccagtatttatgaatgccagaactaaaaatgacttcacatggtttaagctgaatgacacattggactatgaatgccatgatggttatgaaagcaatactggaagcaccactggttccatagtgtgtggttacaatggttggtctgatttacccatatgttatgaaagagaatgcgaacttcctaaaatagatgtacacttagttcctgatcgcaagaaagaccagtataaagttggagaggtgttgaaattctcctgcaaaccaggatttacaatagttggacctaattccgttcagtgctaccactttggattgtctcctgacctcccaatatgtaaagagcaagtacaatcatgtggtccacctcctgaactcctcaatgggaatgttaaggaaaaaacgaaagaagaatatggacacagtgaagtggtggaatattattgcaatcctagatttctaatgaagggacctaataaaattcaatgtgttgatggagagtggacaactttaccagtgtgtattgtggaggagagtacctgtggagatatacctgaacttgaacatggctgggcccagctttcttcccctccttattactatggagattcagtggaattcaattgctcagaatcatttacaatgattggacacagatcaattacgtgtattcatggagtatggacccaacttccccagtgtgtggcaatagataaacttaagaagtgcaaatcatcaaatttaattatacttgaggaacatttaaaaaacaagaaggaattcgatcataattctaacataaggtacagatgtagaggaaaagaaggatggatacacacagtctgcataaatggaagatgggatccagaagtgaactgctcaatggcacaaatacaattatgcccacctccacctcagattcccaattctcacaatatgacaaccacactgaattatcgggatggagaaaaagtatctgttctttgccaagaaaattatctaattcaggaaggagaagaaattacatgcaaagatggaagatggcagtcaataccactctgtgttgaaaaaattccatgttcacaaccacctcagatagaacacggaaccattaattcatccaggtcttcacaagaaagttatgcacatgggactaaattgagttatacttgtgagggtggtttcaggatatctgaagaaaatgaaacaacatgctacatgggaaaatggagttctccacctcagtgtgaaggccttccttgtaaatctccacctgagatttctcatggtgttgtagctcacatgtcagacagttatcagtatggagaagaagttacgtacaaatgttttgaaggttttggaattgatgggcctgcaattgcaaaatgcttaggagaaaaatggtctcaccctccatcatgcataagtatggtgcattgaattttattatatgtatgataaatattcttcattcaaagtgtaagtggtaccaataagaaagtaaacagggactctagaaattcataaggttttcttgaatattctggactgctgtgggaaattatagctgtagtaattaaaacatttgacattataagccaaattagttcattttcacatcatcttgtgtgaactttaagcatcctctgatgtatattcttagacttctcatctctgttcttagggcacagctgcctctactcatcaatctccacattattcaatcttctgtcagtttatcaacaatctgcctataagtacattttctgaaatattttaaaaaatcattataagtatttcacatttgatagaagcaaaaaatttggaaatgcacacacaatataggtggtgtattattccgttttcacactgctgtaaagaccttcctgagactgggtaatttatgaacattaccgctgaaggggaagcaggcaccttcttcacaaggtggcaggagagagaggagtgagtgaaggaggaacttctaaacagttattaaatcatcatatcttgtgagaactcactcaccatcgtgagaacagcatgtgggaaactgccaccatgatccaatcacttcccaccaggtctctctctcaacacctggagattattattcaagatgagatttgggtgaggacacaaagcctaaccatatcaggtggcaagtatggacaaaaataatgtgaacaaaaaaatgtgtaatctcaattgctacggctaccaatatttcttcagtcttctaatatcatttctatcttgtatttttaatagatttagaagaatttaatgtaattaagacaaaatggctaatatattttctcaagttataagaaaaatgttgtacagtattcattgattctatatatcgctattttagaatccattacatgtattgtatgtaacctatttttaaagatttgcggaacaaatacatatttttcctatttcagaaacagattgtctcagtttacctagctttgaaaatgccatacccatgggagagaagaaggatgtgtataaggcgggtgagcaagtgacttacacttgtgcaacatattacaaaatggatggagccagtaatgtaacatgcattaatagcagatggacaggaaggccaacatgcagagacacctcctgtgtgaatccgcccacagtacaaaatgcttatatagtgtcgagacagatgagtaaatatccatctggtgagagagtacgttatcaatgtaggagcccttatgaaatgtttggggatgaagaagtgatgtgtttaaatggaaactggacggaaccacctcaatgcaaagattctacaggaaaatgtgggccccctccacctattgacaatggggacattacttcattcccgttgtcagtatatgctccagcttcatcagttgagtaccaatgccagaacttgtatcaacttgagggtaacaagcgaataacatgtagaaatggacaatggtcagaaccaccaaaatgcttacataacatagcattaaggtggacagccaaacagaagctttattcgagaacaggtgaatcagttgaatttgtgtgtaaacggggatatcgtctttcatcacgttctcacacattgcgaacaacatgttgggatgggaaactggagtatccaacttgtgcaaaaagatagaatcaatcataaatattgttttgactcctttttattcatacgtaaaattttggattaatttgtgaaaatgtaattataagctgagaccggtggctctcttcttaaaagcaccatattaaatcctggaaaactaaaaaaaaaaaaaaaaaactcgagtttttttttttttttttttttttttttaaaacactctttacgccggcttctattgacttgggttaatcgtgtgaccgcggtggctggcacgaaattgaccaaccctggggttagtatagcttagttaaactttcgtttattgctaaaggttaatcactgctgtttcccgtgggggtgtggctaggctaagcgttttgagctgcattgctgcgtgcttgatgcttgtcccttttgatcgtggtgatttagagggtgaactcactggaacggggatgcttgcatgtgtaatcttactaagagctaataga

SEQ ID NO: 423442 - DNA, 5041 bp, Homo sapiens
ccttttgcagcaagttctttcctgcactaatcacaattcttggaagaggagaactggacgttgtgaacagagttagctggtaaatgtcctcttaaaagatccaaaaaatgagacttctagcaaagattatttgccttatgttatgggctatttgtgtagcagaagattgcaatgaacttcctccaagaagaaatacagaaattctgacaggttcctggtctgaccaaacatatccagaaggcacccaggctatctataaatgccgccctggatatagatctcttggaaatgtaataatggtatgcaggaagggagaatgggttgctcttaatccattaaggaaatgtcagaaaaggccctgtggacatcctggagatactccttttggtacttttacccttacaggaggaaatgtgtttgaatatggtgtaaaagctgtgtatacatgtaatgaggggtatcaattgctaggtgagattaattaccgtgaatgtgacacagatggatggaccaatgatattcctatatgtgaagttgtgaagtgtttaccagtgacagcaccagagaatggaaaaattgtcagtagtgcaatggaaccagatcgggaataccattttggacaagcagtacggtttgtatgtaactcaggctacaagattgaaggagatgaagaaatgcattgttcagacgatggtttttggagtaaagagaaaccaaagtgtgtggaaatttcatgcaaatccccagatgttataaatggatctcctatatctcagaagattatttataaggagaatgaacgatttcaatataaatgtaacatgggttatgaatacagtgaaagaggagatgctgtatgcactgaatctggatggcgtccgttgccttcatgtgaagaaaaatcatgtgataatccttatattccaaatggtgactactcacctttaaggattaaacacagaactggagatgaaatcacgtaccagtgtagaaatggtttttatcctgcaacccggggaaatacagccaaatgcacaagtactggctggatacctgctccgagatgtaccttgaaaccttgtgattatccagacattaaacatggaggtctatatcatgagaatatgcgtagaccatactttccagtagctgtaggaaaatattactcctattactgtgatgaacattttgagactccgtcaggaagttactgggatcacattcattgcacacaagatggatggtcgccagcagtaccatgcctcagaaaatgttattttccttatttggaaaatggatataatcaaaattatggaagaaagtttgtacagggtaaatctatagacgttgcctgccatcctggctacgctcttccaaaagcgcagaccacagttacatgtatggagaatggctggtctcctactcccagatgcatccgtgtcaaaacatgttccaaatcaagtatagatattgagaatgggtttatttctgaatctcagtatacatatgccttaaaagaaaaagcgaaatatcaatgcaaactaggatatgtaacagcagatggtgaaacatcaggatcaattacatgtgggaaagatggatggtcagctcaacccacgtgcattaaatcttgtgatatcccagtatttatgaatgccagaactaaaaatgacttcacatggtttaagctgaatgacacattggactatgaatgccatgatggttatgaaagcaatactggaagcaccactggttccatagtgtgtggttacaatggttggtctgatttacccatatgttatgaaagagaatgcgaacttcctaaaatagatgtacacttagttcctgatcgcaagaaagaccagtataaagttggagaggtgttgaaattctcctgcaaaccaggatttacaatagttggacctaattccgttcagtgctaccactttggattgtctcctgacctcccaatatgtaaagagcaagtacaatcatgtggtccacctcctgaactcctcaatgggaatgttaaggaaaaaacgaaagaagaatatggacacagtgaagtggtggaatattattgcaatcctagatttctaatgaagggacctaataaaattcaatgtgttgatggagagtggacaactttaccagtgtgtattgtggaggagagtacctgtggagatatacctgaacttgaacatggctgggcccagctttcttcccctccttattactatggagattcagtggaattcaattgctcagaatcatttacaatgattggacacagatcaattacgtgtattcatggagtatggacccaacttccccagtgtgtggcaatagataaacttaagaagtgcaaatcatcaaatttaattatacttgaggaacatttaaaaaacaagaaggaattcgatcataattctaacataaggtacagatgtagaggaaaagaaggatggatacacacagtctgcataaatggaagatgggatccagaagtgaactgctcaatggcacaaatacaattatgcccacctccacctcagattcccaattctcacaatatgacaaccacactgaattatcgggatggagaaaaagtatctgttctttgccaagaaaattatctaattcaggaaggagaagaaattacatgcaaagatggaagatggcagtcaataccactctgtgttgaaaaaattccatgttcacaaccacctcagatagaacacggaaccattaattcatccaggtcttcacaagaaagttatgcacatgggactaaattgagttatacttgtgagggtggtttcaggatatctgaagaaaatgaaacaacatgctacatgggaaaatggagttctccacctcagtgtgaaggccttccttgtaaatctccacctgagatttctcatggtgttgtagctcacatgtcagacagttatcagtatggagaagaagttacgtacaaatgttttgaaggttttggaattgatgggcctgcaattgcaaaatgcttaggagaaaaatggtctcaccctccatcatgcataagtatggtgcattgaattttattatatgtatgataaatattcttcattcaaagtgtaagtggtaccaataagaaagtaaacagggactctagaaattcataaggttttcttgaatattctggactgctgtgggaaattatagctgtagtaattaaaacatttgacattataagccaaattagttcattttcacatcatcttgtgtgaactttaagcatcctctgatgtatattcttagacttctcatctctgttcttagggcacagctgcctctactcatcaatctccacattattcaatcttctgtcagtttatcaacaatctgcctataagtacattttctgaaatattttaaaaaatcattataagtatttcacatttgatagaagcaaaaaatttggaaatgcacacacaatataggtggtgtattattccgttttcacactgctgtaaagaccttcctgagactgggtaatttatgaacattaccgctgaaggggaagcaggcaccttcttcacaaggtggcaggagagagaggagtgagtgaaggaggaacttctaaacagttattaaatcatcatatcttgtgagaactcactcaccatcgtgagaacagcatgtgggaaactgccaccatgatccaatcacttcccaccaggtctctctctcaacacctggagattattattcaagatgagatttgggtgaggacacaaagcctaaccatatcaggtggcaagtatggacaaaaataatgtgaacaaaaaaatgtgtaatctcaattgctacggctaccaatatttcttcagtcttctaatatcatttctatcttgtatttttaatagatttagaagaatttaatgtaattaagacaaaatggctaatatattttctcaagttataagaaaaatgttgtacagtattcattgattctatatatcgctattttagaatccattacatgtattgtatgtaacctatttttaaagatttgcggaacaaatacatatttttcctatttcagaaacagattgtctcagtttacctagctttgaaaatgccatacccatgggagagaagaaggatgtgtataaggcgggtgagcaagtgacttacacttgtgcaacatattacaaaatggatggagccagtaatgtaacatgcattaatagcagatggacaggaaggccaacatgcagagacacctcctgtgtgaatccgcccacagtacaaaatgcttatatagtgtcgagacagatgagtaaatatccatctggtgagagagtacgttatcaatgtaggagcccttatgaaatgtttggggatgaagaagtgatgtgtttaaatggaaactggacggaaccacctcaatgcaaagattctacaggaaaatgtgggccccctccacctattgacaatggggacattacttcattcccgttgtcagtatatgctccagcttcatcagttgagtaccaatgccagaacttgtatcaacttgagggtaacaagcgaataacatgtagaaatggacaatggtcagaaccaccaaaatgcttacataacatagcattaaggtggacagccaaacagaagctttattcgagaacaaactcaactagtaaaatgccttggccatctcataaactgttgccatgatgttttctcctgactggcctgcttttgctttcattggaccacttccacctttggtatgccattgctttgattatgttttgtattcaggatcatactgataaactcatgtttcagctcttgttacaaatctttgaagaaatgtttcaggttcttattcccacttgtttaatacactttccgttaaaaactattcccttgctggccgggcgccgtggctcacgcctgtaatcccagcactttgggaggccgaagcgtgaggatcacgaggtcaggagatcgagactatcctggctaacacggtgaaaccccgtctctacta

SEQ ID NO: 423443 - DNA, 5086 bp, Homo sapiens
  misc_feature (5034)..(5034): n is a, c, g, or t
ccttttgcagcaagttctttcctgcactaatcacaattcttggaagaggagaactggacgttgtgaacagagttagctggtaaatgtcctcttaaaagatccaaaaaatgagacttctagcaaagattatttgccttatgttatgggctatttgtgtagcagaagattgcaatgaacttcctccaagaagaaatacagaaattctgacaggttcctggtctgaccaaacatatccagaaggcacccaggctatctataaatgccgccctggatatagatctcttggaaatgtaataatggtatgcaggaagggagaatgggttgctcttaatccattaaggaaatgtcagaaaaggccctgtggacatcctggagatactccttttggtacttttacccttacaggaggaaatgtgtttgaatatggtgtaaaagctgtgtatacatgtaatgaggggtatcaattgctaggtgagattaattaccgtgaatgtgacacagatggatggaccaatgatattcctatatgtgaagttgtgaagtgtttaccagtgacagcaccagagaatggaaaaattgtcagtagtgcaatggaaccagatcgggaataccattttggacaagcagtacggtttgtatgtaactcaggctacaagattgaaggagatgaagaaatgcattgttcagacgatggtttttggagtaaagagaaaccaaagtgtgtggaaatttcatgcaaatccccagatgttataaatggatctcctatatctcagaagattatttataaggagaatgaacgatttcaatataaatgtaacatgggttatgaatacagtgaaagaggagatgctgtatgcactgaatctggatggcgtccgttgccttcatgtgaagaaaaatcatgtgataatccttatattccaaatggtgactactcacctttaaggattaaacacagaactggagatgaaatcacgtaccagtgtagaaatggtttttatcctgcaacccggggaaatacagccaaatgcacaagtactggctggatacctgctccgagatgtaccttgaaaccttgtgattatccagacattaaacatggaggtctatatcatgagaatatgcgtagaccatactttccagtagctgtaggaaaatattactcctattactgtgatgaacattttgagactccgtcaggaagttactgggatcacattcattgcacacaagatggatggtcgccagcagtaccatgcctcagaaaatgttattttccttatttggaaaatggatataatcaaaattatggaagaaagtttgtacagggtaaatctatagacgttgcctgccatcctggctacgctcttccaaaagcgcagaccacagttacatgtatggagaatggctggtctcctactcccagatgcatccgtgtcaaaacatgttccaaatcaagtatagatattgagaatgggtttatttctgaatctcagtatacatatgccttaaaagaaaaagcgaaatatcaatgcaaactaggatatgtaacagcagatggtgaaacatcaggatcaattacatgtgggaaagatggatggtcagctcaacccacgtgcattaaatcttgtgatatcccagtatttatgaatgccagaactaaaaatgacttcacatggtttaagctgaatgacacattggactatgaatgccatgatggttatgaaagcaatactggaagcaccactggttccatagtgtgtggttacaatggttggtctgatttacccatatgttatgaaagagaatgcgaacttcctaaaatagatgtacacttagttcctgatcgcaagaaagaccagtataaagttggagaggtgttgaaattctcctgcaaaccaggatttacaatagttggacctaattccgttcagtgctaccactttggattgtctcctgacctcccaatatgtaaagagcaagtacaatcatgtggtccacctcctgaactcctcaatgggaatgttaaggaaaaaacgaaagaagaatatggacacagtgaagtggtggaatattattgcaatcctagatttctaatgaagggacctaataaaattcaatgtgttgatggagagtggacaactttaccagtgtgtattgtggaggagagtacctgtggagatatacctgaacttgaacatggctgggcccagctttcttcccctccttattactatggagattcagtggaattcaattgctcagaatcatttacaatgattggacacagatcaattacgtgtattcatggagtatggacccaacttccccagtgtgtggcaatagataaacttaagaagtgcaaatcatcaaatttaattatacttgaggaacatttaaaaaacaagaaggaattcgatcataattctaacataaggtacagatgtagaggaaaagaaggatggatacacacagtctgcataaatggaagatgggatccagaagtgaactgctcaatggcacaaatacaattatgcccacctccacctcagattcccaattctcacaatatgacaaccacactgaattatcgggatggagaaaaagtatctgttctttgccaagaaaattatctaattcaggaaggagaagaaattacatgcaaagatggaagatggcagtcaataccactctgtgttgaaaaaattccatgttcacaaccacctcagatagaacacggaaccattaattcatccaggtcttcacaagaaagttatgcacatgggactaaattgagttatacttgtgagggtggtttcaggatatctgaagaaaatgaaacaacatgctacatgggaaaatggagttctccacctcagtgtgaaggccttccttgtaaatctccacctgagatttctcatggtgttgtagctcacatgtcagacagttatcagtatggagaagaagttacgtacaaatgttttgaaggttttggaattgatgggcctgcaattgcaaaatgcttaggagaaaaatggtctcaccctccatcatgcataagtatggtgcattgaattttattatatgtatgataaatattcttcattcaaagtgtaagtggtaccaataagaaagtaaacagggactctagaaattcataaggttttcttgaatattctggactgctgtgggaaattatagctgtagtaattaaaacatttgacattataagccaaattagttcattttcacatcatcttgtgtgaactttaagcatcctctgatgtatattcttagacttctcatctctgttcttagggcacagctgcctctactcatcaatctccacattattcaatcttctgtcagtttatcaacaatctgcctataagtacattttctgaaatattttaaaaaatcattataagtatttcacatttgatagaagcaaaaaatttggaaatgcacacacaatataggtggtgtattattccgttttcacactgctgtaaagaccttcctgagactgggtaatttatgaacattaccgctgaaggggaagcaggcaccttcttcacaaggtggcaggagagagaggagtgagtgaaggaggaacttctaaacagttattaaatcatcatatcttgtgagaactcactcaccatcgtgagaacagcatgtgggaaactgccaccatgatccaatcacttcccaccaggtctctctctcaacacctggagattattattcaagatgagatttgggtgaggacacaaagcctaaccatatcaggtggcaagtatggacaaaaataatgtgaacaaaaaaatgtgtaatctcaattgctacggctaccaatatttcttcagtcttctaatatcatttctatcttgtatttttaatagatttagaagaatttaatgtaattaagacaaaatggctaatatattttctcaagttataagaaaaatgttgtacagtattcattgattctatatatcgctattttagaatccattacatgtattgtatgtaacctatttttaaagatttgcggaacaaatacatatttttcctatttcagaaacagattgtctcagtttacctagctttgaaaatgccatacccatgggagagaagaaggatgtgtataaggcgggtgagcaagtgacttacacttgtgcaacatattacaaaatggatggagccagtaatgtaacatgcattaatagcagatggacaggaaggccaacatgcagagacacctcctgtgtgaatccgcccacagtacaaaatgcttatatagtgtcgagacagatgagtaaatatccatctggtgagagagtacgttatcaatgtaggagcccttatgaaatgtttggggatgaagaagtgatgtgtttaaatggaaactggacggaaccacctcaatgcaaagattctacaggaaaatgtgggccccctccacctattgacaatggggacattacttcattcccgttgtcagtatatgctccagcttcatcagttgagtaccaatgccagaacttgtatcaacttgagggtaacaagcgaataacatgtagaaatggacaatggtcagaaccaccaaaatgcttacatccgtgtgtaatatcccgagaaattatggaaaattggtgaatcagttgaatttgtgtgtaaacggggatatcgtctttcatcacgttctcacacattgcgaacaacatgttgggatgggaaactggagtatccaacttgtgcaaaaagatagaatcaatcataaagtgcacacctttattcagaactttagtattaaatcagttctcaatttcattttttatgtattgttttgactcctttttattcatacgtaaaattttggattaatttgtgaaaatgtaattataagctgagaccggtggctctcttcttaaaagcaccatattaaatcctggaaaactaaaaaaaaaaaaggacagctcgaggggcgggcaagaagacgttcaacgacgggctaccgcatagggngaggggagaggagactaggaagggatagggcgtgaggaaaggagatatagag

SEQ ID NO: 423444 - DNA, 4852 bp, Homo sapiens
ccttttgcagcaagttctttcctgcactaatcacaattcttggaagaggagaactggacgttgtgaacagagttagctggtaaatgtcctcttaaaagatccaaaaaatgagacttctagcaaagattatttgccttatgttatgggctatttgtgtagcagaagattgcaatgaacttcctccaagaagaaatacagaaattctgacaggttcctggtctgaccaaacatatccagaaggcacccaggctatctataaatgccgccctggatatagatctcttggaaatgtaataatggtatgcaggaagggagaatgggttgctcttaatccattaaggaaatgtcagaaaaggccctgtggacatcctggagatactccttttggtacttttacccttacaggaggaaatgtgtttgaatatggtgtaaaagctgtgtatacatgtaatgaggggtatcaattgctaggtgagattaattaccgtgaatgtgacacagatggatggaccaatgatattcctatatgtgaagttgtgaagtgtttaccagtgacagcaccagagaatggaaaaattgtcagtagtgcaatggaaccagatcgggaataccattttggacaagcagtacggtttgtatgtaactcaggctacaagattgaaggagatgaagaaatgcattgttcagacgatggtttttggagtaaagagaaaccaaagtgtgtggaaatttcatgcaaatccccagatgttataaatggatctcctatatctcagaagattatttataaggagaatgaacgatttcaatataaatgtaacatgggttatgaatacagtgaaagaggagatgctgtatgcactgaatctggatggcgtccgttgccttcatgtgaagaaaaatcatgtgataatccttatattccaaatggtgactactcacctttaaggattaaacacagaactggagatgaaatcacgtaccagtgtagaaatggtttttatcctgcaacccggggaaatacagccaaatgcacaagtactggctggatacctgctccgagatgtaccttgaaaccttgtgattatccagacattaaacatggaggtctatatcatgagaatatgcgtagaccatactttccagtagctgtaggaaaatattactcctattactgtgatgaacattttgagactccgtcaggaagttactgggatcacattcattgcacacaagatggatggtcgccagcagtaccatgcctcagaaaatgttattttccttatttggaaaatggatataatcaaaattatggaagaaagtttgtacagggtaaatctatagacgttgcctgccatcctggctacgctcttccaaaagcgcagaccacagttacatgtatggagaatggctggtctcctactcccagatgcatccgtgtcaaaacatgttccaaatcaagtatagatattgagaatgggtttatttctgaatctcagtatacatatgccttaaaagaaaaagcgaaatatcaatgcaaactaggatatgtaacagcagatggtgaaacatcaggatcaattacatgtgggaaagatggatggtcagctcaacccacgtgcattaaatcttgtgatatcccagtatttatgaatgccagaactaaaaatgacttcacatggtttaagctgaatgacacattggactatgaatgccatgatggttatgaaagcaatactggaagcaccactggttccatagtgtgtggttacaatggttggtctgatttacccatatgttatgaaagagaatgcgaacttcctaaaatagatgtacacttagttcctgatcgcaagaaagaccagtataaagttggagaggtgttgaaattctcctgcaaaccaggatttacaatagttggacctaattccgttcagtgctaccactttggattgtctcctgacctcccaatatgtaaagagcaagtacaatcatgtggtccacctcctgaactcctcaatgggaatgttaaggaaaaaacgaaagaagaatatggacacagtgaagtggtggaatattattgcaatcctagatttctaatgaagggacctaataaaattcaatgtgttgatggagagtggacaactttaccagtgtgtattgtggaggagagtacctgtggagatatacctgaacttgaacatggctgggcccagctttcttcccctccttattactatggagattcagtggaattcaattgctcagaatcatttacaatgattggacacagatcaattacgtgtattcatggagtatggacccaacttccccagtgtgtggcaatagataaacttaagaagtgcaaatcatcaaatttaattatacttgaggaacatttaaaaaacaagaaggaattcgatcataattctaacataaggtacagatgtagaggaaaagaaggatggatacacacagtctgcataaatggaagatgggatccagaagtgaactgctcaatggcacaaatacaattatgcccacctccacctcagattcccaattctcacaatatgacaaccacactgaattatcgggatggagaaaaagtatctgttctttgccaagaaaattatctaattcaggaaggagaagaaattacatgcaaagatggaagatggcagtcaataccactctgtgttgaaaaaattccatgttcacaaccacctcagatagaacacggaaccattaattcatccaggtcttcacaagaaagttatgcacatgggactaaattgagttatacttgtgagggtggtttcaggatatctgaagaaaatgaaacaacatgctacatgggaaaatggagttctccacctcagtgtgaaggccttccttgtaaatctccacctgagatttctcatggtgttgtagctcacatgtcagacagttatcagtatggagaagaagttacgtacaaatgttttgaaggttttggaattgatgggcctgcaattgcaaaatgcttaggagaaaaatggtctcaccctccatcatgcataagtatggtgcattgaattttattatatgtatgataaatattcttcattcaaagtgtaagtggtaccaataagaaagtaaacagggactctagaaattcataaggttttcttgaatattctggactgctgtgggaaattatagctgtagtaattaaaacatttgacattataagccaaattagttcattttcacatcatcttgtgtgaactttaagcatcctctgatgtatattcttagacttctcatctctgttcttagggcacagctgcctctactcatcaatctccacattattcaatcttctgtcagtttatcaacaatctgcctataagtacattttctgaaatattttaaaaaatcattataagtatttcacatttgatagaagcaaaaaatttggaaatgcacacacaatataggtggtgtattattccgttttcacactgctgtaaagaccttcctgagactgggtaatttatgaacattaccgctgaaggggaagcaggcaccttcttcacaaggtggcaggagagagaggagtgagtgaaggaggaacttctaaacagttattaaatcatcatatcttgtgagaactcactcaccatcgtgagaacagcatgtgggaaactgccaccatgatccaatcacttcccaccaggtctctctctcaacacctggagattattattcaagatgagatttgggtgaggacacaaagcctaaccatatcaggtggcaagtatggacaaaaataatgtgaacaaaaaaatgtgtaatctcaattgctacggctaccaatatttcttcagtcttctaatatcatttctatcttgtatttttaatagatttagaagaatttaatgtaattaagacaaaatggctaatatattttctcaagttataagaaatgtattgtatgtaacctatttttaaagatttgcggaacaaatacatatttttcctatttcagaaacagattgtctcagtttacctagctttgaaaatgccatacccatgggagagaagaaggatgtgtataaggcgggtgagcaagtgacttacacttgtgcaacatattacaaaatggatggagccagtaatgtaacatgcattaatagcagatggacaggaaggccaacatgcagagacacctcctgtgtgaatccgcccacagtacaaaatgcttatatagtgtcgagacagatgagtaaatatccatctggtgagagagtacgttatcaatgtaggagcccttatgaaatgtttggggatgaagaagtgatgtgtttaaatggaaactggacggaaccacctcaatgcaaagattcccgttgtcagtatatgctccagcttcatcagttgagtaccaatgccagaacttgtatcaacttgagggtaacaagcgaataacatgtagaaatggacaatggtcagaaccaccaaaatgcttacatccgtgtgtaatatcccgagaaattatggaaaattataacatagcattaaggtggacagccaaacagaagctttattcgagaacaggtgaatcagttgaatttgtgtgtaaacggggatatcgtctttcatcacgttctcacacattgcgaacaacatgttgggatgggaaactggagtatccaacttgtgcaaaaagatagaatcaatcataaatattgttttgactcctttttattcatacgtaaaattttggattaatttgtgaaaatgtaattataagctgagaccggtggctctcttcttaaaagcaccatattaaatcctggaaaactaa

SEQ ID NO: 423445 - DNA, 3603 bp, Homo sapiens
ccttttgcagcaagttctttcctgcactaatcacaattcttggaagaggagaactggacgttgtgaacagagttagctggtaaatgtcctcttaaaagatccaaaaaatgagacttctagcaaagattatttgccttatgttatgggctatttgtgtagcagaagattgcaatgaacttcctccaagaagaaatacagaaattctgacaggttcctggtctgaccaaacatatccagaaggcacccaggctatctataaatgccgccctggatatagatctcttggaaatgtaataatggtatgcaggaagggagaatgggttgctcttaatccattaaggaaatgtcagaaaaggccctgtggacatcctggagatactccttttggtacttttacccttacaggaggaaatgtgtttgaatatggtgtaaaagctgtgtatacatgtaatgaggggtatcaattgctaggtgagattaattaccgtgaatgtgacacagatggatggaccaatgatattcctatatgtgaagttgtgaagtgtttaccagtgacagcaccagagaatggaaaaattgtcagtagtgcaatggaaccagatcgggaataccattttggacaagcagtacggtttgtatgtaactcaggctacaagattgaaggagatgaagaaatgcattgttcagacgatggtttttggagtaaagagaaaccaaagtgtgtggaaatttcatgcaaatccccagatgttataaatggatctcctatatctcagaagattatttataaggagaatgaacgatttcaatataaatgtaacatgggttatgaatacagtgaaagaggagatgctgtatgcactgaatctggatggcgtccgttgccttcatgtgaagaaaaatcatgtgataatccttatattccaaatggtgactactcacctttaaggattaaacacagaactggagatgaaatcacgtaccagtgtagaaatggtttttatcctgcaacccggggaaatacagccaaatgcacaagtactggctggatacctgctccgagatgtaccttgaaaccttgtgattatccagacattaaacatggaggtctatatcatgagaatatgcgtagaccatactttccagtagctgtaggaaaatattactcctattactgtgatgaacattttgagactccgtcaggaagttactgggatcacattcattgcacacaagatggatggtcgccagcagtaccatgcctcagaaaatgttattttccttatttggaaaatggatataatcaaaattatggaagaaagtttgtacagggtaaatctatagacgttgcctgccatcctggctacgctcttccaaaagcgcagaccacagttacatgtatggagaatggctggtctcctactcccagatgcatccgtgtcaaaacatgttccaaatcaagtatagatattgagaatgggtttatttctgaatctcagtatacatatgccttaaaagaaaaagcgaaatatcaatgcaaactaggatatgtaacagcagatggtgaaacatcaggatcaattacatgtgggaaagatggatggtcagctcaacccacgtgcattaaatcttgtgatatcccagtatttatgaatgccagaactaaaaatgacttcacatggtttaagctgaatgacacattggactatgaatgccatgatggttatgaaagcaatactggaagcaccactggttccatagtgtgtggttacaatggttggtctgatttacccatatgttatgaaagagaatgcgaacttcctaaaatagatgtacacttagttcctgatcgcaagaaagaccagtataaagttggagaggtgttgaaattctcctgcaaaccaggatttacaatagttggacctaattccgttcagtgctaccactttggattgtctcctgacctcccaatatgtaaagagcaagtacaatcatgtggtccacctcctgaactcctcaatgggaatgttaaggaaaaaacgaaagaagaatatggacacagtgaagtggtggaatattattgcaatcctagatttctaatgaagggacctaataaaattcaatgtgttgatggagagtggacaactttaccagtgtgtattgtggaggagagtacctgtggagatatacctgaacttgaacatggctgggcccagctttcttcccctccttattactatggagattcagtggaattcaattgctcagaatcatttacaatgattggacacagatcaattacgtgtattcatggagtatggacccaacttccccagtgtgtggcaatagataaacttaagaagtgcaaatcatcaaatttaattatacttgaggaacatttaaaaaacaagaaggaattcgatcataattctaacataaggtacagatgtagaggaaaagaaggatggatacacacagtctgcataaatggaagatgggatccagaagtgaactgctcaatggcacaaatacaattatgcccacctccacctcagattcccaattctcacaatatgacaaccacactgaattatcgggatggagaaaaagtatctgttctttgccaagaaaattatctaattcaggaaggagaagaaattacatgcaaagatggaagatggcagtcaataccactctgtgttgaaaaaattccatgttcacaaccacctcagatagaacacggaaccattaattcatccaggtcttcacaagaaagttatgcacatgggactaaattgagttatacttgtgagggtggtttcaggatatctgaagaaaatgaaacaacatgctacatgggaaaatggagttctccacctcagtgtgaaggccttccttgtaaatctccacctgagatttctcatggtgttgtagctcacatgtcagacagttatcagtatggagaagaagttacgtacaaatgttttgaaggttttggaattgatgggcctgcaattgcaaaatgcttaggagaaaaatggtctcaccctccatcatgcataaaaacagattgtctcagtttacctagctttgaaaatgccatacccatgggagagaagaaggatgtgtataaggcgggtgagcaagtgacttacacttgtgcaacatattacaaaatggatggagccagtaatgtaacatgcattaatagcagatggacaggaaggccaacatgcagagacacctcctgtgtgaatccgcccacagtacaaaatgcttatatagtgtcgagacagatgagtaaatatccatctggtgagagagtacgttatcaatgtaggagcccttatgaaatgtttggggatgaagaagtgatgtgtttaaatggaaactggacggaaccacctcaatgcaaagattcccgttgtcagtatatgctccagcttcatcagttgagtaccaatgccagaacttgtatcaacttgagggtaacaagcgaataacatgtagaaatggacaatggtcagaaccaccaaaatgcttactggctacatatccgggtgaatattccgaggaattttgggaaattattaccttgcttta

SEQ ID NO: 423446 - DNA, 3954 bp, Homo sapiens
ccttttgcagcaagttctttcctgcactaatcacaattcttggaagaggagaactggacgttgtgaacagagttagctggtaaatgtcctcttaaaagatccaaaaaatgagacttctagcaaagattatttgccttatgttatgggctatttgtgtagcagaagattgcaatgaacttcctccaagaagaaatacagaaattctgacaggttcctggtctgaccaaacatatccagaaggcacccaggctatctataaatgccgccctggatatagatctcttggaaatgtaataatggtatgcaggaagggagaatgggttgctcttaatccattaaggaaatgtcagaaaaggccctgtggacatcctggagatactccttttggtacttttacccttacaggaggaaatgtgtttgaatatggtgtaaaagctgtgtatacatgtaatgaggggtatcaattgctaggtgagattaattaccgtgaatgtgacacagatggatggaccaatgatattcctatatgtgaagttgtgaagtgtttaccagtgacagcaccagagaatggaaaaattgtcagtagtgcaatggaaccagatcgggaataccattttggacaagcagtacggtttgtatgtaactcaggctacaagattgaaggagatgaagaaatgcattgttcagacgatggtttttggagtaaagagaaaccaaagtgtgtggaaatttcatgcaaatccccagatgttataaatggatctcctatatctcagaagattatttataaggagaatgaacgatttcaatataaatgtaacatgggttatgaatacagtgaaagaggagatgctgtatgcactgaatctggatggcgtccgttgccttcatgtgaagaaaaatcatgtgataatccttatattccaaatggtgactactcacctttaaggattaaacacagaactggagatgaaatcacgtaccagtgtagaaatggtttttatcctgcaacccggggaaatacagccaaatgcacaagtactggctggatacctgctccgagatgtaccttgaaaccttgtgattatccagacattaaacatggaggtctatatcatgagaatatgcgtagaccatactttccagtagctgtaggaaaatattactcctattactgtgatgaacattttgagactccgtcaggaagttactgggatcacattcattgcacacaagatggatggtcgccagcagtaccatgcctcagaaaatgttattttccttatttggaaaatggatataatcaaaattatggaagaaagtttgtacagggtaaatctatagacgttgcctgccatcctggctacgctcttccaaaagcgcagaccacagttacatgtatggagaatggctggtctcctactcccagatgcatccgtgtcaaaacatgttccaaatcaagtatagatattgagaatgggtttatttctgaatctcagtatacatatgccttaaaagaaaaagcgaaatatcaatgcaaactaggatatgtaacagcagatggtgaaacatcaggatcaattacatgtgggaaagatggatggtcagctcaacccacgtgcattaaatcttgtgatatcccagtatttatgaatgccagaactaaaaatgacttcacatggtttaagctgaatgacacattggactatgaatgccatgatggttatgaaagcaatactggaagcaccactggttccatagtgtgtggttacaatggttggtctgatttacccatatgttatgaaagagaatgcgaacttcctaaaatagatgtacacttagttcctgatcgcaagaaagaccagtataaagttggagaggtgttgaaattctcctgcaaaccaggatttacaatagttggacctaattccgttcagtgctaccactttggattgtctcctgacctcccaatatgtaaagagcaagtacaatcatgtggtccacctcctgaactcctcaatgggaatgttaaggaaaaaacgaaagaagaatatggacacagtgaagtggtggaatattattgcaatcctagatttctaatgaagggacctaataaaattcaatgtgttgatggagagtggacaactttaccagtgtgtattgtggaggagagtacctgtggagatatacctgaacttgaacatggctgggcccagctttcttcccctccttattactatggagattcagtggaattcaattgctcagaatcatttacaatgattggacacagatcaattacgtgtattcatggagtatggacccaacttccccagtgtgtggcaatagataaacttaagaagtgcaaatcatcaaatttaattatacttgaggaacatttaaaaaacaagaaggaattcgatcataattctaacataaggtacagatgtagaggaaaagaaggatggatacacacagtctgcataaatggaagatgggatccagaagtgaactgctcaatggcacaaatacaattatgcccacctccacctcagattcccaattctcacaatatgacaaccacactgaattatcgggatggagaaaaagtatctgttctttgccaagaaaattatctaattcaggaaggagaagaaattacatgcaaagatggaagatggcagtcaataccactctgtgttgaaaaaattccatgttcacaaccacctcagatagaacacggaaccattaattcatccaggtcttcacaagaaagttatgcacatgggactaaattgagttatacttgtgagggtggtttcaggatatctgaagaaaatgaaacaacatgctacatgggaaaatggagttctccacctcagtgtgaaggccttccttgtaaatctccacctgagatttctcatggtgttgtagctcacatgtcagacagttatcagtatggagaagaagttacgtacaaatgttttgaaggttttggaattgatgggcctgcaattgcaaaatgcttaggagaaaaatggtctcaccctccatcatgcataagtatggtgcattgaattttattatatgtatgataaatattcttcattcaaagtgtaagtggtaccaataagaaagtaaacagggactctagaaattcataaggttttcttgaatattctggactgctgtgggaaattatagctgtagtaattaaaacatttgacattataagccaaattagttcattttcacatcatcttgtgtgaactttaagcatcctctgatgtatattcttagacttctcatctctgttcttagggcacagctgcctctactcatcaatctccacattattcaatcttctgtcagtttatcaacaatctgcctataagtacattttctgaaatattttaaaaaatcattataagtatttcacatttgatagaagcaaaaaatttggaaatgcacacacaatataggtggtgtattattccgttttcacactgctgtaaagaccttcctgagactgggtaatttatgaaagaaaaaattttaattgatcacagttcctcatgactgaggaggtgtcatgaaacttaccattaccgctgaaggggaagcaggcaccttcttcacaaggtggcaggagagagaggagtgagtgaaggaggaacttctaaacagttattaaatcatcatatcttgtgagaactcactcaccatcgtgagaacagcatgtgggaaactgccaccatgatccaatcacttcccaccaggtctctctctcaacacctggagattattattcaagatgagatttgggtgaggacacaaagcctaaccatatcaggtggcaagttggctatgtgacatttataattagagaattatgtatagactggtattattctcagttagtgttgcagatcatgatcattatctattagatct

SEQ ID NO: 423447 - DNA, 3042 bp, Homo sapiens
ccttttgcagcaagttctttcctgcactaatcacaattcttggaagaggagaactggacgttgtgaacagagttagctggtaaatgtcctcttaaaagatccaaaaaatgagacttctagcaaagattatttgccttatgttatgggctatttgtgtagcagaagattgcaatgaacttcctccaagaagaaatacagaaattctgacaggttcctggtctgaccaaacatatccagaaggcacccaggctatctataaatgccgccctggatatagatctcttggaaatgtaataatggtatgcaggaagggagaatgggttgctcttaatccattaaggaaatgtcagaaaaggccctgtggacatcctggagatactccttttggtacttttacccttacaggaggaaatgtgtttgaatatggtgtaaaagctgtgtatacatgtaatgaggggtatcaattgctaggtgagattaattaccgtgaatgtgacacagatggatggaccaatgatattcctatatgtgaagttgtgaagtgtttaccagtgacagcaccagagaatggaaaaattgtcagtagtgcaatggaaccagatcgggaataccattttggacaagcagtacggtttgtatgtaactcaggctacaagattgaaggagatgaagaaatgcattgttcagacgatggtttttggagtaaagagaaaccaaagtgtgtggaaatttcatgcaaatccccagatgttataaatggatctcctatatctcagaagattatttataaggagaatgaacgatttcaatataaatgtaacatgggttatgaatacagtgaaagaggagatgctgtatgcactgaatctggatggcgtccgttgccttcatgtgaagaaaaatcatgtgataatccttatattccaaatggtgactactcacctttaaggattaaacacagaactggagatgaaatcacgtaccagtgtagaaatggtttttatcctgcaacccggggaaatacagccaaatgcacaagtactggctggatacctgctccgagatgtaccttgaaaccttgtgattatccagacattaaacatggaggtctatatcatgagaatatgcgtagaccatactttccagtagctgtaggaaaatattactcctattactgtgatgaacattttgagactccgtcaggaagttactgggatcacattcattgcacacaagatggatggtcgccagcagtaccatgcctcagaaaatgttattttccttatttggaaaatggatataatcaaaattatggaagaaagtttgtacagggtaaatctatagacgttgcctgccatcctggctacgctcttccaaaagcgcagaccacagttacatgtatggagaatggctggtctcctactcccagatgcatccgtgtcaaaacatgttccaaatcaagtatagatattgagaatgggtttatttctgaatctcagtatacatatgccttaaaagaaaaagcgaaatatcaatgcaaactaggatatgtaacagcagatggtgaaacatcaggatcaattacatgtgggaaagatggatggtcagctcaacccacgtgcattaaatcttgtgatatcccagtatttatgaatgccagaactaaaaatgacttcacatggtttaagctgaatgacacattggactatgaatgccatgatggttatgaaagcaatactggaagcaccactggttccatagtgtgtggttacaatggttggtctgatttacccatatgttatgaaagagaatgcgaacttcctaaaatagatgtacacttagttcctgatcgcaagaaagaccagtataaagttggagaggtgttgaaattctcctgcaaaccaggatttacaatagttggacctaattccgttcagtgctaccactttggattgtctcctgacctcccaatatgtaaagagcaagtacaatcatgtggtccacctcctgaactcctcaatgggaatgttaaggaaaaaacgaaagaagaatatggacacagtgaagtggtggaatattattgcaatcctagatttctaatgaagggacctaataaaattcaatgtgttgatggagagtggacaactttaccagtgtgtattgtggaggagagtacctgtggagatatacctgaacttgaacatggctgggcccagctttcttcccctccttattactatggagattcagtggaattcaattgctcagaatcatttacaatgattggacacagatcaattacgtgtattcatggagtatggacccaacttccccagtgtgtggcaatagataaacttaagaagtgcaaatcatcaaatttaattatacttgaggaacatttaaaaaacaagaaggaattcgatcataattctaacataaggtacagatgtagaggaaaagaaggatggatacacacagtctgcataaatggaagatgggatccagaagtgaactgctcaatggcacaaatacaattatgcccacctccacctcagattcccaattctcacaatatgacaaccacactgaattatcgggatggagaaaaagtatctgttctttgccaagaaaattatctaattcaggaaggagaagaaattacatgcaaagatggaagatggcagtcaataccactctgtgttgaaaaaattccatgttcacaaccacctcagatagaacacggaaccattaattcatccaggtcttcacaagaaagttatgcacatgggactaaattgagttatacttgtgagggtggtttcaggatatctgaagaaaatgaaacaacatgctacatgggaaaatggagttctccacctcagtgtgaaggttaggccaatatgaatactcaatttctgtttatagtagaattcataaaaataatctcttgttatcaaagtgaggggaataattgagattactgcatatataaaataatttatatattataccattaaaatactttttgcatgattgaatcta

SEQ ID NO: 423448 - DNA, 2408 bp, Homo sapiens
ccttttgcagcaagttctttcctgcactaatcacaattcttggaagaggagaactggacgttgtgaacagagttagctggtaaatgtcctcttaaaagatccaaaaaatgagacttctagcaaagattatttgccttatgttatgggctatttgtgtagcagaagattgcaatgaacttcctccaagaagaaatacagaaattctgacaggttcctggtctgaccaaacatatccagaaggcacccaggctatctataaatgccgccctggatatagatctcttggaaatgtaataatggtatgcaggaagggagaatgggttgctcttaatccattaaggaaatgtcagaaaaggccctgtggacatcctggagatactccttttggtacttttacccttacaggaggaaatgtgtttgaatatggtgtaaaagctgtgtatacatgtaatgaggggtatcaattgctaggtgagattaattaccgtgaatgtgacacagatggatggaccaatgatattcctatatgtgaagttgtgaagtgtttaccagtgacagcaccagagaatggaaaaattgtcagtagtgcaatggaaccagatcgggaataccattttggacaagcagtacggtttgtatgtaactcaggctacaagattgaaggagatgaagaaatgcattgttcagacgatggtttttggagtaaagagaaaccaaagtgtgtggaaatttcatgcaaatccccagatgttataaatggatctcctatatctcagaagattatttataaggagaatgaacgatttcaatataaatgtaacatgggttatgaatacagtgaaagaggagatgctgtatgcactgaatctggatggcgtccgttgccttcatgtgaagaaaaatcatgtgataatccttatattccaaatggtgactactcacctttaaggattaaacacagaactggagatgaaatcacgtaccagtgtagaaatggtttttatcctgcaacccggggaaatacagccaaatgcacaagtactggctggatacctgctccgagatgtaccttgaaaccttgtgattatccagacattaaacatggaggtctatatcatgagaatatgcgtagaccatactttccagtagctgtaggaaaatattactcctattactgtgatgaacattttgagactccgtcaggaagttactgggatcacattcattgcacacaagatggatggtcgccagcagtaccatgcctcagaaaatgttattttccttatttggaaaatggatataatcaaaattatggaagaaagtttgtacagggtaaatctatagacgttgcctgccatcctggctacgctcttccaaaagcgcagaccacagttacatgtatggagaatggctggtctcctactcccagatgcatccgtgtcagctttaccctctgaacttctgatcgaaggtcatccctctccagcttgagtggatcaaagatgacaagggccaatggaaccaagtttgagtcttgccaggtcaatacttgggtcctgagtatggtgactagtatctgttttgttatgtgtgtattattccagccagaatgggaaatgctaattcagctcctccaggcagcccaatggggctggtggctttgagattattaaactctttctctgctgcaaaccccactgtctcagtgtattgttctgttgctgtgcagcaggcatacaaatctgacaatctcgtaactatttgtggcaagccaggtcgaggtcactctctttgagggcatttactcactgcctagtgccccctttccactgggacagacccagagacaaaccctagcagcttacttagctctcatgaactaagggctgtcccttagttctcccaaagtaacccacaatgcaaccctgatgggctgcatcttccaaaattgaaaggcctttgtctatcattccatgaaacaaaaaaagattatcttactttttaacatggcttaaccttaatacccactggatttcggagaacagtggccactgcatggttctcatgcttacagtacgatcctgtagctagatttgttttgtaagaaggaagaagaatgagatgaaataccctatgtataatgttttatgttgctttggaaaagtacaacaatgtagaaaaaggtaaaatcatgataaagtaagaaattaaagactgtttggactgatttacaagaaaaagatgatgctatgatggttcagttaaaggaacctatgactcacccccctccactttatgggggagctgcagcagcactactggcgcctctccagagtccccaccaccaggggactccatttaggcagggtgtcacttcttatacccaacagggaactccatttagccgg

SEQ ID NO: 423449 - DNA, 1173 bp, Homo sapiens
ggcagtgcacagctggtttgcgtgcgggtcggagactacaggatcccggtacttacccagtgtgaaggccttccttgtaaatctccacctgagatttctcatggtgttgtagctcacatgtcagacagttatcagtatggagaagaagttacgtacaaatgttttgaaggttttggaattgatgggcctgcaattgcaaaatgcttaggagaaaaatggtctcaccctccatcatgcataaaaacagattgtctcagtttacctagctttgaaaatgccatacccatgggagagaagaaggatgtgtataaggcgggtgagcaagtgacttacacttgtgcaacatattacaaaatggatggagccagtaatgtaacatgcattaatagcagatggacaggaaggccaacatgcagagacacctcctgtgtgaatccgcccacagtacaaaatgcttatatagtgtcgagacagatgagtaaatatccatctggtgagagagtacgttatcaatgtaggagcccttatgaaatgtttggggatgaagaagtgatgtgtttaaatggaaactggacggaaccacctcaatgcaaagattctacaggaaaatgtgggccccctccacctattgacaatggggacattacttcattcccgttgtcagtatatgctccagcttcatcagttgagtaccaatgccagaacttgtatcaacttgagggtaacaagcgaataacatgtagaaatggacaatggtcagaaccaccaaaatgcttacatccgtgtgtaatatcccgagaaattatggaaaattataacatagcattaaggtggacagccaaacagaagctttattcgagaacaggtgaatcagttgaatttgtgtgtaaacggggatatcgtctttcatcacgttctcacacattgcgaacaacatgttgggatgggaaactggagtatccaacttgtgcaaaaagatagaatcaatcataaagtgcacacctttattcagaactttagtattaaatcagttctcaatttcattttttatgtattgttttgactcctttttattcatacgtaaaattttggattaatttgtgaaaatgtaattataagctgagaccggtggctctcttcttaaaagcaccatattaaatcctggaaaactaa

SEQ ID NO: 423450 - DNA, 1839 bp, Homo sapiens
ccttttgcagcaagttctttcctgcactaatcacaattcttggaagaggagaactggacgttgtgaacagagttagctggtaaatgtcctcttaaaagatccaaaaaatgagacttctagcaaagattatttgccttatgttatgggctatttgtgtagcagaagattgcaatgaacttcctccaagaagaaatacagaaattctgacaggttcctggtctgaccaaacatatccagaaggcacccaggctatctataaatgccgccctggatatagatctcttggaaatgtaataatggtatgcaggaagggagaatgggttgctcttaatccattaaggaaatgtcagaaaaggccctgtggacatcctggagatactccttttggtacttttacccttacaggaggaaatgtgtttgaatatggtgtaaaagctgtgtatacatgtaatgaggggtatcaattgctaggtgagattaattaccgtgaatgtgacacagatggatggaccaatgatattcctatatgtgaagttgtgaagtgtttaccagtgacagcaccagagaatggaaaaattgtcagtagtgcaatggaaccagatcgggaataccattttggacaagcagtacggtttgtatgtaactcaggctacaagattgaaggagatgaagaaatgcattgttcagacgatggtttttggagtaaagagaaaccaaagtgtgtggaaatttcatgcaaatccccagatgttataaatggatctcctatatctcagaagattatttataaggagaatgaacgatttcaatataaatgtaacatgggttatgaatacagtgaaagaggagatgctgtatgcactgaatctggatggcgtccgttgccttcatgtgaagaaaaatcatgtgataatccttatattccaaatggtgactactcacctttaaggattaaacacagaactggagatgaaatcacgtaccagtgtagaaatggtttttatcctgcaacccggggaaatacagccaaatgcacaagtactggctggatacctgctccgagatgtaccttgaaaccttgtgattatccagacattaaacatggaggtctatatcatgagaatatgcgtagaccatactttccagtagctgtaggaaaatattactcctattactgtgatgaacattttgagactccgtcaggaagttactgggatcacattcattgcacacaagatggatggtcgccagcagtaccatgcctcagaaaatgttattttccttatttggaaaatggatataatcaaaattatggaagaaagtttgtacagggtaaatctatagacgttgcctgccatcctggctacgctcttccaaaagcgcagaccacagttacatgtatggagaatggctggtctcctactcccagatgcatccgtgtcagtaagtacactactctgaaatcctagcatgttcatgtctttctaagtaacatagatgacattctaagactcatctatattaattgtggcaaaatgtttatgtcaccttgttttaccaatggacctatttagtttttggtttttcaactgtgtataaatgaatatacaaattccttgataagtacatagtaaaataaattctcctattaatgggcattagtcaagaatacagtaaaagaatttgaacacaatacttgttggttaaatgaagtcgtattgaagcggcatcattgtctgggtaaatatctgaggttcgttatctcacaccaagaagattaaggacgtggacacacacaaggagtgagtttaggagcacaggtttaataggcaaaagaaa

SEQ ID NO: 423451 - DNA, 981 bp, Homo sapiens
ccttttgcagcaagttctttcctgcactaatcacaattcttggaagaggagaactggacgttgtgaacagagttagctggtaaatgtcctcttaaaagatccaaaaaatgagacttctagcaaagattatttgccttatgttatgggctatttgtgtagcagaagattgcaatgaacttcctccaagaagaaatacagaaattctgacaggttcctggtctgaccaaacatatccagaaggcacccaggctatctataaatgccgccctggatatagatctcttggaaatgtaataatggtatgcaggaagggagaatgggttgctcttaatccattaaggaaatgtcagaaaaggccctgtggacatcctggagatactccttttggtacttttacccttacaggaggaaatgtgtttgaatatggtgtaaaagctgtgtatacatgtaatgaggggtatcaattgctaggtgagattaattaccgtgaatgtgacacagatggatggaccaatgatattcctatatgtgaagttgtgaagtgtttaccagtgacagcaccagagaatggaaaaattgtcagtagtgcaatggaaccagatcgggaataccattttggacaagcagtacggtttgtatgtaactcaggctacaagattgaaggagatgaagaaatgcattgttcagacgatggtttttggagtaaagagaaaccaaagtgtgtggaaatttcatgcaaatccccagatgttataaatggatctcctatatctcagaagattatttataaggagaatgaacgatttcaatataaatgtaacatgggttatgaatacagtgaaagaggagatgctgtatgcactgaatctggatggcgtccgttgccttcatgtgaaggtaatgttacctttattttctggatctttataaatttatcacatattttaattaattcttttaataaatccacttattttaatc

SEQ ID NO: 423452 - DNA, 1075 bp, Homo sapiens
gggaactcttcttgtttggtcagtcacattcagttagtcctgaaggagttgctagtggaatctcagcaagcctaactcagggtaatcatctgctcttcaatctttcccaggctttaccctctgaacttctgatcgaaggtcatccctctccagcttgagtggatcaaagatgacaagggccaatggaaccaagtttgagtcttgccaggtcaatacttgggtcctgagtatggtgactagtatctgttttgttatgtgtgtattattccagccagaatgggaaatgctaattcagctcctccaggcagcccaatggggctggtggctttgagattattaaactctttctctgctgcaaaccccactgtctcagtgtattgttctgttgctgtgcagcaggcatacaaatctgacaatctcgtaactatttgtggcaagccaggtcgaggtcactctctttgagggcatttactcactgcctagtgccccctttccactgggacagacccagagacaaaccctagcagcttacttagctctcatgaactaagggctgtcccttagttctcccaaagtaacccacaatgcaaccctgatgggctgcatcttccaaaattgaaaggcctttgtctatcattccatgaaacaaaaaaagattatcttactttttaacatggcttaaccttaatacccactggatttcggagaacagtggccactgcatggttctcatgcttacagtacgatcctgtagctagatttgttttgtaagaaggaagaagaatgagatgaaataccctatgtataatgttttatgttgctttggaaaagtacaacaatgtagaaaaaggtaaaatcatgataaagtaagaaattaaagactgtttggactgatttacaagaaaaagatgatgctatgatggttcagttaaaggaacctatgactcacccccctccactttatgggggagctgcagcagcactactggcgcctctccagagtccccaccaccaggggactccatttaggcagggtgtcacttcttatacccaacagggaactccatttagccgg

SEQ ID NO: 423453 - DNA, 603 bp, Homo sapiens
ggcacaatcccaggtaaaaatgtttgagagaagtgggtataaaaggtataaaagatgatggccattttttttttttctgaggaaatcttggctaaatagtgatgacacaaaaacaggtcagttacttttcagagatgtaatgacaatgagttaaatcaatgtctttgacaaaaagtcctgttgataattcctgtcttatcaataactagaagatgtgttattttttgcaggtcattcagtgaaaacatcacaataaaactatatttatgatcaattttatttatacagttgatgaatgttactggtcactatttatttcaagaaggctaatttatcctgaaactaaataaaatcagaagcataattttaatcagaattttaactttcttcagataaatcatttattaagcggtcaagtcaaaacagaacttttgtttggttgactgatttacctgatggaaacaacatttctgttttcatataattatgtcctggtcacagtcctttaatttgcaataaacattttggaatttaatcccttttatttagaaatttcatgcaaatccccagatgttataaatggatctcctatatctcagaaga

SEQ ID NO: 423454 - DNA, 388 bp, Homo sapiens
cttcatcagttgagtaccaatgccagaacttgtatcaacttgagggtaacaagcgaataacatgtagaaatggacaatggtcagaaccaccaaaatgcttactacgtaagtactttaatattcacgtggctggaaaaatctctgtgatgagtctgatatttcactgtttgtaacaaaatactcacagattattgaacaaccattctgctgaatgcttgcctaccaaatatttctgtcagaaagtaaagtttagaaatttttctctttagggctgggtgcggtggctcacacctgtaatcccagcactttgggaggctgaggcgggcagatcacgaggtcaggagattgaggaccatcctggctaacacggtgaaaccccgtctctact

SEQ ID NO: 423455 - DNA, 1499 bp, Homo sapiens
ccttttgcagcaagttctttcctgcactaatcacaattcttggaagaggagaactggacgttgtgaacagagttagctggtaaatgtcctcttaaaagatccaaaaaatgagacttctagcaaagattatttgccttatgttatgggctatttgtgtagcagaagattgcaatgaacttcctccaagaagaaatacagaaattctgacaggttcctggtctgaccaaacatatccagaaggcacccaggctatctataaatgccgccctggatatagatctcttggaaatgtaataatggtatgcaggaagggagaatgggttgctcttaatccattaaggaaatgtcagaaaaggccctgtggacatcctggagatactccttttggtacttttacccttacaggaggaaatgtgtttgaatatggtgtaaaagctgtgtatacatgtaatgaggggtatcaattgctaggtgagattaattaccgtgaatgtgacacagatggatggaccaatgatattcctatatgtgaagaaatttcatgcaaatccccagatgttataaatggatctcctatatctcagaagattatttataaggagaatgaacgatttcaatataaatgtaacatgggttatgaatacagtgaaagaggagatgctgtatgcactgaatctggatggcgtccgttgccttcatgtgaagaaaaatcatgtgataatccttatattccaaatggtgactactcacctttaaggattaaacacagaactggagatgaaatcacgtaccagtgtagaaatggtttttatcctgcaacccggggaaatacagccaaatgcacaagtactggctggatacctgctccgagatgtaccttgaaaccttgtgattatccagacattaaacatggaggtctatatcatgagaatatgcgtagaccatactttccagtagctgtaggaaaatattactcctattactgtgatgaacattttgagactccgtcaggaagttactgggatcacattcattgcacacaagatggatggtcgccagcagtaccatgcctcagaaaatgttattttccttatttggaaaatggatataatcaaaattatggaagaaagtttgtacagggtaaatctatagacgttgcctgccatcctggctacgctcttccaaaagcgcagaccacagttacatgtatggagaatggctggtctcctactcccagatgcatccgtgtcagctttaccctctgaacttctgatcgaaggtcatccctctccagcttgagtggatcaaagatgacaagggccaatggaaccaagtttgagtcttgccaggtcaatacttgggtcctgagtatggtgactagtatctgttttgttatgtgtgtattattccagccagaatgggaaatgctaattcagctcctccaggcagcccaatggggctggtggctttgagattattaaactctttctctgctgcaa

SEQ ID NO: 423456 - DNA, 733 bp, Homo sapiens
ctctttgttgactaagtcaataatcagaatcagcaggtttgcagtcagattggcagggataagcagcctagctcaggagaagtgagtataaaagccccaggctgggagcagccatcacagaagtccactcattcttggcaggatggcttctcatcgtctgctcctcctctgccttgctggactggtatttgtgtctgaggctggccctacgggcaccggtgaatccaagtgtcctctgatggtcaaagttctagatgctgtccgaggcagtcctgccatcaatgtggccgtgcatgtgttcagaaaggctgctgatgacacctgggagccatttgcctctgggaaaaccagtgagtctggagagctgcatgggctcacaactgaggaggaatttgtagaagggatatacaaagtggaaatagacaccaaatcttactggaaggcacttggcatctccccattccatgagcatgcagaggtggtattcacagccaacgactccggcccccgccgctacaccattgccgccctgctgagcccctactcctattccaccacggctgtcgtcaccaatcccaaggaatgagggacttctcctccagtggacctgaaggacgagggatgggatttcatgtaaccaagagtattccatttttactaaagcagtgttttcacctcatatgctatgttagaagtccaggcagagacaataaaacattcctgtgaaaggcac

SEQ ID NO: 423457 - DNA, 743 bp, Homo sapiens
  misc_feature (116)..(116): n is a, c, g, or t
tttgtggaatgttacgggatacaatttcccccaggaacagcttatgcaatgtacggcaagtcttaaaacgccccactataggaaagctggaccgcctcaggggacgggtcgaattnccgggtcgaaccacgcgtccactcattcttggcaggatggcttctcatcgtctgctcctcctctgccttgctggactggtatttgtgtctgaggctggccctacgggcaccggtgaatccaagtgtcctctgatggtcaaagttctagatgctgtccgaggcagtcctgccatcaatgtggccgtgcatgtgttcagaaaggctgctgatgacacctgggagccatttgcctctgggaaaaccagtgagtctggagagctgcatgggctcacaactgaggaggaatttgtagaagggatatacaaagtggaaatagacaccaaatcttactggaaggcacttggcatctccccattccatgagcatgcagaggtggtattcacagccaacgactccggcccccgccgctacaccattgccgccctgctgagcccctactcctattccaccacggctgtcgtcaccaatcccaaggaatgagggacttctcctccagtggacctgaaggacgagggatgggatttcatgtaaccaagagtattccatttttactaaagcagtgttttcacctcatatgctatgttagaagtccaggcagagacaataaaacattcctgtgaaaggcac

SEQ ID NO: 423458 - DNA, 1280 bp, Homo sapiens
  misc_feature (116)..(116): n is a, c, g, or t
  misc_feature (1155)..(1155): n is a, c, g, or t
tttgtggaatgttacgggatacaatttcccccaggaacagcttatgcaatgtacggcaagtcttaaaacgccccactataggaaagctggaccgcctcaggggacgggtcgaattnccgggtcgaaccacgcgtccactcattcttggcaggatggcttctcatcgtctgctcctcctctgccttgctggactggtatttgtgtctgaggctggccctacgggcaccggtgaatccaagtgtcctctgatggtcaaagttctagatgctgtccgaggcagtcctgccatcaatgtggccgtgcatgtgttcagaaaggctgctgatgacacctgggagccatttgcctctgggaaaaccagtgagtctggagagctgcatgggctcacaactgaggaggaatttgtagaagggatatacaaagtggaaatagacaccaaatcttactggaaggcacttggcatctccccattccatgagcatgcagaggtggtattcacagccaacgactccggcccccgccgctacaccattgccgccctgctgagcccctactcctattccaccacggctgtcgtcaccaatcccaaggaatgagggacttctcctccagtggacctgaaggacgagggatgggatttcatgtaaccaagagtattccatttttactaaagcagtgttttcacctcatatgctatgttagaagtccaggcagagacaataaaacattcctgtgaaaggcacaaaaaacaaaaaattccagtggtagcttgacctgagatgatacctgaccaccacttctgggaaggcccagaatagacagaagagagagaacatactagagttgctagcccctaagagttgaacgaaatgggcaaggcccagctgaaataacaggaaacacatgaaggggtcattgtcattcgaagatgtggctgtgggcttcaccagggaggagtggcagtttttggaccagtcttaagaggtcttgtacaaggaagtaatgttggagaactacattaacctagtatcaatagggtatcgaggcaccaagccagattcgctctttaaagttgagcaaggagacccccaaggatagcataagagcaggccacagtcaaatttgtcagggtttcattatgagaagaccctccanattgaggaatcaggaagcttgtagattacacctattgtaatttgattaccgttgaaaccaaattttagaacacagttgccattagaccttaactttaacaccacccttataaaggagcaaataat

SEQ ID NO: 423459 - DNA, 362 bp, Homo sapiens
ataaaattaattaagttggcactggacttccggtggtcagtcatgtgtgtcatctgtcacgtttttcgggctctggtggaaatggatctgtctgtcttctctcataggtggtattcacagccaacgactccggcccccgccgctacaccattgccgccctgctgagcccctactcctattccaccacggctgtcgtcaccaatcccaaggaatgagggacttctcctccagtggacctgaaggacgagggatgggatttcatgtaaccaagagtattccatttttactaaagcagtgttttcacctcatatgctatgttagaagtccaggcagagacaataaaacattcctgtgaaaggcac

SEQ ID NO: 423460 - DNA, 659 bp, Homo sapiens
  misc_feature (566)..(566): n is a, c, g, or t
  misc_feature (577)..(577): n is a, c, g, or t
agtgggcatatcatctgaggtcaggagttcaagaccagcctggccaacatggcaaaactccgtctttatgaaaaatacaaaaattagccaggcatggtggcaggcgcctgtaatcccagctaattgggaggctgaggctggagaatcccttgaatctaggaggcagaggttgcagtgagctgagatcgtgccattgcactccagcctgggtgacaagagtaaaactctgtctcaaaaaaaaaaaaaaaaaactcgctcgtgccgaattcggcacgagcttggcatctccccattccatgagcatgcagaggtggtattcacagccaacgactccggcccccgccgctacaccattgccgccctgctgagcccctactcctattccaccacggctgtcgtcaccaatcccaaggaatgagggacttctcctccagtggacctgaaggacgagggatgggatttcatgtaaccaagagtattccatttttactaaagcagtgttttcacctcatatgctatgttagaagtccaggcagagacaataaaacattcctgtgaaaggcacnaaaataaaaantaaaatatttatatatataaaaataaaaggggggcccggtccccaattgccctatgggagccttttcaattaactggcctcg

SEQ ID NO: 423461 - DNA, 954 bp, Homo sapiens
ctctttgttgactaagtcaataatcagaatcagcaggtttgcagtcagattggcagggataagcagcctagctcaggagaagtgagtataaaagccccaggctgggagcagccatcacagaagtccactcattcttggcaggatggcttctcatcgtctgctcctcctctgccttgctggactggtatttgtgtctgaggctggccctacgggcaccggtgaatccaagtgtcctctgatggtcaaagttctagatgctgtccgaggcagtcctgccatcaatgtggccgtgcatgtgttcagaaaggctgctgatgacacctgggagccatttgcctctgggaaaaccagtgagtctggagagctgcatgggctcacaactgaggaggaatttgtagaagggatatacaaagtggaaatagacaccaaatcttactggaaggcacttggcatctccccattccatgagcatgcagaggtggtattcacagccaacgactccggcccccgccgctacaccattgccgccctgctgagcccctactcctattccaccacggctgtcgtcaccaatcccaaggaatgagggacttctcctccagtggacctgaaggacgagggatgggatttcatgtaaccaagagtattccatttttactaaagcagtgttttcacctcatatgctatgttagaagtccaggcagagacaataaaacattcctgtgaaaggcacaaaacaaagaaaagaaaagaaaaaaaaaaaaataatagaagaaagaaaaaatgaggaggaaaaaaaagaagaggaaaaagaggaaatagtaaaagatgtaaagaaaggaaaggagaataaaaaaaccttaggggggggcccggaacccaatatccccatttgagggcggaattacaaattatggggccgcttgtttacaccttggaatctggaaggagaaa

SEQ ID NO: 423462 - DNA, 1267 bp, Homo sapiens
  misc_feature (734)..(734): n is a, c, g, or t
  misc_feature (760)..(760): n is a, c, g, or t
  misc_feature (807)..(807): n is a, c, g, or t
  misc_feature (810)..(810): n is a, c, g, or t
  misc_feature (818)..(818): n is a, c, g, or t
  misc_feature (866)..(866): n is a, c, g, or t
  misc_feature (888)..(888): n is a, c, g, or t
  misc_feature (895)..(895): n is a, c, g, or t
  misc_feature (936)..(936): n is a, c, g, or t
  misc_feature (987)..(987): n is a, c, g, or t
  misc_feature (1005)..(1005): n is a, c, g, or t
  misc_feature (1013)..(1013): n is a, c, g, or t
  misc_feature (1049)..(1049): n is a, c, g, or t
  misc_feature (1055)..(1055): n is a, c, g, or t
  misc_feature (1061)..(1061): n is a, c, g, or t
  misc_feature (1076)..(1076): n is a, c, g, or t
  misc_feature (1091)..(1092): n is a, c, g, or t
  misc_feature (1111)..(1113): n is a, c, g, or t
  misc_feature (1117)..(1118): n is a, c, g, or t
  misc_feature (1124)..(1124): n is a, c, g, or t
  misc_feature (1126)..(1126): n is a, c, g, or t
  misc_feature (1128)..(1128): n is a, c, g, or t
  misc_feature (1132)..(1132): n is a, c, g, or t
  misc_feature (1135)..(1135): n is a, c, g, or t
  misc_feature (1143)..(1143): n is a, c, g, or t
  misc_feature (1148)..(1148): n is a, c, g, or t
  misc_feature (1150)..(1150): n is a, c, g, or t
  misc_feature (1155)..(1155): n is a, c, g, or t
  misc_feature (1171)..(1172): n is a, c, g, or t
  misc_feature (1177)..(1177): n is a, c, g, or t
  misc_feature (1183)..(1183): n is a, c, g, or t
  misc_feature (1190)..(1190): n is a, c, g, or t
  misc_feature (1192)..(1192): n is a, c, g, or t
  misc_feature (1196)..(1196): n is a, c, g, or t
  misc_feature (1198)..(1198): n is a, c, g, or t
  misc_feature (1210)..(1210): n is a, c, g, or t
  misc_feature (1213)..(1215): n is a, c, g, or t
  misc_feature (1224)..(1225): n is a, c, g, or t
  misc_feature (1234)..(1235): n is a, c, g, or t
ctctttgttgactaagtcaataatcagaatcagcaggtttgcagtcagattggcagggataagcagcctagctcaggagaagtgagtataaaagccccaggctgggagcagccatcacagaagtccactcattcttggcaggatggcttctcatcgtctgctcctcctctgccttgctggactggtatttgtgtctgaggctggccctacgggcaccggtgaatccaagtgtcctctgatggtcaaagttctagatgctgtccgaggcagtcctgccatcaatgtggccgtgcatgtgttcagaaaggctgctgatgacacctgggagccatttgcctctgggaaaaccagtgagtctggagagctgcatgggctcacaactgaggaggaatttgtagaagggatatacaaagtggaaatagacaccaaatcttactggaaggcacttggcatctccccattccatgagcatgcagaggtggtattcacagccaacgactccggcccccgccgctacaccattgccgccctgctgagcccctactcctattccaccacggctgtcgtcaccaatcccaaggaatgagggacttctcctccagtggacctgaaggacgagggatgggatttcatgtaaccaagagtattccatttttactaaagcagtgttttcacctcatatgctatgttagaagtccaggcagagacaataaaacattcctgtgaaaggcacnaaaaaaaaaaaaaactcgggttgggnctttgtttttttaccttgacttttaaaaaaaaaaaaaaaactcgagnaancttcttanggaaaactccaattggctttttccccaacttacaaaaaaataatctgntttttaaaaagaatgggttttnattttgnaaggggaaaggggaaaaaatcataaggacctatccggtgcntcatatttttgcttttaagagaaactcaaatccccgaattttcctggggcnggtgttatatttaaaacntttaaaanttgtttaccaaaaaggaccaggatttaaacttttgngggttnttgttnacagggaaactttanaagcctgtttttttnnagggcccaaataaccctgnnnttannaaagcngncntttnttntccggggntgttnangggcncttttgtgacaagaannccctnctaagntttactncncaantnacccgttttttngtnnngaaaccccnnccttttttnnaccaaacttctttgggttggacattaaaccca

SEQ ID NO: 423463 - DNA, 1216 bp, Homo sapiens
  misc_feature (756)..(756): n is a, c, g, or t
  misc_feature (759)..(759): n is a, c, g, or t
  misc_feature (767)..(767): n is a, c, g, or t
  misc_feature (815)..(815): n is a, c, g, or t
  misc_feature (837)..(837): n is a, c, g, or t
  misc_feature (844)..(844): n is a, c, g, or t
  misc_feature (885)..(885): n is a, c, g, or t
  misc_feature (936)..(936): n is a, c, g, or t
  misc_feature (954)..(954): n is a, c, g, or t
  misc_feature (962)..(962): n is a, c, g, or t
  misc_feature (998)..(998): n is a, c, g, or t
  misc_feature (1004)..(1004): n is a, c, g, or t
  misc_feature (1010)..(1010): n is a, c, g, or t
  misc_feature (1025)..(1025): n is a, c, g, or t
  misc_feature (1040)..(1041): n is a, c, g, or t
  misc_feature (1060)..(1062): n is a, c, g, or t
  misc_feature (1066)..(1067): n is a, c, g, or t
  misc_feature (1073)..(1073): n is a, c, g, or t
  misc_feature (1075)..(1075): n is a, c, g, or t
  misc_feature (1077)..(1077): n is a, c, g, or t
  misc_feature (1081)..(1081): n is a, c, g, or t
  misc_feature (1084)..(1084): n is a, c, g, or t
  misc_feature (1092)..(1092): n is a, c, g, or t
  misc_feature (1097)..(1097): n is a, c, g, or t
  misc_feature (1099)..(1099): n is a, c, g, or t
  misc_feature (1104)..(1104): n is a, c, g, or t
  misc_feature (1120)..(1121): n is a, c, g, or t
  misc_feature (1126)..(1126): n is a, c, g, or t
  misc_feature (1132)..(1132): n is a, c, g, or t
  misc_feature (1139)..(1139): n is a, c, g, or t
  misc_feature (1141)..(1141): n is a, c, g, or t
  misc_feature (1145)..(1145): n is a, c, g, or t
  misc_feature (1147)..(1147): n is a, c, g, or t
  misc_feature (1159)..(1159): n is a, c, g, or t
  misc_feature (1162)..(1164): n is a, c, g, or t
  misc_feature (1173)..(1174): n is a, c, g, or t
  misc_feature (1183)..(1184): n is a, c, g, or t
ctctttgttgactaagtcaataatcagaatcagcaggtttgcagtcagattggcagggataagcagcctagctcaggagaagtgagtataaaagccccaggctgggagcagccatcacagaagtccactcattcttggcaggatggcttctcatcgtctgctcctcctctgccttgctggactggtatttgtgtctgaggctggccctacgggcaccggtgaatccaagtgtcctctgatggtcaaagttctagatgctgtccgaggcagtcctgccatcaatgtggccgtgcatgtgttcagaaaggctgctgatgacacctgggagccatttgcctctgggaaaaccagtgagtctggagagctgcatgggctcacaactgaggaggaatttgtagaagggatatacaaagtggaaatagacaccaaatcttactggaaggcacttggcatctccccattccatgagcatgcagaggtggtattcacagccaacgactccggcccccgccgctacaccattgccgccctgctgagcccctactcctattccaccacggctgtcgtcaccaatcccaaggaatgagggacttctcctccagtggacctgaaggacgagggatgggatttcatgtaaccaagagtattccatttttactaaagcagtgttttcacctcatatgctatgttagaagtccaggcagagacaataaaacattcctgtgaaaggcacaaaaaaaaaaaaaaaactcgagnaancttcttanggaaaactccaattggctttttccccaacttacaaaaaaataatctgntttttaaaaagaatgggttttnattttgnaaggggaaaggggaaaaaatcataaggacctatccggtgcntcatatttttgcttttaagagaaactcaaatccccgaattttcctggggcnggtgttatatttaaaacntttaaaanttgtttaccaaaaaggaccaggatttaaacttttgngggttnttgttnacagggaaactttanaagcctgtttttttnnagggcccaaataaccctgnnnttannaaagcngncntttnttntccggggntgttnangggcncttttgtgacaagaannccctnctaagntttactncncaantnacccgttttttngtnnngaaaccccnnccttttttnnaccaaacttctttgggttggacattaaaccca

SEQ ID NO: 423464 - DNA, 1221 bp, Homo sapiens
  misc_feature (756)..(756): n is a, c, g, or t
  misc_feature (759)..(759): n is a, c, g, or t
  misc_feature (767)..(767): n is a, c, g, or t
  misc_feature (815)..(815): n is a, c, g, or t
  misc_feature (837)..(837): n is a, c, g, or t
  misc_feature (844)..(844): n is a, c, g, or t
  misc_feature (885)..(885): n is a, c, g, or t
  misc_feature (936)..(936): n is a, c, g, or t
  misc_feature (954)..(954): n is a, c, g, or t
  misc_feature (962)..(962): n is a, c, g, or t
ctctttgttgactaagtcaataatcagaatcagcaggtttgcagtcagattggcagggataagcagcctagctcaggagaagtgagtataaaagccccaggctgggagcagccatcacagaagtccactcattcttggcaggatggcttctcatcgtctgctcctcctctgccttgctggactggtatttgtgtctgaggctggccctacgggcaccggtgaatccaagtgtcctctgatggtcaaagttctagatgctgtccgaggcagtcctgccatcaatgtggccgtgcatgtgttcagaaaggctgctgatgacacctgggagccatttgcctctgggaaaaccagtgagtctggagagctgcatgggctcacaactgaggaggaatttgtagaagggatatacaaagtggaaatagacaccaaatcttactggaaggcacttggcatctccccattccatgagcatgcagaggtggtattcacagccaacgactccggcccccgccgctacaccattgccgccctgctgagcccctactcctattccaccacggctgtcgtcaccaatcccaaggaatgagggacttctcctccagtggacctgaaggacgagggatgggatttcatgtaaccaagagtattccatttttactaaagcagtgttttcacctcatatgctatgttagaagtccaggcagagacaataaaacattcctgtgaaaggcacaaaaaaaaaaaaaaaactcgagnaancttcttanggaaaactccaattggctttttccccaacttacaaaaaaataatctgntttttaaaaagaatgggttttnattttgnaaggggaaaggggaaaaaatcataaggacctatccggtgcntcatatttttgcttttaagagaaactcaaatccccgaattttcctggggcnggtgttatatttaaaacntttaaaanttgtttaccaaaaaggaccaggatttaaactttatggaggttttggtttacaagggaaaatttaaaaagctttctttttttaaggcccccaataaccccgggttttaaaaaaacggggttttttttttccggggggtgtttaaggggccttttttggaaaaaaagaccccctttttttttttttctccccctttccccctttttttttggtggagtaaataccccccccccctttttttataccctcttttttggtggt

SEQ ID NO: 423465 - DNA, 814 bp, Homo sapiens
ctctttgttgactaagtcaataatcagaatcagcaggtttgcagtcagattggcagggataagcagcctagctcaggagaagtgagtataaaagccccaggctgggagcagccatcacagaagtccactcattcttggcaggatggcttctcatcgtctgctcctcctctgccttgctggactggtatttgtgtctgaggctggccctacgggcaccggtgaatccaagtgtcctctgatggtcaaagttctagatgctgtccgaggcagtcctgccatcaatgtggccgtgcatgtgttcagaaaggctgctgatgacacctgggagccatttgcctctgggaaaaccagtgagtctggagagctgcatgggctcacaactgaggaggaatttgtagaagggatatacaaagtggaaatagacaccaaatcttactggaaggcacttggcatctccccattccatgagcatgcagaggtggtattcacagccaacgactccggcccccgccgctacaccattgccgccctgctgagcccctactcctattccaccacggctgtcgtcaccaatcccaaggaatgagggacttctcctccatactaaagcagtgttttcacctcatatgctatgttagaagtccaggcagagacaataaaacattcctgtgaaaggcacttttcattccactttaacttgattttttaaattcccttattgtcccttccaaaaaaaagagaatcaaaattttacaaagaatcaaaggaattctagaaagtatctgggcagaacgctaggagagatccaaatttc

SEQ ID NO: 423466 - DNA, 700 bp, Homo sapiens
ctctttgttgactaagtcaataatcagaatcagcaggtttgcagtcagattggcagggataagcagcctagctcaggagaagtgagtataaaagccccaggctgggagcagccatcacagaagtccactcattcttggcaggatggcttctcatcgtctgctcctcctctgccttgctggactggtatttgtgtctgaggctggccctacgggcaccggtgaatccaagtgtcctctgatggtcaaagttctagatgctgtccgaggcagtcctgccatcaatgtggccgtgcatgtgttcagaaaggctgctgatgacacctgggagccatttgcctctgggaaaaccagtgagtctggagagctgcatgggctcacaactgaggaggaatttgtagaagggatatacaaagtggaaatagacaccaaatcttactggaaggcacttggcatctccccattccatgagcatgcagaggtggtattcacagccaacgactccggcccctactcctattccaccacggctgtcgtcaccaatcccaaggaatgagggacttctcctccagtggacctgaaggacgagggatgggatttcatgtaaccaagagtattccatttttactaaagcagtgttttcacctcatatgctatgttagaagtccaggcagagacaataaaacattcctgtgaaaggcac

SEQ ID NO: 423467 - DNA, 1848 bp, Homo sapiens
ctctttgttgactaagtcaataatcagaatcagcaggtttgcagtcagattggcagggataagcagcctagctcaggagaagtgagtataaaagccccaggctgggagcagccatcacagaagtccactcattcttggcaggatggcttctcatcgtctgctcctcctctgccttgctggactggtatttgtgtctgaggctggccctacgggcaccggtgaatccaagtgtcctctgatggtcaaagttctagatgctgtccgaggcagtcctgccatcaatgtggccgtgcatgtgttcagaaaggctgctgatgacacctgggagccatttgcctctgggaaaaccagtgagtctggagagctgcatgggctcacaactgaggaggaatttgtagaagggatatacaaagtggaaatagacaccaaatcttactggaaggcacttggcatctccccattccatgagcatgcagaggtggtattcacagccaacgactccgggttgttttggttttggtttttgcttttggcattccaggaaatgcacagttttactcagtgtaccacagaaatgtcctaaggaaggtgatgaatgaccaaaggttccctttcctattatacaagaaaaaattcacaacactctgagaagcaaatttctttttgactttgatgaaaatccacttagtaacatgacttgaacttacatgaaactactcatagtctattcattccactttatatgaatattgatgtatctgctgttgaaataatagtttatgaggcagccctccagaccccacgtagagtgtatgtaacaagagatgcaccattttatttctcgaaaacccgtaacattcttcattccaaaacacatctggcttctcggaggtctggacaagtgattcttggcaacacatacctatagagacaataaaatcaaagtaataatggcaacacaatagataacatttaccaagcatacaccatgtggcagacacaattataagtgttttccatatttaacctacttaatcctcaggaataagccactgaggtcagtcctattattatccccatcttatagatgaagaaaatgaggcaccaggaagtcaaataacttgtcaaaggtcacaagactaggaaatacacaagtagaaatgtttacaattaaggcccaggctgggtttgccctcagttctgctatgcctcgcattatgccccaggaaactttttcccttgtgaaagccaagcttaaaaaaagaaaagccacatttgtaacgtgctctgttcccctgcctatggtgaggatcttcaaacagttatacatggacccagtccccctgccttctccttaatttcttaagtcatttgaaacagatggctgtcatggaaatagaatccagacatgttggtcagagttaaagatcaactaattccatcatttcaattgctataaagtggttcctttattagacaatgttaccagggaaacaacaggggtttgtttgacttctggggcccacaagtcaacaagagagccccatctaccaaggagcatgtccctgactacccctcagccagcagcaagacatggaccccagtcagggcaggagcagggtttcggcggcgcccagcacaagacattgcccctagagtctcagcccctaccctcgagtaatagatctgcctacctgagactgttgtttgcccaagagctgggtctcagcctgatgggaaccatataaaaaggttcactgacatactgcccacatgttgttctctttcattagatcttagcttccttgtctgctcttcattcttgcagtattcattcaacaaacatta

SEQ ID NO: 423468 - DNA, 1794 bp, Homo sapiens
ctctttgttgactaagtcaataatcagaatcagcaggtttgcagtcagattggcagggataagcagcctagctcaggagaagtgagtataaaagccccaggctgggagcagccatcacagaagtccactcattcttggcaggatggcttctcatcgtctgctcctcctctgccttgctggactggtatttgtgtctgaggctggccctacgggcaccggtgaatccaagtgtcctctgatggtcaaagttctagatgctgtccgaggcagtcctgccatcaatgtggccgtgcatgtgttcagaaaggctgctgatgacacctgggagccatttgcctctgggaaaaccagtgagtctggagagctgcatgggctcacaactgaggaggaatttgtagaagggatatacaaagtggaaatagacaccaaatcttactggaaggcacttggcatctccccattccatgagcatgcagaggtggtattcacagccaacgactccgggttgttttggttttggtttttgcttttggcattccaggaaatgcacagttttactcagtgtaccacagaaatgtcctaaggaaggtgatgaatgaccaaaggttccctttcctattatacaagaaaaaattcacaacactctgagaagcaaatttctttttgactttgatgcattccactttatatgaatattgatgtatctgctgttgaaataatagtttatgaggcagccctccagaccccacgtagagtgtatgtaacaagagatgcaccattttatttctcgaaaacccgtaacattcttcattccaaaacacatctggcttctcggaggtctggacaagtgattcttggcaacacatacctatagagacaataaaatcaaagtaataatggcaacacaatagataacatttaccaagcatacaccatgtggcagacacaattataagtgttttccatatttaacctacttaatcctcaggaataagccactgaggtcagtcctattattatccccatcttatagatgaagaaaatgaggcaccaggaagtcaaataacttgtcaaaggtcacaagactaggaaatacacaagtagaaatgtttacaattaaggcccaggctgggtttgccctcagttctgctatgcctcgcattatgccccaggaaactttttcccttgtgaaagccaagcttaaaaaaagaaaagccacatttgtaacgtgctctgttcccctgcctatggtgaggatcttcaaacagttatacatggacccagtccccctgccttctccttaatttcttaagtcatttgaaacagatggctgtcatggaaatagaatccagacatgttggtcagagttaaagatcaactaattccatcatttcaattgctataaagtggttcctttattagacaatgttaccagggaaacaacaggggtttgtttgacttctggggcccacaagtcaacaagagagccccatctaccaaggagcatgtccctgactacccctcagccagcagcaagacatggaccccagtcagggcaggagcagggtttcggcggcgcccagcacaagacattgcccctagagtctcagcccctaccctcgagtaatagatctgcctacctgagactgttgtttgcccaagagctgggtctcagcctgatgggaaccatataaaaaggttcactgacatactgcccacatgttgttctctttcattagatcttagcttccttgtctgctcttcattcttgcagtattcattcaacaaacatta

SEQ ID NO: 423469 - DNA, 590 bp, Homo sapiens
  misc_feature (13)..(14): n is a, c, g, or t
  misc_feature (18)..(19): n is a, c, g, or t
  misc_feature (50)..(50): n is a, c, g, or t
ggagtggcggggnncganntggggggggggggggttcggacgttgtgtgnggggcaggatggcttctcatcgtctgctcctcctctgccttgctggactggtatttgtgtctgaggctggccctacgggcaccggtgaatccaagtgtcctctgatggtcaaagttctagatgctgtccgaggcagtcctgccatcaatgtggccgtgcatgtgttcagaaaggctgctgatgacacctgggagccatttgcctctggggatatacaaagtggaaatagacaccaaatcttactggaaggcacttggcatctccccattccatgagcatgcagaggtggtattcacagccaacgactccggcccccgccgctacaccattgccgccctgctgagcccctactcctattccaccacggctgtcgtcaccaatcccaaggaatgagggacttctcctccagtggacctgaaggacgagggatgggatttcatgtaaccaagagtattccatttttactaaagcagtgttttcacctcatatgctatgttagaagtccaggcagagacaataaaacattcctgtgaaaggcac

SEQ ID NO: 423470 - DNA, 684 bp, Homo sapiens
  misc_feature (116)..(116): n is a, c, g, or t
tttgtggaatgttacgggatacaatttcccccaggaacagcttatgcaatgtacggcaagtcttaaaacgccccactataggaaagctggaccgcctcaggggacgggtcgaattnccgggtcgaaccacgcgtccactcattcttggcaggatggcttctcatcgtctgctcctcctctgccttgctggactggtatttgtgtctgaggctggccctacgggcaccggtgaatccaagtgtcctctgatggtcaaagttctagatgctgtccgaggcagtcctgccatcaatgtggccgtgcatgtgttcagaaaggctgctgatgacacctgggagccatttgcctctggggatatacaaagtggaaatagacaccaaatcttactggaaggcacttggcatctccccattccatgagcatgcagaggtggtattcacagccaacgactccggcccccgccgctacaccattgccgccctgctgagcccctactcctattccaccacggctgtcgtcaccaatcccaaggaatgagggacttctcctccagtggacctgaaggacgagggatgggatttcatgtaaccaagagtattccatttttactaaagcagtgttttcacctcatatgctatgttagaagtccaggcagagacaataaaacattcctgtgaaaggcac

SEQ ID NO: 423471 - DNA, 1799 bp, Homo sapiens
  misc_feature (116)..(116): n is a, c, g, or t
tttgtggaatgttacgggatacaatttcccccaggaacagcttatgcaatgtacggcaagtcttaaaacgccccactataggaaagctggaccgcctcaggggacgggtcgaattnccgggtcgaaccacgcgtccactcattcttggcaggatggcttctcatcgtctgctcctcctctgccttgctggactggtatttgtgtctgaggctggccctacgggcaccggtgaatccaagtgtcctctgatggtcaaagttctagatgctgtccgaggcagtcctgccatcaatgtggccgtgcatgtgttcagaaaggctgctgatgacacctgggagccatttgcctctggggatatacaaagtggaaatagacaccaaatcttactggaaggcacttggcatctccccattccatgagcatgcagaggtggtattcacagccaacgactccgggttgttttggttttggtttttgcttttggcattccaggaaatgcacagttttactcagtgtaccacagaaatgtcctaaggaaggtgatgaatgaccaaaggttccctttcctattatacaagaaaaaattcacaacactctgagaagcaaatttctttttgactttgatgaaaatccacttagtaacatgacttgaacttacatgaaactactcatagtctattcattccactttatatgaatattgatgtatctgctgttgaaataatagtttatgaggcagccctccagaccccacgtagagtgtatgtaacaagagatgcaccattttatttctcgaaaacccgtaacattcttcattccaaaacacatctggcttctcggaggtctggacaagtgattcttggcaacacatacctatagagacaataaaatcaaagtaataatggcaacacaatagataacatttaccaagcatacaccatgtggcagacacaattataagtgttttccatatttaacctacttaatcctcaggaataagccactgaggtcagtcctattattatccccatcttatagatgaagaaaatgaggcaccaggaagtcaaataacttgtcaaaggtcacaagactaggaaatacacaagtagaaatgtttacaattaaggcccaggctgggtttgccctcagttctgctatgcctcgcattatgccccaggaaactttttcccttgtgaaagccaagcttaaaaaaagaaaagccacatttgtaacgtgctctgttcccctgcctatggtgaggatcttcaaacagttatacatggacccagtccccctgccttctccttaatttcttaagtcatttgaaacagatggctgtcatggaaatagaatccagacatgttggtcagagttaaagatcaactaattccatcatttcaattgctataaagtggttcctttattagacaatgttaccagggaaacaacaggggtttgtttgacttctggggcccacaagtcaacaagagagccccatctaccaaggagcatgtccctgactacccctcagccagcagcaagacatggaccccagtcagggcaggagcagggtttcggcggcgcccagcacaagacattgcccctagagtctcagcccctaccctcgagtaatagatctgcctacctgagactgttgtttgcccaagagctgggtctcagcctgatgggaaccatataaaaaggttcactgacatactgcccacatgttgttctctttcattagatcttagcttccttgtctgctcttcattcttgcagtattcattcaacaaacatta

SEQ ID NO: 423472 - DNA, 929 bp, Homo sapiens
  misc_feature (116)..(116): n is a, c, g, or t
tttgtggaatgttacgggatacaatttcccccaggaacagcttatgcaatgtacggcaagtcttaaaacgccccactataggaaagctggaccgcctcaggggacgggtcgaattnccgggtcgaaccacgcgtccactcattcttggcaggatggcttctcatcgtctgctcctcctctgccttgctggactggtatttgtgtctgaggctggccctacgggcaccggtgaatccaagtgtcctctgatggtcaaagttctagatgctgtccgaggcagtcctgccatcaatgtggccgtgcatgtgttcagaaaggctgctgatgacacctgggagccatttgcctctgggtaagttgccaaagaaccctcccacaggacttggttttatcttcccgtttgcccctcacttggtagagagaggctcacatcatctgctaaagaatttacaagtagattgaaaaacgtaggcagaggtcaagtatgccctctgaaggatgccctctttttgttttgcttagctaggaagtgaccaggaacctgagcatcatttaggggcagacagtagagaaaagaaggaatcagaactcctctcctctagctgtggtttgcaacccttttgggtcacagaacactttatgtaggtgatgaaaagtaaacattctatgcccagaaaaaatgcacagatacacacacatacaaaatcatatatgtgattttaggagtttcacagattccctggtgtccctgggtaacaccaaagctaagtgtccttgtcttagaattttaggaaaaggtataatgtgtattaacccattaacaaaaggaaaggaattcagaaatattattaaccaggcatctgtctgtagttaatatggatcacccaaaacccaaggcttttgcctaatgaacactttggggcacctac

SEQ ID NO: 423473 - DNA, 1270 bp, Homo sapiens
  misc_feature (1145)..(1145): n is a, c, g, or t
ctctttgttgactaagtcaataatcagaatcagcaggtttgcagtcagattggcagggataagcagcctagctcaggagaagtgagtataaaagccccaggctgggagcagccatcacagaagtccactcattcttggcaggatggcttctcatcgtctgctcctcctctgccttgctggactggtatttgtgtctgaggctggccctacgggcaccggtgaatccaagtgtcctctgatggtcaaagttctagatgctgtccgaggcagtcctgccatcaatgtggccgtgcatgtgttcagaaaggctgctgatgacacctgggagccatttgcctctgggaaaaccagtgagtctggagagctgcatgggctcacaactgaggaggaatttgtagaagggatatacaaagtggaaatagacaccaaatcttactggaaggcacttggcatctccccattccatgagcatgcagaggtggtattcacagccaacgactccggcccccgccgctacaccattgccgccctgctgagcccctactcctattccaccacggctgtcgtcaccaatcccaaggaatgagggacttctcctccagtggacctgaaggacgagggatgggatttcatgtaaccaagagtattccatttttactaaagcagtgttttcacctcatatgctatgttagaagtccaggcagagacaataaaacattcctgtgaaaggcacaaaaaacaaaaaattccagtggtagcttgacctgagatgatacctgaccaccacttctgggaaggcccagaatagacagaagagagagaacatactagagttgctagcccctaagagttgaacgaaatgggcaaggcccagctgaaataacaggaaacacatgaaggggtcattgtcattcgaagatgtggctgtgggcttcaccagggaggagtggcagtttttggaccagtcttaagaggtcttgtacaaggaagtaatgttggagaactacattaacctagtatcaatagggtatcgaggcaccaagccagattcgctctttaaagttgagcaaggagacccccaaggatagcataagagcaggccacagtcaaatttgtcagggtttcattatgagaagaccctccanattgaggaatcaggaagcttgtagattacacctattgtaatttgattaccgttgaaaccaaattttagaacacagttgccattagaccttaactttaacaccacccttataaaggagcaaataat

SEQ ID NO: 423474 - DNA, 868 bp, Homo sapiens
ctctttgttgactaagtcaataatcagaatcagcaggtttgcagtcagattggcagggataagcagcctagctcaggagaagtgagtataaaagccccaggctgggagcagccatcacagaagtccactcattcttggcaggatggcttctcatcgtctgctcctcctctgccttgctggactggtatttgtgtctgaggctggccctacgggcaccggtgaatccaagtgtcctctgatggtcaaagttctagatgctgtccgaggcagtcctgccatcaatgtggccgtgcatgtgttcagaaaggctgctgatgacacctgggagccatttgcctctgggaaaaccagtgagtctggagagctgcatgggctcacaactgaggaggaatttgtagaagggatatacaaagtggaaatagacaccaaatcttactggaaggcacttggcatctccccattccatgagcatgcagaggtggtattcacagccaacgactccggcccccgccgctacaccattgccgccctgctgagcccctactcctattccaccacggctgtcgtcaccaatcccaaggaatgagggacttctcctccagtggacctgaaggacgagggatgggatttcatgtaaccaagagtattccatttttactaaagcagtgttttcacctcatatgctatgttagaagtccaggcagagacaataaaacattcctgtgaaaggcacttttcattccactttaacttgattttttaaattcccttattgtcccttccaaaaaaaagagaatcaaaattttacaaagaatcaaaggaattctagaaagtatctgggcagaacgctaggagagatccaaatttc

SEQ ID NO: 423475 - DNA, 759 bp, Homo sapiens
ctctttgttgactaagtcaataatcagaatcagcaggtttgcagtcagattggcagggataagcagcctagctcaggagaagtgagtataaaagccccaggctgggagcagccatcacagaagtccactcattcttggcaggatggcttctcatcgtctgctcctcctctgccttgctggactggtatttgtgtctgaggctggccctacgggcaccggtgaatccaagtgtcctctgatggtcaaagttctagatgctgtccgaggcagtcctgccatcaatgtggccgtgcatgtgttcagaaaggctgctgatgacacctgggagccatttgcctctgggaaaaccagtgagtctggagagctgcatgggctcacaactgaggaggaatttgtagaagggatatacaaagtggaaatagacaccaaatcttactggaaggcacttggcatctccccattccatgagcatgcagaggtggtattcacagccaacgactccggcccccgccgctacaccattgccgccctgctgagcccctactcctattccaccacggctgtcgtcaccaatcccaaggaatgagggacttctcctccagtggacctgaaggacgagggatgggatttcatgtaaccaagagtattccatttttactaaagcagtgttttcacctcatatgctatgttagaagtccaggcagagacaataaaacattcctgtgaaaggcacaaaaaagaaaaaattctccagcgctg

SEQ ID NO: 423476 - DNA, 2842 bp, Homo sapiens
  misc_feature (893)..(893): n is a, c, g, or t
  misc_feature (1157)..(1157): n is a, c, g, or t
  misc_feature (1218)..(1218): n is a, c, g, or t
  misc_feature (2195)..(2195): n is a, c, g, or t
gaaaagatctccctgcacactgtagtcactgtatttgtacagcaagggacttgttccccaagcctggagcttttggaactgaatggagcccagaggcaagagtagtgaaatgaggctgacctttgcttctggttttgcttgctacttgccagtatgtgggttccctggaggaacacacaggtgtcttggctttgccactgggcattttgggtgatttcgttaactttgcctgttttgaccagaagagagcctgatcgtgataggaggaggcgggggactgacggggttatacaatcttcacatatatatacactcagtcccatgccttgagtctagaggctggggagagggcccagctgcacgttggttgaggccagcagtacatggcccttgaggctatgctgatagcaacttgtggcacactttgtacttcatactgtgaggaacatgaaataagccagagccaggcctgatcttgaaagaaccctctgtcaagtgggaaggcctgttgcagacatgcatcaactggcccagctggcttatccatggctgtccctgggcctcctgtgaatccagaggaggctgctccagcattgataaggctgggatggggcaggttccacaaggagggaaagctcaccccagtgtaaaaggaaggagtgggggataagtctatctcatgaataacctgagcaaaggcccaaaagagtgtggctgatagattgggggaactgagagtagtctgggggtggggggcacctagaggacagggcacctgtgagagagtgagggagatgagactggaaagatggaccagggcaaaccacgaaaggccttgaagaccatgctaaatcatttgaactttgttacaagctttggaaaccttttaaaanccatggaatttaaatgtttgagatgaggggagtaacattatggaaagatattttggctgggtgtggtagctcatgcctgtaatcctagcactttggaaagccgaggcaggaggatcacttgagctcaggagttcaagaccaacctgggcaacatagtgagacctcgtcactatttaaaaaaataaaaaataaataataataaagaaagataatttgagtgactgggaaggggtgaactgaaagagagattaattaaagacagtnaagagcaatttgcaaaggtttagttgaaagaaattgaagcccacagttttgtaggccaagncctggcccttctgcgtgcttcccccatgcccacgtgcacttggaggctggcctctctcctcctcctttcaggcctgcattgcaagtgtgggggcgactggccacgtcttccatttcggtgagggcacaccagaggagccagggtttctagtgatgcgtcaccataacagcaagtctcatttcatgaagtctcactgcatcatcaaatgcttaccccttatccctaaactggcaaaacttactcttagaaaaaagttacatacaatttaacattggaaaagaaaatcttatatttgatttttttgcattagaaaatattttgacaaccctttttaaaataatttttatcttcatcaaagtagcctatggtttaaatgtcaaaaagaactaaaaggggcctctctgggtcagtttctcaatacagtgggtgaacctcagaggcccagtcagcaaaggtctttgggtctggatgttggggttggtctaatcaattaaattcaaactttccactcattctcatttttagcctcatccctctttctgccgtagctaggcctctatgtgctgagccctgtgtgagcataggagttgccccttccacttctctgttcaatcagaaccatttcacatttgctttgcatcttcccaaaaaatgttgacatccctcggttatatccttttttcctcattcactgtaattctagtttcagaaggaagagagattgatgtatatgttagttactgccttactgggaatccttttttttaatgtattatcagctttccctttttaggcaggactacctttatggaggttatgtgcttcttcctttaagccatcctttctactctgaaataatagtgatattagggagtagctggggtctttttttttaagttgaccccaaaatgtgtttttacattttactggtgtgtgaaatctagaaatcaggaaacaagtgacctaggctttaaaantaaataaataaataaaataagcttgactatgaaggaaggcacatagacggagcagtggccagaagacaggataggagagggacaagatttttcttttcaagctgagagagacttaagcataggcagaaagagggttgaagaaggcagtgtagccaaatatcaaagaaaaataatggtggcctgttctgagagggagaagacaggccggggacattcacacctgacgggcctgtgcttcctagatgcggaggcaggcagggccctctcacggcaagctgggaaggccctaccctaaggcatgtttccacaatttctctaaacttttcttttctgatagtctgttttaaaaaaatcaaaatggtcagggttggtggttcacgcctgtaatcccagctattcaggaggccaaggtgggaggatcacttgaggccacgagttcaagaccagcctgggcaacacagcaagactccatctcaaaaaaaaaaaaaaattatattagccaggcatggtggcacacgcctgtggttccagctactcaggagaccgaggtgagaggatcacttgaatccaggagttcaaggctgcagtgagctgtggtcacgccactgcactccagcctaggctacagagccagaccctgtctctta

SEQ ID NO: 423477 - DNA, 486 bp, Homo sapiens
  misc_feature (26)..(26): n is a, c, g, or t
  misc_feature (73)..(73): n is a, c, g, or t
  misc_feature (82)..(82): n is a, c, g, or t
  misc_feature (112)..(112): n is a, c, g, or t
ctgttttaaaaaaaatcaaaaggtcnaggttggtggttcacgcctgtaatcccagctattcgggaggcccaangtgggaggntcacttgaggcccacgaagttcaaaaccanccctgggaaggccctaccctaaggcatgtttccacaatttctctaaacttttcttttctgatagtctgttttaaaaaaatcaaaatggtcagggttggtggttcacgcctgtaatcccagctattcaggaggccaaggtgggaggatcacttgaggccacgagttcaagaccagcctgggcaacacagcaagactccatctcaaaaaaaaaaaaaaattatattagccaggcatggtggcacacgcctgtggttccagctactcaggagaccgaggtgagaggatcacttgaatccaggagttcaaggctgcagtgagctgtggtcacgccactgcactccagcctaggctacagagccagaccctgtctctta

SEQ ID NO: 423478 - DNA, 1376 bp, Homo sapiens
ctttgtctgacttacatcctctcaaccctctcccaggccacgctgacgcttctcctggaccacctgcgcctcgtctcctccttccatgcctacaaccgcatgaccccacagaacttggccgtgtgcttcgggcctgtgctgctgccggcacgccaggcgcccacaaggcctcgtgcccgcagctccggcccaggccttgccagtgcagtggacttcaagcaccacatcgaggtgctgcactacctgctgcagtcttggccaggtgagttcatgcccagggcctgcaccaccaatctgagccagatccccgcctgccccgacaatctccagatgtcgcgccttacttgcgacccaaacgacagccacctctgcacctgccgctggcagaccccgaagtggtgactcggccccgcggtcgaggaggccccgaaagccccccgagcaaccgctacgccggcgactggagcgtttgcgggcgggacttcctgccctgtgggcgggatttcctgtccgggccagactacgaccacgtgacgggcagtgacagcgaggacgaggacgaggaggtcggcgagccgagggtcaccggtgacttcgaagacgacttcgatgcgcccttcaacccgcacctgaatctcaaagacttcgacgccctcatcctggatctggagagagagctctccaagcaaatcaacgtgtgcctctgagccagatgacggggtgggaccccggttagtaaggaccgggcgcccagtggctaaggcggtgccctggtgaccaaggagagccagacctgttgctcaggccgagctcctggttgccagcgagttaccacgggaccagtcgcgtgtatggctgagactcattcccagtttccagggcccggtatttggacactagttgccaagtctggggcctggggattttagggaccagcggttgtgaccatctttcctgagcaccaagggcttccccttttgttgccaaaaagtctggcctttccaatccccatctccttgccccccccttgccccccccccgaaaaaaattgagcacttaaacccctcccttttggagggggccccctgaagcgtcaggctgggggcagtctggtacggaacatatttattgcctccatgcatgtgtgtgtgtgtctgtgaggactggtgtgcgtggacacgtctgaagcaggcgtgtggggctctttcagggaccacagaggagggagcagtttgcagtgcccagccaccctgaaatccccaataatggtgcctcagtgggccccagagttccagtgggagagtacggttccctcctgtctccctcttcttttccgcacctccatctttgtggataataaataaatatgcacaggt

SEQ ID NO: 423479 - DNA, 2753 bp, Homo sapiens
cgcaccaagtccccgggccccgccaggcgcctctccataaagatgaagaagctgccggaactgcggcgccgcctgagcctgcgaggcccccgggctggcagggagcgcgagagggctgcccctgcgggctccgtcatcagccgctaccacctggacagcagcgtggggggccccgggccggcagcagggcctgggggcacccggagcccgagggccggttacctcagcgacggggactcaccggagcgcccagctgggcccccatcacccacctccttccggccctacgaggtgggtcccgcagcccgggcacccccggccgcactctggggccgcctcagcctgcacctgtacggtctcggggggctgcggccagcgccgggggccacccccagggacctctgctgcctactgcaagtggatggggaggccagggcccgaacagggccactgcgaggggggccggacttcctgcggctggaccacaccttccacctggagctggaggccgccaggctcctgcgcgccctggtgcttgcgtgggaccctggcgtgagaaggcaccggccctgtgcccagggcaccgtgctgctgcccacggtcttccgagggtgccaggcccaacagctggccgtgcgcctggagcctcaggggctgctgtatgccaagctgaccctgtcggagcagcaggaagcccctgccacagctgagccccgcgtctttgggctgcccctgccactgctggtggagcgggagcggccccccggccaggtgcccctcatcatccagaagtgcgttgggcagatcgagcgccgagggctgcgggtagtgggactgtaccgtctttgtggctcagcggcagtgaagaaagagcttcgggatgcctttgagcgggacagtgcagcggtctgcctatctgaggacctgtaccccgatatcaatgtcatcactggcatcctcaaggattatcttcgagagttgcccaccccactcatcacccagcccctgtataaggtggtactggaggccatggcccgggaccccccaaacagagttccccccaccactgagggcacccgagggctcctcagctgcctgccagatgtggaaagggccacgctgacgcttctcctggaccacctgcgcctcgtctcctccttccatgcctacaaccgcatgaccccacagaacttggccgtgtgcttcgggcctgtgctgctgccggcacgccaggcgcccacaaggcctcgtgcccgcagctccggcccaggccttgccagtgcagtggacttcaagcaccacatcgaggtgctgcactacctgctgcagtcttggccagatccccgcctgccccgacaatctccagatgtcgcgccttacttgcgacccaaacgacagccacctctgcacctgccgctggcagaccccgaagtggtgactcggccccgcggtcgaggaggccccgaaagccccccgagcaaccgctacgccggcgactggagcgtttgcgggcgggacttcctgccctgtgggcgggatttcctgtccgggccagactacgaccacgtgacgggcagtgacagcgaggacgaggacgaggaggtcggcgagccgagggtcaccggtgacttcgaagacgacttcgatgcgcccttcaacccgcacctgaatctcaaagacttcgacgccctcatcctggatctggagagagagctctccaagcaaatcaacgtgtgcctctgagccagatgacggggtgggaccccggttagtaaggaccgggcgcccagtggctaaggcggtgccctggtgaccaaggagagccagacctgttgctcaggccgagctcctggttgccagcgagttaccacgggaccagtcgcgtgtatggctgagactcattcccagtttccagggcccggtatttggacactagttgccaagtctggggcctggggattttagggaccagcggttgtgaccatctttcctgagcaccaagggcttccccttttgttgccaaaaaggtagttctcgcgcttgctaggctggcctctcttgcctccccttggccggggcaacaccagttactgtgagcatcaccctggtgtggtgagtcacctctagtcggccctcttgctgctgccaaccaaatcagtattagctttgagcactgcactgtttctccctcccttggacgacacaaagactagcatgaggcactctttgtggggggcagcccctatcctgggttccagcatggacacaggggtagcctggggcttatagagaaacagctggtttcccctaccctttcccggggaagaccccacgattggcctctagtcagcaaatggagataacagagtctggcctttccaatccccatctccttgccccccccttgccccccccccgaaaaaaattgagcacttaaacccctcccttttggagggggccccctgaagcgtcaggctgggggcagtctggtacggaacatatttattgcctccatgcatgtgtgtgtgtgtctgtgaggactggtgtgcgtggacacgtctgaagcaggcgtgtggggctctttcagggaccacagaggagggagcagtttgcagtgcccagccaccctgaaatccccaataatggtgcctcagtgggccccagagttccagtgggagagtacggttccctcctgtctccctcttcttttccgcacctccatctttgtggataataaataaatatgcacaggt

SEQ ID NO: 423480 - DNA, 3218 bp, Homo sapiens
  misc_feature (2761)..(2761): n is a, c, g, or t
cgcaccaagtccccgggccccgccaggcgcctctccataaagatgaagaagctgccggaactgcggcgccgcctgagcctgcgaggcccccgggctggcagggagcgcgagagggctgcccctgcgggctccgtcatcagccgctaccacctggacagcagcgtggggggccccgggccggcagcagggcctgggggcacccggagcccgagggccggttacctcagcgacggggactcaccggagcgcccagctgggcccccatcacccacctccttccggccctacgaggtgggtcccgcagcccgggcacccccggccgcactctggggccgcctcagcctgcacctgtacggtctcggggggctgcggccagcgccgggggccacccccagggacctctgctgcctactgcaagtggatggggaggccagggcccgaacagggccactgcgaggggggccggacttcctgcggctggaccacaccttccacctggagctggaggccgccaggctcctgcgcgccctggtgcttgcgtgggaccctggcgtgagaaggcaccggccctgtgcccagggcaccgtgctgctgcccacggtcttccgagggtgccaggcccaacagctggccgtgcgcctggagcctcaggggctgctgtatgccaagctgaccctgtcggagcagcaggaagcccctgccacagctgagccccgcgtctttgggctgcccctgccactgctggtggagcgggagcggccccccggccaggtgcccctcatcatccagaagtgcgttgggcagatcgagcgccgagggctgcgggtagtgggactgtaccgtctttgtggctcagcggcagtgaagaaagagcttcgggatgcctttgagcgggacagtgcagcggtctgcctatctgaggacctgtaccccgatatcaatgtcatcactggcatcctcaaggattatcttcgagagttgcccaccccactcatcacccagcccctgtataaggtggtactggaggccatggcccgggaccccccaaacagagttccccccaccactgagggcacccgagggctcctcagctgcctgccagatgtggaaagggccacgctgacgcttctcctggaccacctgcgcctcgtctcctccttccatgcctacaaccgcatgaccccacagaacttggccgtgtgcttcgggcctgtgctgctgccggcacgccaggcgcccacaaggcctcgtgcccgcagctccggcccaggccttgccagtgcagtggacttcaagcaccacatcgaggtgctgcactacctgctgcagtcttggccagatccccgcctgccccgacaatctccagatgtcgcgccttacttgcgacccaaacgacagccacctctgcacctgccgctggcagaccccgaagtggtgactcggccccgcggtcgaggaggccccgaaagccccccgagcaaccgctacgccggcgactggagcgtttgcgggcgggacttcctgccctgtgggcgggatttcctgtccgggccagactacgaccacgtgacgggcagtgacagcgaggacgaggacgaggaggtcggcgagccgagggtcaccggtgacttcgaagacgacttcgatgcgcccttcaacccgcacctgaatctcaaagacttcgacgccctcatcctggatctggagagagagctctccaagcaaatcaacgtgtgcctctgagccagatgacggggtgggaccccggttagtaaggaccgggcgcccagtggctaaggcggtgccctggtgaccaaggagagccagacctgttgctcaggccgagctcctggttgccagcgagttaccacgggaccagtcgcgtgtatggctgagactcattcccagtttccagggcccggtatttggacactagttgccaagtctggggcctggggattttagggaccagcggttgtgaccatctttcctgagcaccaagggcttccccttttgttgccaaaaaggtagttctcgcgcttgctaggctggcctctcttgcctccccttggccggggcaacaccagttactgtgagcatcaccctggtgtggtgagtcacctctagtcggccctcttgctgctgccaaccaaatcagtattagctttgagcactgcactgtttctccctcccttggacgacacaaagactagcatgaggcactctttgtggggggcagcccctatcctgggttccagcatggacacaggggtagcctggggcttatagagaaacagctggtttcccctaccctttcccggggaagaccccacgattggcctctagtcagcaaatggagataacagagtctggcctttccaatccccatctccttgccccccccttgccccccccccgaaaaaaattgagcacttaaacccctcccttttggagggggccccctgaagcgtcaggctgggggcagtctggtacggaacatatttattgcctccatgcatgtgtgtgtgtgtctgtgaggactggtgtgcgtggacacgtctgaagcaggcgtgtggggctctttcagggaccacagaggagggagcagtttgcagtgcccagccaccctgaaatccccaataatggtgcctcagtgggccccagagttccagtgggagagtacggttccctcctgtctccctcttcttttccgcacctccatctttgtggataataaataaatatgcacaggtaaaaaaantgaaaaaaaaaaaaaaaaaaaaaaaaaaaaaaaaaaaaaaaaaaaaaaaaaaaaaaaaaaaaaaaaaaaaaaaaaaaaaaaaaaaaaaagaaaaaaaaaaaaaaaaaaaaaaaagggggggggggggggcgacagaatatatcactagaggggggaaaaaaaaaaaacagcgcccaatgtaaaagaaagagaggaaaaaaaaaagagaaaaaaagaaaagaagaagagaggcgtaaaaaaaggcggggcggagggagtgggacgtggggggttgggggtgggggaacgcgggggggtgaggtgtgggggtacaccacaaaagaagggaggacgaagagaaaaagaaaacaagagagtgtatgagggatcacacgaaggagatcggagagagagagaatgaggtgaggagagattatcaggatattaacggggcaacaaggaagagagggcggagggg

SEQ ID NO: 423481 - DNA, 2207 bp, Homo sapiens
cgcaccaagtccccgggccccgccaggcgcctctccataaagatgaagaagctgccggaactgcggcgccgcctgagcctgcgaggcccccgggctggcagggagcgcgagagggctgcccctgcgggctccgtcatcagccgctaccacctggacagcagcgtggggggccccgggccggcagcagggcctgggggcacccggagcccgagggccggttacctcagcgacggggactcaccggagcgcccagctgggcccccatcacccacctccttccggccctacgaggtgggtcccgcagcccgggcacccccggccgcactctggggccgcctcagcctgcacctgtacggtctcggggggctgcggccagcgccgggggccacccccagggacctctgctgcctactgcaagtggatggggaggccagggcccgaacagggccactgcgaggggggccggacttcctgcggctggaccacaccttccacctggagctggaggccgccaggctcctgcgcgccctggtgcttgcgtgggaccctggcgtgagaaggcaccggccctgtgcccagggcaccgtgctgctgcccacggtcttccgagggtgccaggcccaacagctggccgtgcgcctggagcctcaggggctgctgtatgccaagctgaccctgtcggagcagcaggaagcccctgccacagctgagccccgcgtctttgggctgcccctgccactgctggtggagcgggagcggccccccggccaggtgcccctcatcatccagaagtgcgttgggcagatcgagcgccgagggctgcgggtagtgggactgtaccgtctttgtggctcagcggcagtgaagaaagagcttcgggatgcctttgagcgggacagtgcagcggtctgcctatctgaggacctgtaccccgatatcaatgtcatcactggcatcctcaaggattatcttcgagagttgcccaccccactcatcacccagcccctgtataaggtggtactggaggccatggcccgggaccccccaaacagagttccccccaccactgagggcacccgagggctcctcagctgcctgccagatgtggaaagggccacgctgacgcttctcctggaccacctgcgcctcgtctcctccttccatgcctacaaccgcatgaccccacagaacttggccgtgtgcttcgggcctgtgctgctgccggcacgccaggcgcccacaaggcctcgtgcccgcagctccggcccaggccttgccagtgcagtggacttcaagcaccacatcgaggtgctgcactacctgctgcagtcttggccagatccccgcctgccccgacaatctccagatgtcgcgccttacttgcgacccaaacgacagccacctctgcacctgccgctggcagaccccgaagtggtgactcggccccgcggtcgaggaggccccgaaagccccccgagcaaccgctacgccggcgactggagcgtttgcgggcgggacttcctgccctgtgggcgggatttcctgtccgggccagactacgaccacgtgacgggcagtgacagcgaggacgaggacgaggaggtcggcgagccgagggtcaccggtgacttcgaagacgacttcgatgcgcccttcaacccgcacctgaatctcaaagacttcgacgccctcatcctggatctggagagagagctctccaagcaaatcaacgtgtgcctctgagccagatgacggggtgggaccccggttagtaaggaccgggcgcccagtggctaaggcggtgccctggtgaccaaggagagccagacctgttgctcaggccgagctcctggttgccagcgagttaccacgggaccagtcgcgtgtatggctgagactcattcccagtttccagggcccggtatttggacactagttgccaagtctggggcctggggattttagggaccagcggttgtgaccatctttcctgagcaccaagggcttccccttttgttgccaaaaaggtagttctcgcgcttgctaggctggcctctcttgcctccccttggccggggcaacaccagttactgtgagcatcaccctggtgtggtgagtcacctctagtcggccctcttgctgctgccaaccaaatcagtattagctttgagcagtttgcagtgcccagccaccccgtcgggtggagc

SEQ ID NO: 423482 - DNA, 1847 bp, Homo sapiens
  misc_feature (1742)..(1742): n is a, c, g, or t
  misc_feature (1784)..(1784): n is a, c, g, or t
  misc_feature (1804)..(1804): n is a, c, g, or t
  misc_feature (1811)..(1811): n is a, c, g, or t
  misc_feature (1838)..(1838): n is a, c, g, or t
  misc_feature (1842)..(1842): n is a, c, g, or t
cgcaccaagtccccgggccccgccaggcgcctctccataaagatgaagaagctgccggaactgcggcgccgcctgagcctgcgaggcccccgggctggcagggagcgcgagagggctgcccctgcgggctccgtcatcagccgctaccacctggacagcagcgtggggggccccgggccggcagcagggcctgggggcacccggagcccgagggccggttacctcagcgacggggactcaccggagcgcccagctgggcccccatcacccacctccttccggccctacgaggtgggtcccgcagcccgggcacccccggccgcactctggggccgcctcagcctgcacctgtacggtctcggggggctgcggccagcgccgggggccacccccagggacctctgctgcctactgcaagtggatggggaggccagggcccgaacagggccactgcgaggggggccggacttcctgcggctggaccacaccttccacctggagctggaggccgccaggctcctgcgcgccctggtgcttgcgtgggaccctggcgtgagaaggcaccggccctgtgcccagggcaccgtgctgctgcccacggtcttccgagggtgccaggcccaacagctggccgtgcgcctggagcctcaggggctgctgtatgccaagctgaccctgtcggagcagcaggaagcccctgccacagctgagccccgcgtctttgggctgcccctgccactgctggtggagcgggagcggccccccggccaggtgcccctcatcatccagaagtgcgttgggcagatcgagcgccgagggctgcgggtagtgggactgtaccgtctttgtggctcagcggcagtgaagaaagagcttcgggatgcctttgagcgggacagtgcagcggtctgcctatctgaggacctgtaccccgatatcaatgtcatcactggcatcctcaaggattatcttcgagagttgcccaccccactcatcacccagcccctgtataaggtggtactggaggccatggcccgggaccccccaaacagagttccccccaccactgagggcacccgagggctcctcagctgcctgccagatgtggaaagggccacgctgacgcttctcctggaccacctgcgcctcgtctcctccttccatgcctacaaccgcatgaccccacagaacttggccgtgtgcttcgggcctgtgctgctgccggcacgccaggcgcccacaaggcctcgtgcccgcagctccggcccaggccttgccagtgcagtggacttcaagcaccacatcgaggtgctgcactacctgctgcagtcttggccagatccccgcctgccccgacaatctccagatgtcgcgccttacttgcgacccaaacgacagccacctctgcacctgccgctggcagaccccgaagtggtgactcggccccgcggtcgaggaggccccgaaagccccccgagcaaccgctacgccggcgactggagcgtttgcgggcgggacttcctgccctgtgggcgggatttcctgtccgggccagactacgaccacgtgacgggcagtgacagcgaggacgaggacgaggaggtcggcgagccgagggtcaccggtgacttcgaagacgacttcgatgcgcccttcaacccgcacctgaatctcaaagacttcgacgccctcatcctggatctggagagagagctctccaagcaaatcaacgtgtgcctccngaagccaagattgaaccgggggtggggaacccccggggttangtaaaggggacccgggccgncccaaantggggttaaaggggggggtgccccctngggntggga

SEQ ID NO: 423483 - DNA, 284 bp, Homo sapiens
tgctgggattacaggcatgatccaggcatgatccacagacctgcccctacccatctttgatgcagtcagaggccctgcctcttgacatgccaatcagaggcctagttgcgtaagcaaccagtcctagctctgccagtgaaaacctgaaagggtcgaaggccgctttccacaggccaatcaggagcctagttccctaagcagccaatcagaggtcggctgtcgcctctttctatgacctaccctgtctcccttcagaatccccgcctgccccgacaatctccaga

SEQ ID NO: 423484 - DNA, 2227 bp, Homo sapiens
  misc_feature (2215)..(2216): n is a, c, g, or t
  misc_feature (2226)..(2227): n is a, c, g, or t
cgcaccaagtccccgggccccgccaggcgcctctccataaagatgaagaagctgccggaactgcggcgccgcctgagcctgcgaggcccccgggctggcagggagcgcgagagggctgcccctgcgggctccgtcatcagccgctaccacctggacagcagcgtggggggccccgggccggcagcagggcctgggggcacccggagcccgagggccggttacctcagcgacggggactcaccggagcgcccagctgggcccccatcacccacctccttccggccctacgaggtgggtcccgcagcccgggcacccccggccgcactctggggccgcctcagcctgcacctgtacggtctcggggggctgcggccagcgccgggggccacccccagggacctctgctgcctactgcaagtggatggggaggccagggcccgaacagggccactgcgaggggggccggacttcctgcggctggaccacaccttccacctggagctggaggccgccaggctcctgcgcgccctggtgcttgcgtgggaccctggcgtgagaaggcaccggccctgtgcccagggcaccgtgctgctgcccacggtcttccgagggtgccaggcccaacagctggccgtgcgcctggagcctcaggggctgctgtatgccaagctgaccctgtcggagcagcaggaagcccctgccacagctgagccccgcgtctttgggctgcccctgccactgctggtggagcgggagcggccccccggccaggtgcccctcatcatccagaagtgcgttgggcagatcgagcgccgagggctgcgggtagtgggactgtaccgtctttgtggctcagcggcagtgaagaaagagcttcgggatgcctttgagcgggacagtgcagcggtctgcctatctgaggacctgtaccccgatatcaatgtcatcactggcatcctcaaggattatcttcgagagttgcccaccccactcatcacccagcccctgtataaggtggtactggaggccatggcccgggaccccccaaacagagttccccccaccactgagggcacccgagggctcctcagctgcctgccagatgtggaaagggccacgctgacgcttctcctggaccacctgcgcctcgtctcctccttccatgcctacaaccgcatgaccccacagaacttggccgtgtgcttcgggcctgtgctgctgccggcacgccaggcgcccacaaggcctcgtgcccgcagctccggcccaggccttgccagtgcagtggacttcaagcaccacatcgaggtgctgcactacctgctgcagtcttggccagatccccgcctgccccgacaatctccagatgtcgcgccttacttgcgacccaaacgacagccacctctgcacctgccgctggcagaccccgaagtggtgactcggccccgcggtcgaggaggccccgaaagccccccgagcaaccgctacgccggcgactggagcgtttgcgggcgggacttcctgccctgtgggcgggatttcctgtccgggccagactacgaccacgtgacgggcagtgacagcgaggacgaggacgaggaggtcggcgagccgagggtcaccggtgacttcgaagacgacttcgatgcgcccttcaacccgcacctgaatctcaaagacttcgacgccctcatcctggatctggagagagagctctccaagcaaatcaacgtgtgcctctgagccagatgacggggtgggaccccggttagtaaggaccgggcgcccagtggctaaggcggtgccctggtgaccaaggagagccagacctgttgctcaggccgagctcctggttgccagcgagttaccacgggaccagtcgcgtgtatggctgagactcattcccagtttccagggcccggtatttggacactagttgccaagtctggggcctggggattttagggaccagcggttgtgaccatctttcctgagcaccaagggcttccccttttgttgccaaaaaggtagttctcgcgcttgctaggctggcctctcttgcctccccttggccggggcaacaccagttactgtgagcatcaccctggtgtggtgagtcacctctagtcggccctcttgctgctgccaaccaaatcagtattagctttgagcactgcactgtttctccctcccttgggcgtacggggaggggatnntctagttcgnn

SEQ ID NO: 423485 - DNA, 1867 bp, Homo sapiens
cgcaccaagtccccgggccccgccaggcgcctctccataaagatgaagaagctgccggaactgcggcgccgcctgagcctgcgaggcccccgggctggcagggagcgcgagagggctgcccctgcgggctccgtcatcagccgctaccacctggacagcagcgtggggggccccgggccggcagcagggcctgggggcacccggagcccgagggccggttacctcagcgacggggactcaccggagcgcccagctgggcccccatcacccacctccttccggccctacgaggtgggtcccgcagcccgggcacccccggccgcactctggggccgcctcagcctgcacctgtacggtctcggggggctgcggccagcgccgggggccacccccagggacctctgctgcctactgcaagtggatggggaggccagggcccgaacagggccactgcgaggggggccggacttcctgcggctggaccacaccttccacctggagctggaggccgccaggctcctgcgcgccctggtgcttgcgtgggaccctggcgtgagaaggcaccggccctgtgcccagggcaccgtgctgctgcccacggtcttccgagggtgccaggcccaacagctggccgtgcgcctggagcctcaggggctgctgtatgccaagctgaccctgtcggagcagcaggaagcccctgccacagctgagccccgcgtctttgggctgcccctgccactgctggtggagcgggagcggccccccggccaggtgcccctcatcatccagaagtgcgttgggcagatcgagcgccgagggctgcgggtagtgggactgtaccgtctttgtggctcagcggcagtgaagaaagagcttcgggatgcctttgagcgggacagtgcagcggtctgcctatctgaggacctgtaccccgatatcaatgtcatcactggcatcctcaaggattatcttcgagagttgcccaccccactcatcacccagcccctgtataaggtggtactggaggccatggcccgggaccccccaaacagagttccccccaccactgagggcacccgagggctcctcagctgcctgccagatgtggaaagggccacgctgacgcttctcctggaccacctgcgcctcgtctcctccttccatgcctacaaccgcatgaccccacagaacttggccgtgtgcttcgggcctgtgctgctgccggcacgccaggcgcccacaaggcctcgtgcccgcagctccggcccaggccttgccagtgcagtggacttcaagcaccacatcgaggtgctgcactacctgctgcagtcttggccagatccccgcctgccccgacaatctccagatgtcgcgccttacttgcgacccaaacgacagccacctctgcacctgccgctggcagaccccgaagtggtgactcggccccgcggtcgaggaggccccgaaagccccccgagcaaccgctacgccggcgactggagcgtttgcgggcgggacttcctgccctgtgggcgggatttcctgtccgggccagactacgaccacgtgacgggcagtgacagcgaggacgaggacgaggaggtcggcgagccgagggtcaccggtgacttcgaagacgacttcgatgcgcccttcaacccgcacctgaatctcaaagacttcgacgccctcatcctggatctggagagagagctctccaagcaaatcaacgtgtgcctctgagccagatgacggggtgggaccccggttagtaaggaccgggcgcccagtggctaaggcggcgttggatgcagtcaccccgcggcgttggatgcagtcaccccgcggcgttggatgcagtcgggta

SEQ ID NO: 423486 - DNA, 1046 bp, Homo sapiens
  misc_feature (1)..(3): n is a, c, g, or t
nnnctgtagacagaggccaccagctcaaaaccagcacagatgttctgaactgaatggtgtggcctctttttgtgtaaattccttttgccgtaatggatgcagtggaataacaatgtttacaggtaccgatcccgatccctgctcaatgtagcatttttttggttttattttcttaataaaagcaggggtaggtttctttaaactgcacaaacatgcaaggattttttaaaaatggaaacttctctcatgttattcaactagagcacttcagtttacaaaacagcaagtccatctttatggaagccagcacaaggaactgtgtgcaaataatgaagacgcttgcttggatcctgtttcaaaattctagaccagggctaccttacacagaattggtcatgttactgccaggagatttctgtgtaacttcatttattggctacagttttggcatttgaagatgtggtactcagatggggttttgtccaccattgtcaagattgtaatcttaaaaatcataccagtcattgataatttagtttatcctgaggcagtcgacttgcagaggcacagtctacaaagcctaggatgttgccactcaatggtttacattttgggacatcttttaagttgtttgtagcactgcagttcaaagtgttaatatttagagggacttctagattttatacctaatgcagtagaaccttgaagtatatttaagcttttttgttaagcttgaacagttggcaagaataatgtgagttcctatctgaaatagaatggtacattaccacttttaagttttaaaaattgatagatgttcagatgtatctcaaactcagttttatttttattccaaatattgtgaatgagaagccattgtcctaaactttggccatttttgtgctataaacatgcatttttaagttataaggtgaatcaaacaatatgtaatacagtattaggatgtaatctttgcttttgtagtactgttaaaatagagaattatgttgtttgcaccgtcttaattaaaattcttgatttttact

SEQ ID NO: 423487 - DNA, 3470 bp, Homo sapiens
  misc_feature (1)..(3): n is a, c, g, or t
nnnctgtagacagaggccaccagctcaaaaccagcacagatgttctgaactgaatggtgtggcctctttttgtgtaaattccttttgccgtaatggatgcagtggaataacaatgtttacaggtaccgatcccgatccctgctcaatgtagcatttttttggttttattttcttaataaaagcaggggtaggtttctttaaactgcacaaacatgcaaggattttttaaaaatggaaacttctctcatgttattcaactagagcacttcagtttacaaaacagcaagtccatctttatggaagccagcacaaggaactgtgtgcaaataatgaagacgcttgcttggatcctgtttcaaaattctagaccagggctaccttacacagaattggtcatgttactgccaggagatttctgtgtaacttcatttattggctacagttttggcatttgaagatgtggtactcagatggggttttgtccaccattgtcaagattgtaatcttaaaaatcataccagtcattgataatttagtttatcctgaggcagtcgacttgcagaggcacagtctacaaagcctaggatgttgccactcaatggtttacattttgggacatcttttaagttgtttgtagcactgcagttcaaagtgttaatatttagagggacttctagattttatacctaatgcagtagaaccttgaagtatatttaagcttttttgttaagcttgaacagttggcaagaataatgtgagttcctatctgaaatagaatggtacattaccacttttaagttttaaaaattgatagatgttcagatgtatctcaaactcagttttatttttattccaaatattgtgaatgagaagccattgtcctaaactttggccatttttgtgctataaacatgcatttttaagttataaggtgaatcaaacaatatgtaatacagtattaggatgtaatctttgcttttgtagtactgttaaaatagagaattatgttgtttgcaccgtcttaattaaaattcttgatttttactagttgctttgcaaaaaacaaatgtttggctgcattgctaatatttgtaagtataagttgcttcaaggttgtgctgatgagtagataggatgtagtgatcttagtagtgattgaaagggagggtatttattatacaaactgtgaactgcaatgacatccttagttttggatgatgtgtattcttgtttttctttgcagcattttaatgaagattgctttgaagtgtttacgcagtagcacattagtataaaatttagtttagcacagtggacaaaaagtagttaaattaataacttaaaatcagtctctaatttatacatctgaagtatagcattcctgtatgcacacagtaaataatgggtagcctgggctctgtgttactttcttgtatttttatccaagttgtcagcttcttattgctgtgttgttgtgctaaactttgaaccttatttcttttattaaaaatcagtacactttctataatttagtaagatactggccataatcttccattgttataaccttaattttcactctgggtttacagtggctggtctgtataaataatttacacaaagatgactgaatgctaataccagttgcacttaaatgaacatgcccattctcagtagctgatgcagtaatatattcagtttatctatgcattgctggggtcttgatataagatggaaacagtgtttcttatctaaagttttgattatcagcaagttgaatggacactttagttatttaaataaagatttttgaccaaaatccagaaaatggtatgagagaaaaataaattccagctagtttaatagatttttaaatgtcaatctgattttagcctcttagagagtgctaactagctggtaatgtttacttttaattccttgttaaaatgaggcaataatttgcaagatttttgtatataagtgtaaattcttcatatctttttagatctaattcaatattttctgactacttctgccatgtataataccatttttgtgcatgcttgatgtgacattcataaattgtaccactatgactttatccatgtaaaatagctatttattgaattttcttttaaaagctggatttactgggttttttttttctctcagtttaaacatcttaacagagaatttgttactgtttattaaaagaattgcatttggaagcaagaaaacaaccggatttgcaatcatgtgaagaaacaataatgcctttattatcaagtgttaagcacaattcttataacaaactgtgataaattctttttgtttttttttcctttgccccattattttcttatgaacaaaccaaaaattcatggtgagcagttgcagtgttggctgatatatcttttatgtacagggaatttgaaaaggacagtggattcatttagaagtgtaactggtgctgtgattatagcaatacatttgttagttgtacttcatctttttcatgctagctttttaaatgtttagttttcctcttgtcatggtcagctgctgaatttacttgaaggatgtagaatactgtttaaaaaatactaaaatttgtacaattagatcaaagaattgtgcaatcatttcctttttaatttttaaaatgttgaggctcataaatatttgagaacatcagatctaatagagcatagtgatactatttaatttaaccaaagtctctagtgaatatttcaactttgaatgtaaactaacaaataaacctgaccaccaaggagattgtttgcccagagtttcaaagcacattgtctacaaatggaaattgaaataatttataaaatattgacgttactatgttttttaaaaagttcctaattttttcactaaatggaggaaactattagttttattgttaaatatggtagatattaatattcctcttagatgaccagtgattccaattgtcccagtttgaaataagtaccctgtgagtatgagataaattagtgacaatcagaacaagtttcagtatcagatgttcaagaggaagttgctattgcattgattttaatatttgtacataaacactgatttttttgagcattattttgtatttgttgtactttaatacctggtgtacagttccagaaataaaaatctgggaatctttttttcttggtttgtgtgaatatttgccaaaaatacagatattttatttaatgaatcttaagctacagcaaatagatagatattataccactgttaaattggttttagatgcagtaaataagatatatgatagatagtgaagttggtagattaaatattttccttaaatcctctataatttccatctataataaaagtccccctgtaatcccaacactttgagaggccgaggcgggcagatcatgaggtcaggagttcaagaccagcctgaccaacatggtgaa

SEQ ID NO: 423488 - DNA, 3417 bp, Homo sapiens
  misc_feature (1)..(3): n is a, c, g, or t
nnnctgtagacagaggccaccagctcaaaaccagcacagatgttctgaactgaatggtgtggcctctttttgtgtaaattccttttgccgtaatggatgcagtggaataacaatgtttacaggtaccgatcccgatccctgctcaatgtagcatttttttggttttattttcttaataaaagcaggggtaggtttctttaaactgcacaaacatgcaaggattttttaaaaatggaaacttctctcatgttattcaactagagcacttcagtttacaaaacagcaagtccatctttatggaagccagcacaaggaactgtgtgcaaataatgaagacgcttgcttggatcctgtttcaaaattctagaccagggctaccttacacagaattggtcatgttactgccaggagatttctgtgtaacttcatttattggctacagttttggcatttgaagatgtggtactcagatggggttttgtccaccattgtcaagattgtaatcttaaaaatcataccagtcattgataatttagtttatcctgaggcagtcgacttgcagaggcacagtctacaaagcctaggatgttgccactcaatggtttacattttgggacatcttttaagttgtttgtagcactgcagttcaaagtgttaatatttagagggacttctagattttatacctaatgcagtagaaccttgaagtatatttaagcttttttgttaagcttgaacagttggcaagaataatgtgagttcctatctgaaatagaatggtacattaccacttttaagttttaaaaattgatagatgttcagatgtatctcaaactcagttttatttttattccaaatattgtgaatgagaagccattgtcctaaactttggccatttttgtgctataaacatgcatttttaagttataaggtgaatcaaacaatatgtaatacagtattaggatgtaatctttgcttttgtagtactgttaaaatagagaattatgttgtttgcaccgtcttaattaaaattcttgatttttactagttgctttgcaaaaaacaaatgtttggctgcattgctaatatttgtaagtataagttgcttcaaggttgtgctgatgagtagataggatgtagtgatcttagtagtgattgaaagggagggtatttattatacaaactgtgaactgcaatgacatccttagttttggatgatgtgtattcttgtttttctttgcagcattttaatgaagattgctttgaagtgtttacgcagtagcacattagtataaaatttagtttagcacagtggacaaaaagtagttaaattaataacttaaaatcagtctctaatttatacatctgaagtatagcattcctgtatgcacacagtaaataatgggtagcctgggctctgtgttactttcttgtatttttatccaagttgtcagcttcttattgctgtgttgttgtgctaaactttgaaccttatttcttttattaaaaatcagtacactttctataatttagtaagatactggccataatcttccattgttataaccttaattttcactctgggtttacagtggctggtctgtataaataatttacacaaagatgactgaatgctaataccagttgcacttaaatgaacatgcccattctcagtagctgatgcagtaatatattcagtttatctatgcattgctggggtcttgatataagatggaaacagtgtttcttatctaaagttttgattatcagcaagttgaatggacactttagttatttaaataaagatttttgaccaaaatccagaaaatggtatgagagaaaaataaattccagctagtttaatagatttttaaatgtcaatctgattttagcctcttagagagtgctaactagctggtaatgtttacttttaattccttgttaaaatgaggcaataatttgcaagatttttgtatataagtgtaaattcttcatatctttttagatctaattcaatattttctgactacttctgccatgtataataccatttttgtgcatgcttgatgtgacattcataaattgtaccactatgactttatccatgtaaaatagctatttattgaattttcttttaaaagctggatttactgggttttttttttctctcagtttaaacatcttaacagagaatttgttactgtttattaaaagaattgcatttggaagcaagaaaacaaccggatttgcaatcatgtgaagaaacaataatgcctttattatcaagtgttaagcacaattcttataacaaactgtgataaattctttttgtttttttttcctttgccccattattttcttatgaacaaaccaaaaattcatggtgagcagttgcagtgttggctgatatatcttttatgtacagggaatttgaaaaggacagtggattcatttagaagtgtaactggtgctgtgattatagcaatacatttgttagttgtacttcatctttttcatgctagctttttaaatgtttagttttcctcttgtcatggtcagctgctgaatttacttgaaggatgtagaatactgtttaaaaaatactaaaatttgtacaattagatcaaagaattgtgcaatcatttcctttttaatttttgatactatttaatttaaccaaagtctctagtgaatatttcaactttgaatgtaaactaacaaataaacctgaccaccaaggagattgtttgcccagagtttcaaagcacattgtctacaaatggaaattgaaataatttataaaatattgacgttactatgttttttaaaaagttcctaattttttcactaaatggaggaaactattagttttattgttaaatatggtagatattaatattcctcttagatgaccagtgattccaattgtcccagtttgaaataagtaccctgtgagtatgagataaattagtgacaatcagaacaagtttcagtatcagatgttcaagaggaagttgctattgcattgattttaatatttgtacataaacactgatttttttgagcattattttgtatttgttgtactttaatacctggtgtacagttccagaaataaaaatctgggaatctttttttcttggtttgtgtgaatatttgccaaaaatacagatattttatttaatgaatcttaagctacagcaaatagatagatattataccactgttaaattggttttagatgcagtaaataagatatatgatagatagtgaagttggtagattaaatattttccttaaatcctctataatttccatctataataaaagtccccctgtaatcccaacactttgagaggccgaggcgggcagatcatgaggtcaggagttcaagaccagcctgaccaacatggtgaa

SEQ ID NO: 423489 - DNA, 3416 bp, Homo sapiens
  misc_feature (1)..(3): n is a, c, g, or t
nnnctgtagacagaggccaccagctcaaaaccagcacagatgttctgaactgaatggtgtggcctctttttgtgtaaattccttttgccgtaatggatgcagtggaataacaatgtttacaggtaccgatcccgatccctgctcaatgtagcatttttttggttttattttcttaataaaagcaggggtaggtttctttaaactgcacaaacatgcaaggattttttaaaaatggaaacttctctcatgttattcaactagagcacttcagtttacaaaacagcaagtccatctttatggaagccagcacaaggaactgtgtgcaaataatgaagacgcttgcttggatcctgtttcaaaattctagaccagggctaccttacacagaattggtcatgttactgccaggagatttctgtgtaacttcatttattggctacagttttggcatttgaagatgtggtactcagatggggttttgtccaccattgtcaagattgtaatcttaaaaatcataccagtcattgataatttagtttatcctgaggcagtcgacttgcagaggcacagtctacaaagcctaggatgttgccactcaatggtttacattttgggacatcttttaagttgtttgtagcactgcagttcaaagtgttaatatttagagggacttctagattttatacctaatgcagtagaaccttgaagtatatttaagcttttttgttaagcttgaacagttggcaagaataatgtgagttcctatctgaaatagaatggtacattaccacttttaagttttaaaaattgatagatgttcagatgtatctcaaactcagttttatttttattccaaatattgtgaatgagaagccattgtcctaaactttggccatttttgtgctataaacatgcatttttaagttataaggtgaatcaaacaatatgtaatacagtattaggatgtaatctttgcttttgtagtactgttaaaatagagaattatgttgtttgcaccgtcttaattaaaattcttgatttttactagttgctttgcaaaaaacaaatgtttggctgcattgctaatatttgtaagtataagttgcttcaaggttgtgctgatgagtagataggatgtagtgatcttagtagtgattgaaagggagggtatttattatacaaactgtgaactgcaatgacatccttagttttggatgatgtgtattcttgtttttctttgcagcattttaatgaagattgctttgaagtgtttacgcagtagcacattagtataaaatttagtttagcacagtggacaaaaagtagttaaattaataacttaaaatcagtctctaatttatacatctgaagtatagcattcctgtatgcacacagtaaataatgggtagcctgggctctgtgttactttcttgtatttttatccaagttgtcagcttcttattgctgtgttgttgtgctaaactttgaaccttatttcttttattaaaaatcagtacactttctataatttagtaagatactggccataatcttccattgttataaccttaattttcactctgggtttacagtggctggtctgtataaataatttacacaaagatgactgaatgctaataccagttgcactatgcattgctggggtcttgatataagatggaaacagtgtttcttatctaaagttttgattatcagcaagttgaatggacactttagttatttaaataaagatttttgaccaaaatccagaaaatggtatgagagaaaaataaattccagctagtttaatagatttttaaatgtcaatctgattttagcctcttagagagtgctaactagctggtaatgtttacttttaattccttgttaaaatgaggcaataatttgcaagatttttgtatataagtgtaaattcttcatatctttttagatctaattcaatattttctgactacttctgccatgtataataccatttttgtgcatgcttgatgtgacattcataaattgtaccactatgactttatccatgtaaaatagctatttattgaattttcttttaaaagctggatttactgggttttttttttctctcagtttaaacatcttaacagagaatttgttactgtttattaaaagaattgcatttggaagcaagaaaacaaccggatttgcaatcatgtgaagaaacaataatgcctttattatcaagtgttaagcacaattcttataacaaactgtgataaattctttttgtttttttttcctttgccccattattttcttatgaacaaaccaaaaattcatggtgagcagttgcagtgttggctgatatatcttttatgtacagggaatttgaaaaggacagtggattcatttagaagtgtaactggtgctgtgattatagcaatacatttgttagttgtacttcatctttttcatgctagctttttaaatgtttagttttcctcttgtcatggtcagctgctgaatttacttgaaggatgtagaatactgtttaaaaaatactaaaatttgtacaattagatcaaagaattgtgcaatcatttcctttttaatttttaaaatgttgaggctcataaatatttgagaacatcagatctaatagagcatagtgatactatttaatttaaccaaagtctctagtgaatatttcaactttgaatgtaaactaacaaataaacctgaccaccaaggagattgtttgcccagagtttcaaagcacattgtctacaaatggaaattgaaataatttataaaatattgacgttactatgttttttaaaaagttcctaattttttcactaaatggaggaaactattagttttattgttaaatatggtagatattaatattcctcttagatgaccagtgattccaattgtcccagtttgaaataagtaccctgtgagtatgagataaattagtgacaatcagaacaagtttcagtatcagatgttcaagaggaagttgctattgcattgattttaatatttgtacataaacactgatttttttgagcattattttgtatttgttgtactttaatacctggtgtacagttccagaaataaaaatctgggaatctttttttcttggtttgtgtgaatatttgccaaaaatacagatattttatttaatgaatcttaagctacagcaaatagatagatattataccactgttaaattggttttagatgcagtaaataagatatatgatagatagtgaagttggtagattaaatattttccttaaatcctctataatttccatctataataaaagtccccctgtaatcccaacactttgagaggccgaggcgggcagatcatgaggtcaggagttcaagaccagcctgaccaacatggtgaa

SEQ ID NO: 423490 - DNA, 3416 bp, Homo sapiens
  misc_feature (1)..(3): n is a, c, g, or t
nnnctgtagacagaggccaccagctcaaaaccagcacagatgttctgaactgaatggtgtggcctctttttgtgtaaattccttttgccgtaatggatgcagtggaataacaatgtttacaggtaccgatcccgatccctgctcaatgtagcatttttttggttttattttcttaataaaagcaggggtaggtttctttaaactgcacaaacatgcaaggattttttaaaaatggaaacttctctcatgttattcaactagagcacttcagtttacaaaacagcaagtccatctttatggaagccagcacaaggaactgtgtgcaaataatgaagacgcttgcttggatcctgtttcaaaattctagaccagggctaccttacacagaattggtcatgttactgccaggagatttctgtgtaacttcatttattggctacagttttggcatttgaagatgtggtactcagatggggttttgtccaccattgtcaagattgtaatcttaaaaatcataccagtcattgataatttagtttatcctgaggcagtcgacttgcagaggcacagtctacaaagcctaggatgttgccactcaatggtttacattttgggacatcttttaagttgtttgtagcactgcagttcaaagtgttaatatttagagggacttctagattttatacctaatgcagtagaaccttgaagtatatttaagcttttttgttaagcttgaacagttggcaagaataatgtgagttcctatctgaaatagaatggtacattaccacttttaagttttaaaaattgatagatgttcagatgtatctcaaactcagttttatttttattccaaatattgtgaatgagaagccattgtcctaaactttggccatttttgtgctataaacatgcatttttaagttataaggtgaatcaaacaatatgtaatacagtattaggatgtaatctttgcttttgtagtactgttaaaatagagaattatgttgtttgcaccgtcttaattaaaattcttgatttttactagttgctttgcaaaaaacaaatgtttggctgcattgctaatatttgtaagtataagttgcttcaaggttgtgctgatgagtagataggatgtagtgatcttagtagtgattgaaagggagggtatttattatacaaactgtgaactgcaatgacatccttagttttggatgatgtgtattcttgtttttctttgcagcattttaatgaagattgctttgaagtgtttacgcagtagcacattagtataaaatttagtttagcacagtggacaaaaagtagttaaattaataacttaaaatcagtctctaatttatacatctgaagtatagcattcctgtatgcacacagtaaataatgggtagcctgggctctgtgttactttcttgtatttttatccaagttgtcagcttcttattgctgtgttgttgtgctaaactttgaaccttatttcttttattattataaccttaattttcactctgggtttacagtggctggtctgtataaataatttacacaaagatgactgaatgctaataccagttgcacttaaatgaacatgcccattctcagtagctgatgcagtaatatattcagtttatctatgcattgctggggtcttgatataagatggaaacagtgtttcttatctaaagttttgattatcagcaagttgaatggacactttagttatttaaataaagatttttgaccaaaatccagaaaatggtatgagagaaaaataaattccagctagtttaatagatttttaaatgtcaatctgattttagcctcttagagagtgctaactagctggtaatgtttacttttaattccttgttaaaatgaggcaataatttgcaagatttttgtatataagtgtaaattcttcatatctttttagatctaattcaatattttctgactacttctgccatgtataataccatttttgtgcatgcttgatgtgacattcataaattgtaccactatgactttatccatgtaaaatagctatttattgaattttcttttaaaagctggatttactgggttttttttttctctcagtttaaacatcttaacagagaatttgttactgtttattaaaagaattgcatttggaagcaagaaaacaaccggatttgcaatcatgtgaagaaacaataatgcctttattatcaagtgttaagcacaattcttataacaaactgtgataaattctttttgtttttttttcctttgccccattattttcttatgaacaaaccaaaaattcatggtgagcagttgcagtgttggctgatatatcttttatgtacagggaatttgaaaaggacagtggattcatttagaagtgtaactggtgctgtgattatagcaatacatttgttagttgtacttcatctttttcatgctagctttttaaatgtttagttttcctcttgtcatggtcagctgctgaatttacttgaaggatgtagaatactgtttaaaaaatactaaaatttgtacaattagatcaaagaattgtgcaatcatttcctttttaatttttaaaatgttgaggctcataaatatttgagaacatcagatctaatagagcatagtgatactatttaatttaaccaaagtctctagtgaatatttcaactttgaatgtaaactaacaaataaacctgaccaccaaggagattgtttgcccagagtttcaaagcacattgtctacaaatggaaattgaaataatttataaaatattgacgttactatgttttttaaaaagttcctaattttttcactaaatggaggaaactattagttttattgttaaatatggtagatattaatattcctcttagatgaccagtgattccaattgtcccagtttgaaataagtaccctgtgagtatgagataaattagtgacaatcagaacaagtttcagtatcagatgttcaagaggaagttgctattgcattgattttaatatttgtacataaacactgatttttttgagcattattttgtatttgttgtactttaatacctggtgtacagttccagaaataaaaatctgggaatctttttttcttggtttgtgtgaatatttgccaaaaatacagatattttatttaatgaatcttaagctacagcaaatagatagatattataccactgttaaattggttttagatgcagtaaataagatatatgatagatagtgaagttggtagattaaatattttccttaaatcctctataatttccatctataataaaagtccccctgtaatcccaacactttgagaggccgaggcgggcagatcatgaggtcaggagttcaagaccagcctgaccaacatggtgaa

SEQ ID NO: 423491 - DNA, 883 bp, Homo sapiens
  misc_feature (810)..(810): n is a, c, g, or t
  misc_feature (820)..(820): n is a, c, g, or t
  misc_feature (860)..(860): n is a, c, g, or t
ggttcagctttgttcttactttgtttgtgttacactggtatccagtcatccattggcacagagacacagtttctactttgatacaatctgtgtcagcctggcagttaatttatttagcagcatcttaaatttttttgtttttgcataaaatccagctcctgcaggatatttatcagcatctttgcaagagaggatgaattcaaaataaagtacaagagaagaaacattcagtgatcctcatggaacacctttcctgaagagatgatgatggggccatttgacatgggacacagcaggtgctggaagaagcacatatttttagtgacaaagactgtgactatgttgcctcctggttataaagcaaagccaaactggagagaccagtgccagagcctttattactaaaagataattgcctttgatgagttaaggacagattttaagagccccatagaccagtgcaatcctgttcatgcgagggaacggttgaggaacatcgagcgcatctgcttccttctgcgaaagctggtgctgccagaatactccatccatagcctcttctgcattatgttcctgtgtgcgcaagagtggctcacgctggggctgaatgtccctctacttttctatcacttctggaggtatttccactgtccagcagatagctcagaactagcctacgacccaccggtggtcatgaatgccgacactttgagttactgtcagaaggaggcctggtgtaagctggccttctatctcctctccttcttctactacctttactgcatgatcttacacttttagtggaggctnctttaacggnaaaggacccatggcaccatcattcaggaggacttgagganggggggagaggggccttgaggac

SEQ ID NO: 423492 - DNA, 525 bp, Homo sapiens
gcctgtgggattcacaatttacacaggcctgagtgagaatgcaggtgcgctgaaggagcaggcaatagtgaagagtcaaggtttgggaggggaaccagagaccccagacttcagaactgcagcttttggggtcaacacaacatcccagaacatcaagacaccaagacatatcagctaggaccctgcagtaggacatcggtgtccagatgagaccagaagcaacccagtagaagccaggggacagtgtgtggaccacagaattcatgcttgatgccatcaagggcctttgcctcagacatgcatacggcaggagtgtgagatctatggagtgggctcagctcatggagcaaggaggacggcaggggctccaatgatgatgtctgcgtaagaattcccatttaagatctttccaagcacaagagtcatggcccaatggcagagtgtcctatgcccacgaataaatcaaggatgaagaagacatttttggaaccagcatagtttctggtaggatctttgccactactt

SEQ ID NO: 423493 - DNA, 1836 bp, Homo sapiens
ggttcagctttgttcttactttgtttgtgttacactggtatccagtcatccattggcacagagacacagtttctactttgatacaatctgtgtcagcctggcagttaatttatttagcagcatcttaaatttttttgtttttgcataaaatccagctcctgcaggatatttatcagcatctttgcaagagaggatgaattcaaaataaagtacaagagaagaaacattcagataattgcctttgatgagttaaggacagattttaagagccccatagaccagtgcaatcctgttcatgcgagggaacggttgaggaacatcgagcgcatctgcttccttctgcgaaagctggtgctgccagaatactccatccatagcctcttctgcattatgttcctgtgtgcgcaagagtggctcacgctggggctgaatgtccctctacttttctatcacttctggaggtatttccactgtccagcagatagctcagaactagcctacgacccaccggtggtcatgaatgccgacactttgagttactgtcagaaggaggcctggtgtaagctggccttctatctcctctccttcttctactacctttactgcatgatctacactttagtgagctcttaacgcaaagaccatgcacatcatcagagactgagatgggagaggcctgagacggagaggtgcatttctgctggtgactggaggagggaccagaatgaggatacgtgagaaatagacccggcaggcagtcagactgaatgggagctggaatcacgcagcagctgggagccgagttaaccctgcgtgtctgtgtcaccctgtttgtcaatctttggcattcgaattccacacacggggtcctagagcccttctgagcatcagtggtgtgggggagtaggtgacgaaacactagacctctcctgagagagaattgctgcttcctgaatccacttcattgaacagcaccttgcaagttcaaatgagttcctgggagcggaggctggaaggccacaaggtgcttgctaaggaacagaatgacccagagtcaaggccaagtctgcagggacctgttgaaagcctcgagaatgtcttggctgcccaagactcttgttgcctttcttccaagccatggccatgccctttttctcaaatgggaggggctggagggtgtgtgggatttgtcttcagctgcaaccagccttgagcctgctgggctattttcagctgaggaggggtgaatataggaaaaatgcatttttgaaacgtttgcaacatgatcaaggtgttagttctccaccacacaagttgtattcttcttttgccacctcaaaccatcacagagtctttaaatgcaaatcaattggtcaatgctagtcaaagctatgttcttacaaaaaccccagacagctcagagctcagaaaatcctgtggagtggctgctctgtaccgtgggcatccggcagccaggaagtgagacaacataattataactttgttttatgatgctgcatcatttgtactgtttaggtcgacgtgaggacatcatcttatttagaattttccgtttggcattctcttttgggtgggagttatgctgggggttgtaaataatgacaaggctgagatttttatgatgtttaaattgggcacaatgattttgaccttattccccaaacttcttttcttttctactgtttaacatacacaggctatttatacacgtccccagctcccatctgaaacctgtgactcaggtttatgaatggtgtttgtgtagcaacacattgtgtgctatgtttattaaaatgcagcgacaaaaaaaagtgt

SEQ ID NO: 423494 - DNA, 2268 bp, Homo sapiens
ggttcagctttgttcttactttgtttgtgttacactggtatccagtcatccattggcacagagacacagtttctactttgatacaatctgtgtcagcctggcagttaatttatttagcagcatcttaaatttttttgtttttgcataaaatccagctcctgcaggatatttatcagcatctttgcaagagaggatgaattcaaaataaagtacaagagaagaaacattcagtgatcctcatggaacacctttcctgaagagatgatgatggggccatttgacatgggacacagcaggtgctggaagaagcacatatttttagtgacaaagactgtgactatgttgcctcctggttataaagcaaagccaaactggagagaccagtgccagagcctttattactaaaagtagaagttgatacacatttgaagttgcccatcccactaccaccaaatgatgtggaagagaatgagtcccctgtgacctagtgacgagaatgaagtaaatcctgtctcaaaagaagaaaatccacttccaagggacaaggtctcactctgtcgcccaagctggagcacagtggcacaataatagttcactgcagccttgaagtcctgggctcaagtgattctcctgcctcagcctcttgagtagctaggactacagataattgcctttgatgagttaaggacagattttaagagccccatagaccagtgcaatcctgttcatgcgagggaacggttgaggaacatcgagcgcatctgcttccttctgcgaaagctggtgctgccagaatactccatccatagcctcttctgcattatgttcctgtgtgcgcaagagtggctcacgctggggctgaatgtccctctacttttctatcacttctggaggtatttccactgtccagcagatagctcagaactagcctacgacccaccggtggtcatgaatgccgacactttgagttactgtcagaaggaggcctggtgtaagctggccttctatctcctctccttcttctactacctttactgcatgatctacactttagtgagctcttaacgcaaagaccatgcacatcatcagagactgagatgggagaggcctgagacggagaggtgcatttctgctggtgactggaggagggaccagaatgaggatacgtgagaaatagacccggcaggcagtcagactgaatgggagctggaatcacgcagcagctgggagccgagttaaccctgcgtgtctgtgtcaccctgtttgtcaatctttggcattcgaattccacacacggggtcctagagcccttctgagcatcagtggtgtgggggagtaggtgacgaaacactagacctctcctgagagagaattgctgcttcctgaatccacttcattgaacagcaccttgcaagttcaaatgagttcctgggagcggaggctggaaggccacaaggtgcttgctaaggaacagaatgacccagagtcaaggccaagtctgcagggacctgttgaaagcctcgagaatgtcttggctgcccaagactcttgttgcctttcttccaagccatggccatgccctttttctcaaatgggaggggctggagggtgtgtgggatttgtcttcagctgcaaccagccttgagcctgctgggctattttcagctgaggaggggtgaatataggaaaaatgcatttttgaaacgtttgcaacatgatcaaggtgttagttctccaccacacaagttgtattcttcttttgccacctcaaaccatcacagagtctttaaatgcaaatcaattggtcaatgctagtcaaagctatgttcttacaaaaaccccagacagctcagagctcagaaaatcctgtggagtggctgctctgtaccgtgggcatccggcagccaggaagtgagacaacataattataactttgttttatgatgctgcatcatttgtactgtttaggtcgacgtgaggacatcatcttatttagaattttccgtttggcattctcttttgggtgggagttatgctgggggttgtaaataatgacaaggctgagatttttatgatgtttaaattgggcacaatgattttgaccttattccccaaacttcttttcttttctactgtttaacatacacaggctatttatacacgtccccagctcccatctgaaacctgtgactcaggtttatgaatggtgtttgtgtagcaacacattgtgtgctatgtttattaaaatgcagcgacaaaaaaaagtgt

SEQ ID NO: 423495 - DNA, 1271 bp, Homo sapiens
ggttcagctttgttcttactttgtttgtgttacactggtatccagtcatccattggcacagagacacagtttctactttgatacaatctgtgtcagcctggcagttaatttatttagcagcatcttaaatttttttgtttttgcataaaatccagctcctgcaggatatttatcagcatctttgcaagagaggatgaattcaaaataaagtacaagagaagaaacattcagataattgcctttgatgagttaaggacagattttaagagccccatagaccagtgcaatcctgttcatgcgagggaacggttgaggaacatcgagcgcatctgcttccttctgcgaaagctggtgctgccagaatactccatccatagcctcttctgcattatgttcctgtgtgcgcaagagtggctcacgctggggctgaatgtccctctacttttctatcacttctggaggtatttccactgtccagcagatagctcagaactagcctacgacccaccggtggtcatgaatgccgacactttgagttactgtcagaaggaggcctggtgtaagctggccttctatctcctctccttcttctactacctttactgcatgatctacactttagtgagctcttaacgcaaagaccatgcacatcatcagagactgagatgggagaggcctgagacggagaggtgcatttctgctggtgactggaggagggaccagaatgaggatacgtgagaaatagacccggcaggcagtcagactgaatgggagctggaatcacgcagcagctgggagccgagttaaccctgcgtgtctgtgtcaccctgtttgtcaatctttggcattcgaattccacacacggggtcctagagcccttctgagcatcagtggtgtgggggagtaggtgacgaaacactagacctctcctgagagagaattgctgcttcctgaatccacttcattgaacagcaccttgcaagttcaaatgagttcctgggagcggaggctggaaggccacaaggtgcttgctaaggaacagaatgacccagagtcaaggccaagtctgcagggacctgttgaaagcctcgagaatgtcttggctgcccaagactcttgttgcctttcttccaagccatggccatgccctttttctcaaatgggaggggctggagggttaaggctcacggagggttaaggctcccggagggttaaggctcccggagtattaaggcgcccggagggttaaggctcctaaggatcctctagag

SEQ ID NO: 423496 - DNA, 2019 bp, Homo sapiens
gatagatgagctgtatgagtcaggagttctgctctccaggtctgaggctgttcattgcctgggtttgtccagcgggcctgaagccatggagagcataatatttagaggtggcgaacccgacaccaccctgcttgcattctttgctccaggccttctgacctagttgtccttttcctgtaccccatgcttgctccctgagccctacgcttgctgttctccagattgaggctttctcctcttgcttcatactcccctccctcagcccactatgcactatgtcaggccaactggtcttactctgcaggagagtctgagattcactgttgcttcctgtggggaggcttttctgagcccccaggcctggtgctgtgtgctcccgtggcagcccctgcttctcctgtacaccacatattgccaacttgcttctgactttcccctactgagctacattctccatgagttgcctcctggttataaagcaaagccaaactggagagaccagtgccagagcctttattactaaaaggcacatgcaaagtgctgtaagatttcacaggatggagagaacatctgtggcagtggacagagtcgtgagtgaccacagaaggctttctggaggcaggacttgagggcctttgcctcagacatgcatacggcaggagtgtgagatctatggagtgggctcagctcatggagcaaggaggacggcaggggctccaatgatgatgtctgcccattttactgagaagcatgacatctatcaacttcccagatccctgcgagaatggattgaggagtctgagctctggaaatcaaagtggctaagcgagcaccgttattgctgttaagaaaacctgcaatgcgcgagttgaaactttctaagtttggatctgcttttgtctgacctctgcctggatagtaaggcagctgagtgattcacaggcacagaaatgcaccacgttgctattcccagaccctgccacaaaagactgttgaattcccaatgtctccatgctcacttcctgtcctcactgtgactatgaggcactttgaagatttaacacattatagaaacacacagcatcatgtttataataagtctacattctgaatcaaaataatggtttagtcttctcagatgagagggaatatctggggctaaatgagggtaagtcacgtacttttctatgtgcaggcaaaactgattttgttctgagtgagctgcagcctgcagcctcttttcaaagctgactcctagggggtttggccagggctgctttttgcatgaattgttgacattcaaacacctttatctctgatgctgctctacagcttaatgtgatatttctgtccaaactcaacttttgatgagaagaaaagatttttaatccaaaatatgcacacaactccccagccccagggaaaggacttctttgtcttagtgagagcacttctttgagtgctctttgggtggctctgtagctcacttgcagcatgggattgagaaaggaaaagtggagcccagggcaggcagggggttttccagctcctctaaagaggttgcttaccagtgggaccttactgttttgcttggaagtttgagagttaccagttcatcaggatatccacttttttttttttgagatggagtcttgctctgtcacccaggctggagtgcagtggcacaatctcagctcactgcaacctctgcctctggggttcaagtaattctcctgcctcagcctcccctgtagatgggattacaggcatgagccgccaggcctggctaatttttgtaattttagtagatatggggtttcactatgttggccaggctggtctcaaactcctgacctcatgatccacccacctcagcctcccaaagtggtaggattacagacgcgagccatcacaccagctgatatccacttttaaatgccagtgctgtacttggcataaagtagaccatgaataaatgtttgttgaataaatgaatgaatgattaaagcccaaattcca

SEQ ID NO: 423497 - DNA, 1641 bp, Homo sapiens
gatagatgagctgtatgagtcaggagttctgctctccaggtctgaggctgttcattgcctgggtttgtccagcgggcctgaagccatggagagcataatatttagaggtggcgaacccgacaccaccctgcttgcattctttgctccaggccttctgacctagttgtccttttcctgtaccccatgcttgctccctgagccctacgcttgctgttctccagattgaggctttctcctcttgcttcatactcccctccctcagcccactatgcactatgtcaggccaactggtcttactctgcaggagagtctgagattcactgttgcttcctgtggggaggcttttctgagcccccaggcctggtgctgtgtgctcccgtggcagcccctgcttctcctgtacaccacatattgccaacttgcttctgactttcccctactgagctacattctccatgagttgcctcctggttataaagcaaagccaaactggagagaccagtgccagagcctttattactaaaaggcacatgcaaagtgctgtaagatttcacaggatggagagaacatctgtggcagtggacagagtcgtgagtgaccacagaaggctttctggaggcaggacttgagggcctttgcctcagacatgcatacggcaggagtgtgagatctatggagtgggctcagctcatggagcaaggaggacggcaggggctccaatgatgatgtctgcccattttactgagaagcatgacatctatcaacttcccagatccctgcgagaatggattgaggagtctgagctctggaaatcaaagtggctaagcgagcaccgttattgctgttaagaaaacctgcaatgcgcgagttgaaactttctaagtttggatctgcttttgtctgacctctgcctggatagtaaggcagctgagtgattcacaggcacagaaatgcaccacgttgctattcccagaccctgccacaaaagactgttgaattcccaatgtctccatgctcacttcctgtcctcactgtgactatgaggcactttgaagatttaacacattatagaaacacacagcatcatgtttataataagtctacattctgaatcaaaataatggtttagtcttctcagatgagagggaatatctggggctaaatgagggagggatctccccaacctttctgtcttcgagctggccatgaaggaattctctgatctaccttgtctgactgtggattatgagacctccatttcagaaggggtcccaaaccctggaggaaggaatgttgctcagagagatcaagaagaatcttaacagacaggcctcgctaggtttccctgctcagtctattaatattaaatcatcctctttggtccaatcacatttctacatggttgtccatgtttcagtcatgcctacccaaagaagtatttataaaaggtccaagagtatggggtcggagggtacagaaagcttccagacagctcagcttccaaacagacttgtggagggtcctagagggtgatgtgtccatggagggcatggaagctctccatcccttcccccataccttccctgtgcatctcttcatctgtatcatttgtcatatcctttataataaactggtaagtat

SEQ ID NO: 423498 - DNA, 1428 bp, Homo sapiens
gcttctcaggctttggaacctgctgtgggagtaaaggctggccttcaaagtttctgttcttaagtctggaggtgattagcattaagccatgggccaagctactaccttcttcctgaccccctgtttttttttttttttggagccattttactgagaagcatgacatctatcaacttcccagatccctgcgagaatggattgaggagtctgagctctggaaatcaaagtggctaagcgagcaccgttattgctgttaagaaaacctgcaatgcgcgagttgaaactttctaagtttggatctgcttttgtctgacctctgcctggatagtaaggcagctgagtgattcacaggcacagaaatgcaccacgttgctattcccagaccctgccacaaaagactgttgaattcccaatgtctccatgctcacttcctgtcctcactgtgactatgaggcactttgaagatttaacacattatagaaacacacagcatcatgtttataataagtctacattctgaatcaaaataatggtttagtcttctcagatgagagggaatatctggggctaaatgagggtaagtcacgtacttttctatgtgcaggcaaaactgattttgttctgagtgagctgcagcctgcagcctcttttcaaagctgactcctagggggtttggccagggctgctttttgcatgaattgttgacattcaaacacctttatctctgatgctgctctacagcttaatgtgatatttctgtccaaactcaacttttgatgagaagaaaagatttttaatccaaaatatgcacacaactccccagccccagggaaaggacttctttgtcttagtgagagcacttctttgagtgctctttgggtggctctgtagctcacttgcagcatgggattgagaaaggaaaagtggagcccagggcaggcagggggttttccagctcctctaaagaggttgcttaccagtgggaccttactgttttgcttggaagtttgagagttaccagttcatcaggatatccacttttttttttttgagatggagtcttgctctgtcacccaggctggagtgcagtggcacaatctcagctcactgcaacctctgcctctggggttcaagtaattctcctgcctcagcctcccctgtagatgggattacaggcatgagccgccaggcctggctaatttttgtaattttagtagatatggggtttcactatgttggccaggctggtctcaaactcctgacctcatgatccacccacctcagcctcccaaagtggtaggattacagacgcgagccatcacaccagctgatatccacttttaaatgccagtgctgtacttggcataaagtagaccatgaataaatgtttgttgaataaatgaatgaatgattaaagcccaaattcca

SEQ ID NO: 423499 - DNA, 1245 bp, Homo sapiens
  misc_feature (1172)..(1172): n is a, c, g, or t
  misc_feature (1182)..(1182): n is a, c, g, or t
  misc_feature (1222)..(1222): n is a, c, g, or t
gcggaggccggctggccggagtcacggttggggacgggcgcgcctcggagcgcacggctgcgctggaagccgcgtctggggcgcaggaccaacgggacctacctcctcccggctacctaaagactccttctctcgggaaagagcgctgcccggctctgggatttgggaggagctcggaggccgctcgggcacctcgctggacactatccgtttgcgccccggtggcgcgggagggtccggagcggagcgctcgtctctcctcagcggtttagtggagaaaagcagagagctcttcctggggcgaatgggacctcctccctcggtcctccgtggagtcgtcgcatcgcttgtcgtgttggtctcgaggggctcacagcttggcactaatttgcaggtgttcgctgctgatttggtttcttcttcgatttgcggacggttccctccagcgactctcgacacacgttttcctgtcttcgccggagggccgggtctggggtcgccggagcctgcgggaatccagcgcttattcgctgaccctcgagtcgcttcgctagctgtgcgccctcctgggcactagcctggagaggagcgtgcagacgcggctccttggagggagtgcggtcctctagggaggcatcgggctcctaggggcttcttggcgtgtgtggtgggattggggtccgccggccatggccttcactttcgctgcgttctgctacatgctgtctctggtgctgtgcgctgcgctcatcttcttcgccatctggcacataattgcctttgatgagttaaggacagattttaagagccccatagaccagtgcaatcctgttcatgcgagggaacggttgaggaacatcgagcgcatctgcttccttctgcgaaagctggtgctgccagaatactccatccatagcctcttctgcattatgttcctgtgtgcgcaagagtggctcacgctggggctgaatgtccctctacttttctatcacttctggaggtatttccactgtccagcagatagctcagaactagcctacgacccaccggtggtcatgaatgccgacactttgagttactgtcagaaggaggcctggtgtaagctggccttctatctcctctccttcttctactacctttactgcatgatcttacacttttagtggaggctnctttaacggnaaaggacccatggcaccatcattcaggaggacttgagganggggggagaggggccttgaggac

SEQ ID NO: 423500 - DNA, 1252 bp, Homo sapiens
gcggaggccggctggccggagtcacggttggggacgggcgcgcctcggagcgcacggctgcgctggaagccgcgtctggggcgcaggaccaacgggacctacctcctcccggctacctaaagactccttctctcgggaaagagcgctgcccggctctgggatttgggaggagctcggaggccgctcgggcacctcgctggacactatccgtttgcgccccggtggcgcgggagggtccggagcggagcgctcgtctctcctcagcggtttagtggagaaaagcagagagctcttcctggggcgaatgggacctcctccctcggtcctccgtggagtcgtcgcatcgcttgtcgtgttggtctcgaggggctcacagcttggcactaatttgcaggtgttcgctgctgatttggtttcttcttcgatttgcggacggttccctccagcgactctcgacacacgttttcctgtcttcgccggagggccgggtctggggtcgccggagcctgcgggaatccagcgcttattcgctgaccctcgagtcgcttcgctagctgtgcgccctcctgggcactagcctggagaggagcgtgcagacgcggctccttggagggagtgcggtcctctagggaggcatcgggctcctaggggcttcttggcgtgtgtggtgggattggggtccgccggccatggccttcactttcgctgcgttctgctacatgctgtctctggtgctgtgcgctgcgctcatcttcttcgccatctggcacataattgcctttgatgagttaaggacagattttaagagccccatagaccagtgcaatcctgttcatgcgtcctttctgcacctggatatcctcagcattaacaataacaccatcaactcactcattggacttcatgaatgtgtggtggagcctcctgaggatttaactttcaataccatgacttattgatgagacttgtaatcaacaataaaattggaaggcctcctaaccatctgcattagtccattcttgagctactataaagaactacctgagactgggtaatttctaaagaaaagaagtttaattggctcacggttctgagagatagatgtacaggcctctgcttctggggtggcctcaagaaacttacaatcatagtggaagatgaaggggaagcaagcatgtcttacatggcaggagcaggagagagagggtgggggaggtgccacaaacttttaaacaaccagatttcatgagaa

SEQ ID NO: 423501 - DNA, 756 bp, Homo sapiens
ggttcagctttgttcttactttgtttgtgttacactggtatccagtcatccattggcacagagacacagtttctactttgatacaatctgtgtcagcctggcagttaatttatttagcagcatcttaaatttttttgtttttgcataaaatccagctcctgcaggatatttatcagcatctttgcaagagaggatgaattcaaaataaagtacaagagaagaaacattcagtgatcctcatggaacacctttcctgaagagatgatgatggggccatttgacatgggacacagcaggtgctggaagaagcacatatttttagtgacaaagactgtgactatgttgcctcctggttataaagcaaagccaaactggagagaccagtgccagagcctttattactaaaaggcacatgcaaagtgctgtaagatttcacaggatggagagaacatctgtggcagtggacagagtcgtgagtgaccacagaaggctttctggaggcaggacttgagggcctttgcctcagacatgcatacggcaggagtgtgagatctatggagtgggctcagctcatggagcaaggaggacggcaggggctccaatgatgatgtctgcgtaagaattcccatttaagatctttccaagcacaagagtcatggcccaatggcagagtgtcctatgcccacgaataaatcaaggatgaagaagacatttttggaaccagcatagtttctggtaggatctttgccactactt

SEQ ID NO: 423502 - DNA, 2375 bp, Homo sapiens
gcggaggccggctggccggagtcacggttggggacgggcgcgcctcggagcgcacggctgcgctggaagccgcgtctggggcgcaggaccaacgggacctacctcctcccggctacctaaagactccttctctcgggaaagagcgctgcccggctctgggatttgggaggagctcggaggccgctcgggcacctcgctggacactatccgtttgcgccccggtggcgcgggagggtccggagcggagcgctcgtctctcctcagcggtttagtggagaaaagcagagagctcttcctggggcgaatgggacctcctccctcggtcctccgtggagtcgtcgcatcgcttgtcgtgttggtctcgaggggctcacagcttggcactaatttgcaggtgttcgctgctgatttggtttcttcttcgatttgcggacggttccctccagcgactctcgacacacgttttcctgtcttcgccggagggccgggtctggggtcgccggagcctgcgggaatccagcgcttattcgctgaccctcgagtcgcttcgctagctgtgcgccctcctgggcactagcctggagaggagcgtgcagacgcggctccttggagggagtgcggtcctctagggaggcatcgggctcctaggggcttcttggcgtgtgtggtgggattggggtccgccggccatggccttcactttcgctgcgttctgctacatgctgtctctggtgctgtgcgctgcgctcatcttcttcgccatctggcacataattgcctttgatgagttaaggacagattttaagagccccatagaccagtgcaatcctgttcatgcgagggaacggttgaggaacatcgagcgcatctgcttccttctgcgaaagctggtgctgccagaatactccatccatagcctcttctgcattatgttcctgtgtgcgcaagagtggctcacgctggggctgaatgtccctctacttttctatcacttctggaggtatttccactgtccagcagatagctcagaactagcctacgacccaccggtggtcatgaatgccgacactttgagttactgtcagaaggaggcctggtgtaagctggccttctatctcctctccttcttctactacctttactgcatgatctacactttagtgagctcttaacgcaaagaccatgcacatcatcagagactgagatgggagaggcctgagacggagaggtgcatttctgctggtgactggaggagggaccagaatgaggatacgtgagaaatagacccggcaggcagtcagactgaatgggagctggaatcacgcagcagctgggagccgagttaaccctgcgtgtctgtgtcaccctgtttgtcaatctttggcattcgaattccacacacggggtcctagagcccttctgagcatcagtggtgtgggggagtaggtgacgaaacactagacctctcctgagagagaattgctgcttcctgaatccacttcattgaacagcaccttgcaagttcaaatgagttcctgggagcggaggctggaaggccacaaggtgcttgctaaggaacagaatgacccagagtcaaggccaagtctgcagggacctgttgaaagcctcgagaatgtcttggctgcccaagactcttgttgcctttcttccaagccatggccatgccctttttctcaaatgggaggggctggagggtgtgtgggatttgtcttcagctgcaaccagccttgagcctgctgggctattttcagctgaggaggggtgaatataggaaaaatgcatttttgaaacgtttgcaacatgatcaaggtgttagttctccaccacacaagttgtattcttcttttgccacctcaaaccatcacagagtctttaaatgcaaatcaattggtcaatgctagtcaaagctatgttcttacaaaaaccccagacagctcagagctcagaaaatcctgtggagtggctgctctgtaccgtgggcatccggcagccaggaagtgagacaacataattataactttgttttatgatgctgcatcatttgtactgtttaggtcgacgtgaggacatcatcttatttagaattttccgtttggcattctcttttgggtgggagttatgctgggggttgtaaataatgacaaggctgagatttttatgatgtttaaattgggcacaatgattttgaccttattccccaaacttcttttcttttctactgtttaacatacacaggctatttatacacgtccccagctcccatctgaaacctgtgactcaggtttatgaatggtgtttgtgtagcaacacattgtgtgctatgtttattaaaatgcagcgacaaaaaaaagtgt

SEQ ID NO: 423503 - DNA, 4765 bp, Homo sapiens
tgtgcggggctcggaagatggctgcggagccgagcaccgggcagtggctgcggcggcggcggcggcggcgggccgggagcgcggcgggcgggggctccgccttgcgcgtggggcgctgagccgagaggcgcggaggcggcgagggcgcgggggctctgaggaccgctcggcgccgcctcctgccacaccatgggcagcgcagaggacgcagtcaaagagaaactgctgtggaacgtgaagaaggaggtgaagcaaatcatggaggaggctgtcaccaggaagtttgtgcatgaagacagcagccacatcattgctttatgtggtgcagtggaggcttgcctcttgcatcagctgagacgccgtgccgctggcttcctgcgcagtgacaagatggcagccctgttcaccaaggtggggaagacgtgcccagtggcgggggagatttgccacaaggtacaggagctgcagcaacaagcagagggcaggaaaccctcaggggtcagccaggaggccctgcggagacagggctcagccagcgggaaggccccggccctcagccctcaggccttgaaacacgtatgggtacgcacggcgctcatcgagaaagttctggacaaggtcgtgcaatacctggcggaaaactgcagcaagtactacgagaaggaggcactgctggcagaccctgtgttcggcccgatcctggcctctcttctagtgggaccctgtgccttggaatacactaagctcaagacagccgatcactactggactgacccctctgctgatgagctggtccagcggcaccgcatccggggtccacctactcgccaggactcccctgcaaagcgcccagccctggggatccggaaacggcactcaagcggcagcgcgtcggaggacaggctggctgcctgtgcccgcgagtgtgtggagtccctgcaccagaactcacggacgcggctgctctatggcaagaaccacgtgctggtgcagccgaaggaggatatggaggcggtccctggctacctctccctgcaccagtctgcagagagcctgactctgaagtggacccccaaccagctcatgaatgggactctgggggactccgagctggaaaagagcgtttactgggactatgccctcgtggtgcccttcagccaggtcgtgtgcatccactgccaccagcaaaagagcggtggcacgcttgtgctggtgagccaggatggcatccagaggccgccgctgcatttcccacagggaggacacctgctgtcctttctgtcctgtctggagaatgggctgctgcctcggggacagctagagcccccgctgtggacccagcaagggaaggggaaagtgttccccaagctacggaaacgaagcagcattcgctccgtggatatggaggagatgggcacggggcgggccaccgactatgtgttccggatcatctaccccggccacaggcacgagcacaacgctggtgacatgatcgagatgcagggctttgggcccagcctgccagcctggcacctggagcccctgtgcagtcagggctcctcctgcctctcctgctcctccagcagctccccacatgcaacccccagccactgtagctgcatccccgaccggttgccgctcaggctactgtgtgagagtatgaagaggcagatcgtgtcccgggccttctacggctggctggcacactgccgccacctgtccacggtgcggacccacctgtcggcgctggtgcaccatagcgttatcccacctgaccggcccccgggggcctccgcgggcctcaccaaggacgtgtggagcaagtatcagaaggacaaaaagaactacaaagagctggagctgctgcggcaagtttactacggaggcatagagcacgagatccgcaaggacgtctggccctttctgcttggccactacaagttcggcatgagcaagaaggagatggagcaggtggacgcagtggtggcagcaaggtaccagcaggtgttggcagagtggaaggcctgcgaggtggtggtgaggcagcgggagcgggaggcccacccagccacacgcaccaagttctcctcaggcagcagcatcgacagccacgtgcagcgcctcatccaccgagactccaccatcagcaacgatgtgtttatctcagtggatgatctggaacccccggagccccaggaccctgaagattccagaccaaaacctgagcaggaagcaggacccgggactccgggcaccgccgtggtggagcagcagcattccgtggagttcgactctccagactcaggactgccctcctctcgcaattactccgtggcctcgggcatccagtcaagcctagatgaggggcagagcgtgggcttcgaagaggaggacggcggtggggaggaaggctccagtgggcccggccctgcagctcacactttgagggagccccaggatcccagccaggagaagcctcaggccggagaactggaggccggagaggagcttgcggctgtgtgtgcggctgcctacactatagaattactggacactgtggccttaaacctgcaccgcatagacaaggatgtgcagaggtgtgaccgcaactactggtacttcacgccccccaacctcgagaggctcagagacgtcatgtgcagctacgtgtgggagcacctggacgtgggctatgtgcagggcatgtgcgatctgctggcgcctctcctggtcaccctcgacaatgatcagctggcctacagctgcttcagccacctcatgaagaggatgagccagaacttccccaacgggggtgccatggacacccactttgccaacatgcgctccctcatccagatcctggactcagagctgtttgagctgatgcatcagaatggagactacacccacttctacttctgttatcgctggttcctgctggattttaagagagaactgctgtatgaggatgtgtttgctgtgtgggaggtgatctgggcagccaggcacatctcatcggagcactttgtcctgttcatcgccctcgccctggtggaggcctaccgagagatcatccgtgacaacaacatggacttcactgacatcatcaagtttttcaatgaacgtgctgagcatcacgatgcccaggagatcctgcggattgcccgggacctcgtccacaaggtgcagatgctcatagagaacaagtgagctggggccaggaggcagcagccgtgcagagcctgggctccggcagggagaggtgcaggggagtcaccgcccagacctccccagccaccaaccgaccccacctctgttcctaacaaagcggttgtgagcctggatccgactcccggcagtgctgaccctgcagggcaagtcaggggccaggatgccctcggatcagggccgggatgggaggggtcagcctcagggagcagctgccttgggggacacacctactctgctcccctctcacacatctgggagtagccccactgccacctgcagccgcagcctggactgctgcccacgagtgaacctggggccccacaggattaacaggggctatagcggcctgggccctactcagctggggtggcagagggcgagaggctctgtgctgtgtcccttctgagggtccctttgcagtcccagtatattgtgcgtgcaccagccccagctggagcaaccaaaactgcttctggtttaggcacacgtcacgggtgcgggagacccgggcacgggagacccgggccgccttcaggccgctcccccgagattctggggcagtcggaagatgtgggccctgggtgggagcagcccacttcagcagcactgccactgcctttggccacctgaggtgacccccaggcctccccggccttgtacagtgtacctctgtgtatctgtacagcctcgctcctgccaccccacccttgcgttctgcattaggtacttccctgaaaaccacgtgtaagaagtgatgcttttgccagtggatgatctggaatgcgaccggagcacttgctctgaggaatcccagggtgactctgtcggggaagaatccggtcacagcctcccctcagagacaggcctcagttcgagggcagcccattatctgtcgcagacatctgccatgtccctgagactgcgggaggcaggggatgcatgggtgtccccatctgtccctggtgagaagcaaggctagctctgccttccacatgcttctcaggatgccaagaggcctaggaacccagaaacccccttggaggagctgtgtatgcgggggtgccaggaagggcatagctcctgcccccaggcctaggcatgctgcttgctcggccatccccacttcctcctctaccccaacacatgcaggctaggccttgccctggaacgtggaggccctgcccggggctggggcctagtccagcagccaccaaagtctggcagactttctgcatttgagaaacatgacaaagggccccgcagcccttctgcacccagcacagcctgcccagcccagccctgcccccgggcactgcacagcctgtctgggggccagaccaccccattgtccatccttgttgtccgtgagtccttggcctccaccaagcacgtgtggccattgtgtgcctgccttagtgactccgtggttttgtgaggagcagagtgtgtatgatttttgcctcagaaactatactcttctgtgtaacagaccaataaacaacatttgtcaacactggagcctctgggactggac

SEQ ID NO: 423504 - DNA, 1182 bp, Homo sapiens
  misc_feature (1182)..(1182): n is a, c, g, or t
gaggaagaggaggataaactgcacgcgatgctctcaatgatctgctcgcggaacctcacagctcccaatccgatgaaagacgctggtgacatgatcgagatgcagggctttgggcccagcctgccagcctggcacctggagcccctgtgcagtcagggctcctcctgcctctcctgctcctccagcagctccccacatgcaacccccagccactgtagctgcatccccgaccggttgccgctcaggctactgtgtgagagtatgaagaggcagatcgtgtcccgggccttctacggctggctggcacactgccgccacctgtccacggtgcggacccacctgtcggcgctggtgcaccatagcgttatcccacctgaccggcccccgggggcctccgcgggcctcaccaaggacgtgtggagcaagtatcagaaggacaaaaagaactacaaagagctggagctgctgcggcaagtttactacggaggcatagagcacgagatccgcaaggacgtctggccctttctgcttggccactacaagttcggcatgagcaagaaggagatggagcaggtggacgcagatggcggcagccacggtaccagcaggtgtcggcagaggctggacaggcctcgcacgcggacggcagaggccaacaggggagcggagaggacacaccagccaccacgccacaacggactcgctcacaagcgacacaatcgacaagccacgagcagggcccatcgaacgaaaataccacaacaacaaacgacagcgaacatacacgactacagaacccacacccccaggaccccgcaaaactgcacgaacaatcaccataagacagacaccggtaccgcggaacacggggcaacagacgtgaagaacacggacaagtgctgagacgaaccgagcagcccacaaacaccggacagcgacgacaaaagcaaaacaaccagcgagacgaggactcaccaacacaccaaggaggcgacggcgtgaacacaacgcagccgagcatgggcaagcagaagaccagagagcaagcgaacaaggacgaccgaccgcagacacaacgcaagcagcacgcagcaacaacggatgcaaaaaaaaagaaccaacagtaaacgacgagtcacaaagaacgaccagccgcagacgaacgacaagcgccagacagan

SEQ ID NO: 423505 - DNA, 5014 bp, Homo sapiens
tgtgcggggctcggaagatggctgcggagccgagcaccgggcagtggctgcggcggcggcggcggcggcgggccgggagcgcggcgggcgggggctccgccttgcgcgtggggcgctgagccgagaggcgcggaggcggcgagggcgcgggggctctgaggaccgctcggcgccgcctcctgccacaccatgggcagcgcagaggacgcagtcaaagagaaactgctgtggaacgtgaagaaggaggtgaagcaaatcatggaggaggctgtcaccaggaagtttgtgcatgaagacagcagccacatcattgctttatgtggtgcagtggaggcttgcctcttgcatcagctgagacgccgtgccgctggcttcctgcgcagtgacaagatggcagccctgttcaccaaggtggggaagacgtgcccagtggcgggggagatttgccacaaggtacaggagctgcagcaacaagcagagggcaggaaaccctcaggggtcagccaggaggccctgcggagacagggctcagccagcgggaaggccccggccctcagccctcaggccttgaaacacgtatgggtacgcacggcgctcatcgagaaagttctggacaaggtcgtgcaatacctggcggaaaactgcagcaagtactacgagaaggaggcactgctggcagaccctgtgttcggcccgatcctggcctctcttctagtgggaccctgtgccttggaatacactaagctcaagacagccgatcactactggactgacccctctgctgatgagctggtccagcggcaccgcatccggggtccacctactcgccaggactcccctgcaaagcgcccagccctggggatccggaaacggcactcaagcggcagcgcgtcggaggacaggctggctgcctgtgcccgcgagtgtgtggagtccctgcaccagaactcacggacgcggctgctctatggcaagaaccacgtgctggtgcagccgaaggaggatatggaggcggtccctggctacctctccctgcaccagtctgcagagagcctgactctgaagtggacccccaaccagctcatgaatgggactctgggggactccgagctggaaaagagcgtttactgggactatgccctcgtggtgcccttcagccaggtcgtgtgcatccactgccaccagcaaaagagcggtggcacgcttgtgctggtgagccaggatggcatccagaggccgccgctgcatttcccacagggaggacacctgctgtcctttctgtcctgtctggagaatgggctgctgcctcggggacagctagagcccccgctgtggacccagcaagggaaggggaaagtgttccccaagctacggaaacgaagcagcattcgctccgtggatatggaggagatgggcacggggcgggccaccgactatgtgttccggatcatctaccccggccacaggcacgagcacaacgctggtgacatgatcgagatgcagggctttgggcccagcctgccagcctggcacctggagcccctgtgcagtcagggctcctcctgcctctcctgctcctccagcagctccccacatgcaacccccagccactgtagctgcatccccgaccggttgccgctcaggctactgtgtgagagtatgaagaggcagatcgtgtcccgggccttctacggctggctggcacactgccgccacctgtccacggtgcggacccacctgtcggcgctggtgcaccatagcgttatcccacctgaccggcccccgggggcctccgcgggcctcaccaaggacgtgtggagcaagtatcagaaggacaaaaagaactacaaagagctggagctgctgcggcaagtttactacggaggcatagagcacgagatccgcaaggacgtctggccctttctgcttggccactacaagttcggcatgagcaagaaggagatggagcaggtgaggggagcctgttcccatggggctgatgagatggggagctgggccaggggacgccagggaggggaccttggaagcctcagccccttcccagccggaaagaagcatggcagggcagctccaccgtccttaccctgaggcccgtcttgagtctgagactcaggacccaaggtccagtgcaggcccagctcctgaaggggagggcctggtgcacgcttcccccatggtcgtggtgtggtctgagtacaggtggacgcagtggtggcagcaaggtaccagcaggtgttggcagagtggaaggcctgcgaggtggtggtgaggcagcgggagcgggaggcccacccagccacacgcaccaagttctcctcaggcagcagcatcgacagccacgtgcagcgcctcatccaccgagactccaccatcagcaacgatgtgtttatctcagtggatgatctggaacccccggagccccaggaccctgaagattccagaccaaaacctgagcaggaagcaggacccgggactccgggcaccgccgtggtggagcagcagcattccgtggagttcgactctccagactcaggactgccctcctctcgcaattactccgtggcctcgggcatccagtcaagcctagatgaggggcagagcgtgggcttcgaagaggaggacggcggtggggaggaaggctccagtgggcccggccctgcagctcacactttgagggagccccaggatcccagccaggagaagcctcaggccggagaactggaggccggagaggagcttgcggctgtgtgtgcggctgcctacactatagaattactggacactgtggccttaaacctgcaccgcatagacaaggatgtgcagaggtgtgaccgcaactactggtacttcacgccccccaacctcgagaggctcagagacgtcatgtgcagctacgtgtgggagcacctggacgtgggctatgtgcagggcatgtgcgatctgctggcgcctctcctggtcaccctcgacaatgatcagctggcctacagctgcttcagccacctcatgaagaggatgagccagaacttccccaacgggggtgccatggacacccactttgccaacatgcgctccctcatccagatcctggactcagagctgtttgagctgatgcatcagaatggagactacacccacttctacttctgttatcgctggttcctgctggattttaagagagaactgctgtatgaggatgtgtttgctgtgtgggaggtgatctgggcagccaggcacatctcatcggagcactttgtcctgttcatcgccctcgccctggtggaggcctaccgagagatcatccgtgacaacaacatggacttcactgacatcatcaagtttttcaatgaacgtgctgagcatcacgatgcccaggagatcctgcggattgcccgggacctcgtccacaaggtgcagatgctcatagagaacaagtgagctggggccaggaggcagcagccgtgcagagcctgggctccggcagggagaggtgcaggggagtcaccgcccagacctccccagccaccaaccgaccccacctctgttcctaacaaagcggttgtgagcctggatccgactcccggcagtgctgaccctgcagggcaagtcaggggccaggatgccctcggatcagggccgggatgggaggggtcagcctcagggagcagctgccttgggggacacacctactctgctcccctctcacacatctgggagtagccccactgccacctgcagccgcagcctggactgctgcccacgagtgaacctggggccccacaggattaacaggggctatagcggcctgggccctactcagctggggtggcagagggcgagaggctctgtgctgtgtcccttctgagggtccctttgcagtcccagtatattgtgcgtgcaccagccccagctggagcaaccaaaactgcttctggtttaggcacacgtcacgggtgcgggagacccgggcacgggagacccgggccgccttcaggccgctcccccgagattctggggcagtcggaagatgtgggccctgggtgggagcagcccacttcagcagcactgccactgcctttggccacctgaggtgacccccaggcctccccggccttgtacagtgtacctctgtgtatctgtacagcctcgctcctgccaccccacccttgcgttctgcattaggtacttccctgaaaaccacgtgtaagaagtgatgcttttgccagtggatgatctggaatgcgaccggagcacttgctctgaggaatcccagggtgactctgtcggggaagaatccggtcacagcctcccctcagagacaggcctcagttcgagggcagcccattatctgtcgcagacatctgccatgtccctgagactgcgggaggcaggggatgcatgggtgtccccatctgtccctggtgagaagcaaggctagctctgccttccacatgcttctcaggatgccaagaggcctaggaacccagaaacccccttggaggagctgtgtatgcgggggtgccaggaagggcatagctcctgcccccaggcctaggcatgctgcttgctcggccatccccacttcctcctctaccccaacacatgcaggctaggccttgccctggaacgtggaggccctgcccggggctggggcctagtccagcagccaccaaagtctggcagactttctgcatttgagaaacatgacaaagggccccgcagcccttctgcacccagcacagcctgcccagcccagccctgcccccgggcactgcacagcctgtctgggggccagaccaccccattgtccatccttgttgtccgtgagtccttggcctccaccaagcacgtgtggccattgtgtgcctgccttagtgactccgtggttttgtgaggagcagagtgtgtatgatttttgcctcagaaactatactcttctgtgtaacagaccaataaacaacatttgtcaacactggagcctctgggactggac

SEQ ID NO: 423506 - DNA, 4848 bp, Homo sapiens
tgtgcggggctcggaagatggctgcggagccgagcaccgggcagtggctgcggcggcggcggcggcggcgggccgggagcgcggcgggcgggggctccgccttgcgcgtggggcgctgagccgagaggcgcggaggcggcgagggcgcgggggctctgaggaccgctcggcgccgcctcctgccacaccatgggcagcgcagaggacgcagtcaaagagaaactgctgtggaacgtgaagaaggaggtgaagcaaatcatggaggaggctgtcaccaggaagtttgtgcatgaagacagcagccacatcattgctttatgtggtgcagtggaggcttgcctcttgcatcagctgagacgccgtgccgctggcttcctgcgcagtgacaagatggcagccctgttcaccaaggtggggaagacgtgcccagtggcgggggagatttgccacaaggtacaggagctgcagcaacaagcagagggcaggaaaccctcaggggtcagccaggaggccctgcggagacagggctcagccagcgggaaggccccggccctcagccctcaggccttgaaacacgtatgggtacgcacggcgctcatcgagaaagttctggacaaggtcgtgcaatacctggcggaaaactgcagcaagtactacgagaaggaggcactgctggcagaccctgtgttcggcccgatcctggcctctcttctaggtgagcctgagagcacaggcacagtgggtacggggcaggtgctgagggagcatcgtctgggctggctgtctctgtctccacagtgggaccctgtgccttggaatacactaagctcaagacagccgatcactactggactgacccctctgctgatgagctggtccagcggcaccgcatccggggtccacctactcgccaggactcccctgcaaagcgcccagccctggggatccggaaacggcactcaagcggcagcgcgtcggaggacaggctggctgcctgtgcccgcgagtgtgtggagtccctgcaccagaactcacggacgcggctgctctatggcaagaaccacgtgctggtgcagccgaaggaggatatggaggcggtccctggctacctctccctgcaccagtctgcagagagcctgactctgaagtggacccccaaccagctcatgaatgggactctgggggactccgagctggaaaagagcgtttactgggactatgccctcgtggtgcccttcagccaggtcgtgtgcatccactgccaccagcaaaagagcggtggcacgcttgtgctggtgagccaggatggcatccagaggccgccgctgcatttcccacagggaggacacctgctgtcctttctgtcctgtctggagaatgggctgctgcctcggggacagctagagcccccgctgtggacccagcaagggaaggggaaagtgttccccaagctacggaaacgaagcagcattcgctccgtggatatggaggagatgggcacggggcgggccaccgactatgtgttccggatcatctaccccggccacaggcacgagcacaacgctggtgacatgatcgagatgcagggctttgggcccagcctgccagcctggcacctggagcccctgtgcagtcagggctcctcctgcctctcctgctcctccagcagctccccacatgcaacccccagccactgtagctgcatccccgaccggttgccgctcaggctactgtgtgagagtatgaagaggcagatcgtgtcccgggccttctacggctggctggcacactgccgccacctgtccacggtgcggacccacctgtcggcgctggtgcaccatagcgttatcccacctgaccggcccccgggggcctccgcgggcctcaccaaggacgtgtggagcaagtatcagaaggacaaaaagaactacaaagagctggagctgctgcggcaagtttactacggaggcatagagcacgagatccgcaaggacgtctggccctttctgcttggccactacaagttcggcatgagcaagaaggagatggagcaggtggacgcagtggtggcagcaaggtaccagcaggtgttggcagagtggaaggcctgcgaggtggtggtgaggcagcgggagcgggaggcccacccagccacacgcaccaagttctcctcaggcagcagcatcgacagccacgtgcagcgcctcatccaccgagactccaccatcagcaacgatgtgtttatctcagtggatgatctggaacccccggagccccaggaccctgaagattccagaccaaaacctgagcaggaagcaggacccgggactccgggcaccgccgtggtggagcagcagcattccgtggagttcgactctccagactcaggactgccctcctctcgcaattactccgtggcctcgggcatccagtcaagcctagatgaggggcagagcgtgggcttcgaagaggaggacggcggtggggaggaaggctccagtgggcccggccctgcagctcacactttgagggagccccaggatcccagccaggagaagcctcaggccggagaactggaggccggagaggagcttgcggctgtgtgtgcggctgcctacactatagaattactggacactgtggccttaaacctgcaccgcatagacaaggatgtgcagaggtgtgaccgcaactactggtacttcacgccccccaacctcgagaggctcagagacgtcatgtgcagctacgtgtgggagcacctggacgtgggctatgtgcagggcatgtgcgatctgctggcgcctctcctggtcaccctcgacaatgatcagctggcctacagctgcttcagccacctcatgaagaggatgagccagaacttccccaacgggggtgccatggacacccactttgccaacatgcgctccctcatccagatcctggactcagagctgtttgagctgatgcatcagaatggagactacacccacttctacttctgttatcgctggttcctgctggattttaagagagaactgctgtatgaggatgtgtttgctgtgtgggaggtgatctgggcagccaggcacatctcatcggagcactttgtcctgttcatcgccctcgccctggtggaggcctaccgagagatcatccgtgacaacaacatggacttcactgacatcatcaagtttttcaatgaacgtgctgagcatcacgatgcccaggagatcctgcggattgcccgggacctcgtccacaaggtgcagatgctcatagagaacaagtgagctggggccaggaggcagcagccgtgcagagcctgggctccggcagggagaggtgcaggggagtcaccgcccagacctccccagccaccaaccgaccccacctctgttcctaacaaagcggttgtgagcctggatccgactcccggcagtgctgaccctgcagggcaagtcaggggccaggatgccctcggatcagggccgggatgggaggggtcagcctcagggagcagctgccttgggggacacacctactctgctcccctctcacacatctgggagtagccccactgccacctgcagccgcagcctggactgctgcccacgagtgaacctggggccccacaggattaacaggggctatagcggcctgggccctactcagctggggtggcagagggcgagaggctctgtgctgtgtcccttctgagggtccctttgcagtcccagtatattgtgcgtgcaccagccccagctggagcaaccaaaactgcttctggtttaggcacacgtcacgggtgcgggagacccgggcacgggagacccgggccgccttcaggccgctcccccgagattctggggcagtcggaagatgtgggccctgggtgggagcagcccacttcagcagcactgccactgcctttggccacctgaggtgacccccaggcctccccggccttgtacagtgtacctctgtgtatctgtacagcctcgctcctgccaccccacccttgcgttctgcattaggtacttccctgaaaaccacgtgtaagaagtgatgcttttgccagtggatgatctggaatgcgaccggagcacttgctctgaggaatcccagggtgactctgtcggggaagaatccggtcacagcctcccctcagagacaggcctcagttcgagggcagcccattatctgtcgcagacatctgccatgtccctgagactgcgggaggcaggggatgcatgggtgtccccatctgtccctggtgagaagcaaggctagctctgccttccacatgcttctcaggatgccaagaggcctaggaacccagaaacccccttggaggagctgtgtatgcgggggtgccaggaagggcatagctcctgcccccaggcctaggcatgctgcttgctcggccatccccacttcctcctctaccccaacacatgcaggctaggccttgccctggaacgtggaggccctgcccggggctggggcctagtccagcagccaccaaagtctggcagactttctgcatttgagaaacatgacaaagggccccgcagcccttctgcacccagcacagcctgcccagcccagccctgcccccgggcactgcacagcctgtctgggggccagaccaccccattgtccatccttgttgtccgtgagtccttggcctccaccaagcacgtgtggccattgtgtgcctgccttagtgactccgtggttttgtgaggagcagagtgtgtatgatttttgcctcagaaactatactcttctgtgtaacagaccaataaacaacatttgtcaacactggagcctctgggactggac

SEQ ID NO: 423507 - DNA, 4697 bp, Homo sapiens
tgtgcggggctcggaagatggctgcggagccgagcaccgggcagtggctgcggcggcggcggcggcggcgggccgggagcgcggcgggcgggggctccgccttgcgcgtggggcgctgagccgagaggcgcggaggcggcgagggcgcgggggctctgaggaccgctcggcgccgcctcctgccacaccatgggcagcgcagaggacgcagtcaaagagaaactgctgtggaacgtgaagaaggaggtgaagcaaatcatggaggaggctgtcaccaggaagtttgtgcatgaagacagcagccacatcattgctttatgtggtgcagtggaggcttgcctcttgcatcagctgagacgccgtgccgctggcttcctgcgcagtgacaagatggcagccctgttcaccaaggtggggaagacgtgcccagtggcgggggagatttgccacaaggtacaggagctgcagcaacaagcagagggcaggaaaccctcaggggtcagccaggaggccctgcggagacagggctcagccagcgggaaggccccggccctcagccctcaggccttgaaacacgtatgggtacgcacggcgctcatcgagaaagttctggacaaggtcgtgcaatacctggcggaaaactgcagtgggaccctgtgccttggaatacactaagctcaagacagccgatcactactggactgacccctctgctgatgagctggtccagcggcaccgcatccggggtccacctactcgccaggactcccctgcaaagcgcccagccctggggatccggaaacggcactcaagcggcagcgcgtcggaggacaggctggctgcctgtgcccgcgagtgtgtggagtccctgcaccagaactcacggacgcggctgctctatggcaagaaccacgtgctggtgcagccgaaggaggatatggaggcggtccctggctacctctccctgcaccagtctgcagagagcctgactctgaagtggacccccaaccagctcatgaatgggactctgggggactccgagctggaaaagagcgtttactgggactatgccctcgtggtgcccttcagccaggtcgtgtgcatccactgccaccagcaaaagagcggtggcacgcttgtgctggtgagccaggatggcatccagaggccgccgctgcatttcccacagggaggacacctgctgtcctttctgtcctgtctggagaatgggctgctgcctcggggacagctagagcccccgctgtggacccagcaagggaaggggaaagtgttccccaagctacggaaacgaagcagcattcgctccgtggatatggaggagatgggcacggggcgggccaccgactatgtgttccggatcatctaccccggccacaggcacgagcacaacgctggtgacatgatcgagatgcagggctttgggcccagcctgccagcctggcacctggagcccctgtgcagtcagggctcctcctgcctctcctgctcctccagcagctccccacatgcaacccccagccactgtagctgcatccccgaccggttgccgctcaggctactgtgtgagagtatgaagaggcagatcgtgtcccgggccttctacggctggctggcacactgccgccacctgtccacggtgcggacccacctgtcggcgctggtgcaccatagcgttatcccacctgaccggcccccgggggcctccgcgggcctcaccaaggacgtgtggagcaagtatcagaaggacaaaaagaactacaaagagctggagctgctgcggcaagtttactacggaggcatagagcacgagatccgcaaggacgtctggccctttctgcttggccactacaagttcggcatgagcaagaaggagatggagcaggtggacgcagtggtggcagcaaggtaccagcaggtgttggcagagtggaaggcctgcgaggtggtggtgaggcagcgggagcgggaggcccacccagccacacgcaccaagttctcctcaggcagcagcatcgacagccacgtgcagcgcctcatccaccgagactccaccatcagcaacgatgtgtttatctcagtggatgatctggaacccccggagccccaggaccctgaagattccagaccaaaacctgagcaggaagcaggacccgggactccgggcaccgccgtggtggagcagcagcattccgtggagttcgactctccagactcaggactgccctcctctcgcaattactccgtggcctcgggcatccagtcaagcctagatgaggggcagagcgtgggcttcgaagaggaggacggcggtggggaggaaggctccagtgggcccggccctgcagctcacactttgagggagccccaggatcccagccaggagaagcctcaggccggagaactggaggccggagaggagcttgcggctgtgtgtgcggctgcctacactatagaattactggacactgtggccttaaacctgcaccgcatagacaaggatgtgcagaggtgtgaccgcaactactggtacttcacgccccccaacctcgagaggctcagagacgtcatgtgcagctacgtgtgggagcacctggacgtgggctatgtgcagggcatgtgcgatctgctggcgcctctcctggtcaccctcgacaatgatcagctggcctacagctgcttcagccacctcatgaagaggatgagccagaacttccccaacgggggtgccatggacacccactttgccaacatgcgctccctcatccagatcctggactcagagctgtttgagctgatgcatcagaatggagactacacccacttctacttctgttatcgctggttcctgctggattttaagagagaactgctgtatgaggatgtgtttgctgtgtgggaggtgatctgggcagccaggcacatctcatcggagcactttgtcctgttcatcgccctcgccctggtggaggcctaccgagagatcatccgtgacaacaacatggacttcactgacatcatcaagtttttcaatgaacgtgctgagcatcacgatgcccaggagatcctgcggattgcccgggacctcgtccacaaggtgcagatgctcatagagaacaagtgagctggggccaggaggcagcagccgtgcagagcctgggctccggcagggagaggtgcaggggagtcaccgcccagacctccccagccaccaaccgaccccacctctgttcctaacaaagcggttgtgagcctggatccgactcccggcagtgctgaccctgcagggcaagtcaggggccaggatgccctcggatcagggccgggatgggaggggtcagcctcagggagcagctgccttgggggacacacctactctgctcccctctcacacatctgggagtagccccactgccacctgcagccgcagcctggactgctgcccacgagtgaacctggggccccacaggattaacaggggctatagcggcctgggccctactcagctggggtggcagagggcgagaggctctgtgctgtgtcccttctgagggtccctttgcagtcccagtatattgtgcgtgcaccagccccagctggagcaaccaaaactgcttctggtttaggcacacgtcacgggtgcgggagacccgggcacgggagacccgggccgccttcaggccgctcccccgagattctggggcagtcggaagatgtgggccctgggtgggagcagcccacttcagcagcactgccactgcctttggccacctgaggtgacccccaggcctccccggccttgtacagtgtacctctgtgtatctgtacagcctcgctcctgccaccccacccttgcgttctgcattaggtacttccctgaaaaccacgtgtaagaagtgatgcttttgccagtggatgatctggaatgcgaccggagcacttgctctgaggaatcccagggtgactctgtcggggaagaatccggtcacagcctcccctcagagacaggcctcagttcgagggcagcccattatctgtcgcagacatctgccatgtccctgagactgcgggaggcaggggatgcatgggtgtccccatctgtccctggtgagaagcaaggctagctctgccttccacatgcttctcaggatgccaagaggcctaggaacccagaaacccccttggaggagctgtgtatgcgggggtgccaggaagggcatagctcctgcccccaggcctaggcatgctgcttgctcggccatccccacttcctcctctaccccaacacatgcaggctaggccttgccctggaacgtggaggccctgcccggggctggggcctagtccagcagccaccaaagtctggcagactttctgcatttgagaaacatgacaaagggccccgcagcccttctgcacccagcacagcctgcccagcccagccctgcccccgggcactgcacagcctgtctgggggccagaccaccccattgtccatccttgttgtccgtgagtccttggcctccaccaagcacgtgtggccattgtgtgcctgccttagtgactccgtggttttgtgaggagcagagtgtgtatgatttttgcctcagaaactatactcttctgtgtaacagaccaataaacaacatttgtcaacactggagcctctgggactggac

SEQ ID NO: 423508 - DNA, 4907 bp, Homo sapiens
tgtgcggggctcggaagatggctgcggagccgagcaccgggcagtggctgcggcggcggcggcggcggcgggccgggagcgcggcgggcgggggctccgccttgcgcgtggggcgctgagccgagaggcgcggaggcggcgagggcgcgggggctctgaggaccgctcggcgccgcctcctgccacaccatgggcagcgcagaggacgcagtcaaagagaaactgctgtggaacgtgaagaaggaggtgaagcaaatcatggaggaggctgtcaccaggaagtttgtgcatgaagacagcagccacatcattgctttatgtggtgcagtggaggcttgcctcttgcatcagctgagacgccgtgccgctggcttcctgcgcagtgacaagatggcagccctgttcaccaaggtggggaagacgtgcccagtggcgggggagatttgccacaaggtacaggagctgcagcaacaagcagagggcaggaaaccctcaggggtcagccaggaggccctgcggagacagggctcagccagcgggaaggccccggccctcagccctcaggccttgaaacacgtatgggtacgcacggcgctcatcgagaaagttctggacaaggtcgtgcaatacctggcggaaaactgcagcaagtactacgagaaggaggcactgctggcagaccctgtgttcggcccgatcctggcctctcttctaggtgagcctgagagcacaggcacagtgggtacggggcaggtgctgagggagcatcgtctgggctggctgtctctgtctccacagtgggaccctgtgccttggaatacactaagctcaagacagccgatcactactggactgacccctctgctgatgagctggtccagcggcaccgcatccggggtccacctactcgccaggactcccctgcaaagcgcccagccctggggatccggaaacggcactcaagcggcagcgcgtcggaggacaggctggctgcctgtgcccgcgagtgtgtggagtccctgcaccagaactcacggacgcggctgctctatggcaagaaccacgtgctggtgcagccggccatccctgagagcctctcagcccttcatcgtcggtcttccggtgtctcccgctgtagaaggaggatatggaggcggtccctggctacctctccctgcaccagtctgcagagagcctgactctgaagtggacccccaaccagctcatgaatgggactctgggggactccgagctggaaaagagcgtttactgggactatgccctcgtggtgcccttcagccaggtcgtgtgcatccactgccaccagcaaaagagcggtggcacgcttgtgctggtgagccaggatggcatccagaggccgccgctgcatttcccacagggaggacacctgctgtcctttctgtcctgtctggagaatgggctgctgcctcggggacagctagagcccccgctgtggacccagcaagggaaggggaaagtgttccccaagctacggaaacgaagcagcattcgctccgtggatatggaggagatgggcacggggcgggccaccgactatgtgttccggatcatctaccccggccacaggcacgagcacaacgctggtgacatgatcgagatgcagggctttgggcccagcctgccagcctggcacctggagcccctgtgcagtcagggctcctcctgcctctcctgctcctccagcagctccccacatgcaacccccagccactgtagctgcatccccgaccggttgccgctcaggctactgtgtgagagtatgaagaggcagatcgtgtcccgggccttctacggctggctggcacactgccgccacctgtccacggtgcggacccacctgtcggcgctggtgcaccatagcgttatcccacctgaccggcccccgggggcctccgcgggcctcaccaaggacgtgtggagcaagtatcagaaggacaaaaagaactacaaagagctggagctgctgcggcaagtttactacggaggcatagagcacgagatccgcaaggacgtctggccctttctgcttggccactacaagttcggcatgagcaagaaggagatggagcaggtggacgcagtggtggcagcaaggtaccagcaggtgttggcagagtggaaggcctgcgaggtggtggtgaggcagcgggagcgggaggcccacccagccacacgcaccaagttctcctcaggcagcagcatcgacagccacgtgcagcgcctcatccaccgagactccaccatcagcaacgatgtgtttatctcagtggatgatctggaacccccggagccccaggaccctgaagattccagaccaaaacctgagcaggaagcaggacccgggactccgggcaccgccgtggtggagcagcagcattccgtggagttcgactctccagactcaggactgccctcctctcgcaattactccgtggcctcgggcatccagtcaagcctagatgaggggcagagcgtgggcttcgaagaggaggacggcggtggggaggaaggctccagtgggcccggccctgcagctcacactttgagggagccccaggatcccagccaggagaagcctcaggccggagaactggaggccggagaggagcttgcggctgtgtgtgcggctgcctacactatagaattactggacactgtggccttaaacctgcaccgcatagacaaggatgtgcagaggtgtgaccgcaactactggtacttcacgccccccaacctcgagaggctcagagacgtcatgtgcagctacgtgtgggagcacctggacgtgggctatgtgcagggcatgtgcgatctgctggcgcctctcctggtcaccctcgacaatgatcagctggcctacagctgcttcagccacctcatgaagaggatgagccagaacttccccaacgggggtgccatggacacccactttgccaacatgcgctccctcatccagatcctggactcagagctgtttgagctgatgcatcagaatggagactacacccacttctacttctgttatcgctggttcctgctggattttaagagagaactgctgtatgaggatgtgtttgctgtgtgggaggtgatctgggcagccaggcacatctcatcggagcactttgtcctgttcatcgccctcgccctggtggaggcctaccgagagatcatccgtgacaacaacatggacttcactgacatcatcaagtttttcaatgaacgtgctgagcatcacgatgcccaggagatcctgcggattgcccgggacctcgtccacaaggtgcagatgctcatagagaacaagtgagctggggccaggaggcagcagccgtgcagagcctgggctccggcagggagaggtgcaggggagtcaccgcccagacctccccagccaccaaccgaccccacctctgttcctaacaaagcggttgtgagcctggatccgactcccggcagtgctgaccctgcagggcaagtcaggggccaggatgccctcggatcagggccgggatgggaggggtcagcctcagggagcagctgccttgggggacacacctactctgctcccctctcacacatctgggagtagccccactgccacctgcagccgcagcctggactgctgcccacgagtgaacctggggccccacaggattaacaggggctatagcggcctgggccctactcagctggggtggcagagggcgagaggctctgtgctgtgtcccttctgagggtccctttgcagtcccagtatattgtgcgtgcaccagccccagctggagcaaccaaaactgcttctggtttaggcacacgtcacgggtgcgggagacccgggcacgggagacccgggccgccttcaggccgctcccccgagattctggggcagtcggaagatgtgggccctgggtgggagcagcccacttcagcagcactgccactgcctttggccacctgaggtgacccccaggcctccccggccttgtacagtgtacctctgtgtatctgtacagcctcgctcctgccaccccacccttgcgttctgcattaggtacttccctgaaaaccacgtgtaagaagtgatgcttttgccagtggatgatctggaatgcgaccggagcacttgctctgaggaatcccagggtgactctgtcggggaagaatccggtcacagcctcccctcagagacaggcctcagttcgagggcagcccattatctgtcgcagacatctgccatgtccctgagactgcgggaggcaggggatgcatgggtgtccccatctgtccctggtgagaagcaaggctagctctgccttccacatgcttctcaggatgccaagaggcctaggaacccagaaacccccttggaggagctgtgtatgcgggggtgccaggaagggcatagctcctgcccccaggcctaggcatgctgcttgctcggccatccccacttcctcctctaccccaacacatgcaggctaggccttgccctggaacgtggaggccctgcccggggctggggcctagtccagcagccaccaaagtctggcagactttctgcatttgagaaacatgacaaagggccccgcagcccttctgcacccagcacagcctgcccagcccagccctgcccccgggcactgcacagcctgtctgggggccagaccaccccattgtccatccttgttgtccgtgagtccttggcctccaccaagcacgtgtggccattgtgtgcctgccttagtgactccgtggttttgtgaggagcagagtgtgtatgatttttgcctcagaaactatactcttctgtgtaacagaccaataaacaacatttgtcaacactggagcctctgggactggac

SEQ ID NO: 423509 - DNA, 3652 bp, Homo sapiens
accggcagaattcgtgcgtcctgcatcggcagaattcagtggtgctgcatatgaccctggggaacagactagagtcccccatctgtggaccacagcaatgggaacggggaaatgtgttccccaagcctacggaaacgaagcagtggaggacacctgctgtcctttctgtcctgtctggagaatgggctgctgcctcggggacagctagagcccccgctgtggacccagcaagggaaggggaaagtgttccccaagctacggaaacgaagcagcattcgctccgtggatatggaggagatgggcacggggcgggccaccgactatgtgttccggatcatctaccccggccacaggcacgagcacaacgctggtgacatgatcgagatgcagggctttgggcccagcctgccagcctggcacctggagcccctgtgcagtcagggctcctcctgcctctcctgctcctccagcagctccccacatgcaacccccagccactgtagctgcatccccgaccggttgccgctcaggctactgtgtgagagtatgaagaggcagatcgtgtcccgggccttctacggctggctggcacactgccgccacctgtccacggtgcggacccacctgtcggcgctggtgcaccatagcgttatcccacctgaccggcccccgggggcctccgcgggcctcaccaaggacgtgtggagcaagtatcagaaggacaaaaagaactacaaagagctggagctgctgcggcaagtttactacggaggcatagagcacgagatccgcaaggacgtctggccctttctgcttggccactacaagttcggcatgagcaagaaggagatggagcaggtggacgcagtggtggcagcaaggtaccagcaggtgttggcagagtggaaggcctgcgaggtggtggtgaggcagcgggagcgggaggcccacccagccacacgcaccaagttctcctcaggcagcagcatcgacagccacgtgcagcgcctcatccaccgagactccaccatcagcaacgatgtgtttatctcagtggatgatctggaacccccggagccccaggaccctgaagattccagaccaaaacctgagcaggaagcaggacccgggactccgggcaccgccgtggtggagcagcagcattccgtggagttcgactctccagactcaggactgccctcctctcgcaattactccgtggcctcgggcatccagtcaagcctagatgaggggcagagcgtgggcttcgaagaggaggacggcggtggggaggaaggctccagtgggcccggccctgcagctcacactttgagggagccccaggatcccagccaggagaagcctcaggccggagaactggaggccggagaggagcttgcggctgtgtgtgcggctgcctacactatagaattactggacactgtggccttaaacctgcaccgcatagacaaggatgtgcagaggtgtgaccgcaactactggtacttcacgccccccaacctcgagaggctcagagacgtcatgtgcagctacgtgtgggagcacctggacgtgggctatgtgcagggcatgtgcgatctgctggcgcctctcctggtcaccctcgacaatgatcagctggcctacagctgcttcagccacctcatgaagaggatgagccagaacttccccaacgggggtgccatggacacccactttgccaacatgcgctccctcatccagatcctggactcagagctgtttgagctgatgcatcagaatggagactacacccacttctacttctgttatcgctggttcctgctggattttaagagagaactgctgtatgaggatgtgtttgctgtgtgggaggtgatctgggcagccaggcacatctcatcggagcactttgtcctgttcatcgccctcgccctggtggaggcctaccgagagatcatccgtgacaacaacatggacttcactgacatcatcaagtttttcaatgaacgtgctgagcatcacgatgcccaggagatcctgcggattgcccgggacctcgtccacaaggtgcagatgctcatagagaacaagtgagctggggccaggaggcagcagccgtgcagagcctgggctccggcagggagaggtgcaggggagtcaccgcccagacctccccagccaccaaccgaccccacctctgttcctaacaaagcggttgtgagcctggatccgactcccggcagtgctgaccctgcagggcaagtcaggggccaggatgccctcggatcagggccgggatgggaggggtcagcctcagggagcagctgccttgggggacacacctactctgctcccctctcacacatctgggagtagccccactgccacctgcagccgcagcctggactgctgcccacgagtgaacctggggccccacaggattaacaggggctatagcggcctgggccctactcagctggggtggcagagggcgagaggctctgtgctgtgtcccttctgagggtccctttgcagtcccagtatattgtgcgtgcaccagccccagctggagcaaccaaaactgcttctggtttaggcacacgtcacgggtgcgggagacccgggcacgggagacccgggccgccttcaggccgctcccccgagattctggggcagtcggaagatgtgggccctgggtgggagcagcccacttcagcagcactgccactgcctttggccacctgaggtgacccccaggcctccccggccttgtacagtgtacctctgtgtatctgtacagcctcgctcctgccaccccacccttgcgttctgcattaggtacttccctgaaaaccacgtgtaagaagtgatgcttttgccagtggatgatctggaatgcgaccggagcacttgctctgaggaatcccagggtgactctgtcggggaagaatccggtcacagcctcccctcagagacaggcctcagttcgagggcagcccattatctgtcgcagacatctgccatgtccctgagactgcgggaggcaggggatgcatgggtgtccccatctgtccctggtgagaagcaaggctagctctgccttccacatgcttctcaggatgccaagaggcctaggaacccagaaacccccttggaggagctgtgtatgcgggggtgccaggaagggcatagctcctgcccccaggcctaggcatgctgcttgctcggccatccccacttcctcctctaccccaacacatgcaggctaggccttgccctggaacgtggaggccctgcccggggctggggcctagtccagcagccaccaaagtctggcagactttctgcatttgagaaacatgacaaagggccccgcagcccttctgcacccagcacagcctgcccagcccagccctgcccccgggcactgcacagcctgtctgggggccagaccaccccattgtccatccttgttgtccgtgagtccttggcctccaccaagcacgtgtggccattgtgtgcctgccttagtgactccgtggttttgtgaggagcagagtgtgtatgatttttgcctcagaaactatactcttctgtgtaacagaccaataaacaacatttgtcaacactggagcctctgggactggac

SEQ ID NO: 423510 - DNA, 3057 bp, Homo sapiens
tattttatctgaaggctgctggggtcccgggtatggagcctgtccaggactctggtgatacactggtggatatggcatattatactggccatacgcataaggattatagcccatgggcatgggcatttggcaatacccaggatatcctggataggtgggatagggtggtccctgcgcctgtggagcacgagatccgcaaggacgtctggccctttctgcttggccactacaagttcggcatgagcaagaaggagatggagcaggtggacgcagtggtggcagcaaggtaccagcaggtgttggcagagtggaaggcctgcgaggtggtggtgaggcagcgggagcgggaggcccacccagccacacgcaccaagttctcctcaggcagcagcatcgacagccacgtgcagcgcctcatccaccgagactccaccatcagcaacgatgtgtttatctcagtggatgatctggaacccccggagccccaggaccctgaagattccagaccaaaacctgagcaggaagcaggacccgggactccgggcaccgccgtggtggagcagcagcattccgtggagttcgactctccagactcaggactgccctcctctcgcaattactccgtggcctcgggcatccagtcaagcctagatgaggggcagagcgtgggcttcgaagaggaggacggcggtggggaggaaggctccagtgggcccggccctgcagctcacactttgagggagccccaggatcccagccaggagaagcctcaggccggagaactggaggccggagaggagcttgcggctgtgtgtgcggctgcctacactatagaattactggacactgtggccttaaacctgcaccgcatagacaaggatgtgcagaggtgtgaccgcaactactggtacttcacgccccccaacctcgagaggctcagagacgtcatgtgcagctacgtgtgggagcacctggacgtgggctatgtgcagggcatgtgcgatctgctggcgcctctcctggtcaccctcgacaatgatcagctggcctacagctgcttcagccacctcatgaagaggatgagccagaacttccccaacgggggtgccatggacacccactttgccaacatgcgctccctcatccagatcctggactcagagctgtttgagctgatgcatcagaatggagactacacccacttctacttctgttatcgctggttcctgctggattttaagagagaactgctgtatgaggatgtgtttgctgtgtgggaggtgatctgggcagccaggcacatctcatcggagcactttgtcctgttcatcgccctcgccctggtggaggcctaccgagagatcatccgtgacaacaacatggacttcactgacatcatcaagtttttcaatgaacgtgctgagcatcacgatgcccaggagatcctgcggattgcccgggacctcgtccacaaggtgcagatgctcatagagaacaagtgagctggggccaggaggcagcagccgtgcagagcctgggctccggcagggagaggtgcaggggagtcaccgcccagacctccccagccaccaaccgaccccacctctgttcctaacaaagcggttgtgagcctggatccgactcccggcagtgctgaccctgcagggcaagtcaggggccaggatgccctcggatcagggccgggatgggaggggtcagcctcagggagcagctgccttgggggacacacctactctgctcccctctcacacatctgggagtagccccactgccacctgcagccgcagcctggactgctgcccacgagtgaacctggggccccacaggattaacaggggctatagcggcctgggccctactcagctggggtggcagagggcgagaggctctgtgctgtgtcccttctgagggtccctttgcagtcccagtatattgtgcgtgcaccagccccagctggagcaaccaaaactgcttctggtttaggcacacgtcacgggtgcgggagacccgggcacgggagacccgggccgccttcaggccgctcccccgagattctggggcagtcggaagatgtgggccctgggtgggagcagcccacttcagcagcactgccactgcctttggccacctgaggtgacccccaggcctccccggccttgtacagtgtacctctgtgtatctgtacagcctcgctcctgccaccccacccttgcgttctgcattaggtacttccctgaaaaccacgtgtaagaagtgatgcttttgccagtggatgatctggaatgcgaccggagcacttgctctgaggaatcccagggtgactctgtcggggaagaatccggtcacagcctcccctcagagacaggcctcagttcgagggcagcccattatctgtcgcagacatctgccatgtccctgagactgcgggaggcaggggatgcatgggtgtccccatctgtccctggtgagaagcaaggctagctctgccttccacatgcttctcaggatgccaagaggcctaggaacccagaaacccccttggaggagctgtgtatgcgggggtgccaggaagggcatagctcctgcccccaggcctaggcatgctgcttgctcggccatccccacttcctcctctaccccaacacatgcaggctaggccttgccctggaacgtggaggccctgcccggggctggggcctagtccagcagccaccaaagtctggcagactttctgcatttgagaaacatgacaaagggccccgcagcccttctgcacccagcacagcctgcccagcccagccctgcccccgggcactgcacagcctgtctgggggccagaccaccccattgtccatccttgttgtccgtgagtccttggcctccaccaagcacgtgtggccattgtgtgcctgccttagtgactccgtggttttgtgaggagcagagtgtgtatgatttttgcctcagaaactatactcttctgtgtaacagaccaataaacaacatttgtcaacactggagcctctgggactggac

SEQ ID NO: 423511 - DNA, 2984 bp, Homo sapiens
ccaaaacactaaggccattctcccggtctcatgacttcaggcgtttctagaatgagactgagttcaaactggccattgagcgttcagccccctggctcccctacttcccttcagtagccacaggaagacctggggctgttccttcaagcagggctgaagacgtgtcttcatgtttggccagaggcttgtttctctctgcctggctggctgggtcagaagctggcttggtgccccgtggccacagtgttggaggctgtggtgggagagggggtgtgaagagttttgcattccagctcccttctggcccgaggaggcggtgggctgcgggaaggtgctggagtgcaggtggagccgccctgtgttcaccccccaggtgtttatctcagtggatgatctggaacccccggagccccaggaccctgaagattccagaccaaaacctgagcaggaagcaggacccgggactccgggcaccgccgtggtggagcagcagcattccgtggagttcgactctccagactcaggactgccctcctctcgcaattactccgtggcctcgggcatccagtcaagcctagatgaggggcagagcgtgggcttcgaagaggaggacggcggtggggaggaaggctccagtgggcccggccctgcagctcacactttgagggagccccaggatcccagccaggagaagcctcaggccggagaactggaggccggagaggagcttgcggctgtgtgtgcggctgcctacactatagaattactggacactgtggccttaaacctgcaccgcatagacaaggatgtgcagaggtgtgaccgcaactactggtacttcacgccccccaacctcgagaggctcagagacgtcatgtgcagctacgtgtgggagcacctggacgtgggctatgtgcagggcatgtgcgatctgctggcgcctctcctggtcaccctcgacaatgatcagctggcctacagctgcttcagccacctcatgaagaggatgagccagaacttccccaacgggggtgccatggacacccactttgccaacatgcgctccctcatccagatcctggactcagagctgtttgagctgatgcatcagaatggagactacacccacttctacttctgttatcgctggttcctgctggattttaagagagaactgctgtatgaggatgtgtttgctgtgtgggaggtgatctgggcagccaggcacatctcatcggagcactttgtcctgttcatcgccctcgccctggtggaggcctaccgagagatcatccgtgacaacaacatggacttcactgacatcatcaagtttttcaatgaacgtgctgagcatcacgatgcccaggagatcctgcggattgcccgggacctcgtccacaaggtgcagatgctcatagagaacaagtgagctggggccaggaggcagcagccgtgcagagcctgggctccggcagggagaggtgcaggggagtcaccgcccagacctccccagccaccaaccgaccccacctctgttcctaacaaagcggttgtgagcctggatccgactcccggcagtgctgaccctgcagggcaagtcaggggccaggatgccctcggatcagggccgggatgggaggggtcagcctcagggagcagctgccttgggggacacacctactctgctcccctctcacacatctgggagtagccccactgccacctgcagccgcagcctggactgctgcccacgagtgaacctggggccccacaggattaacaggggctatagcggcctgggccctactcagctggggtggcagagggcgagaggctctgtgctgtgtcccttctgagggtccctttgcagtcccagtatattgtgcgtgcaccagccccagctggagcaaccaaaactgcttctggtttaggcacacgtcacgggtgcgggagacccgggcacgggagacccgggccgccttcaggccgctcccccgagattctggggcagtcggaagatgtgggccctgggtgggagcagcccacttcagcagcactgccactgcctttggccacctgaggtgacccccaggcctccccggccttgtacagtgtacctctgtgtatctgtacagcctcgctcctgccaccccacccttgcgttctgcattaggtacttccctgaaaaccacgtgtaagaagtgatgcttttgccagtggatgatctggaatgcgaccggagcacttgctctgaggaatcccagggtgactctgtcggggaagaatccggtcacagcctcccctcagagacaggcctcagttcgagggcagcccattatctgtcgcagacatctgccatgtccctgagactgcgggaggcaggggatgcatgggtgtccccatctgtccctggtgagaagcaaggctagctctgccttccacatgcttctcaggatgccaagaggcctaggaacccagaaacccccttggaggagctgtgtatgcgggggtgccaggaagggcatagctcctgcccccaggcctaggcatgctgcttgctcggccatccccacttcctcctctaccccaacacatgcaggctaggccttgccctggaacgtggaggccctgcccggggctggggcctagtccagcagccaccaaagtctggcagactttctgcatttgagaaacatgacaaagggccccgcagcccttctgcacccagcacagcctgcccagcccagccctgcccccgggcactgcacagcctgtctgggggccagaccaccccattgtccatccttgttgtccgtgagtccttggcctccaccaagcacgtgtggccattgtgtgcctgccttagtgactccgtggttttgtgaggagcagagtgtgtatgatttttgcctcagaaactatactcttctgtgtaacagaccaataaacaacatttgtcaacactggagcctctgggactggac

SEQ ID NO: 423512 - DNA, 4706 bp, Homo sapiens
tgtgcggggctcggaagatggctgcggagccgagcaccgggcagtggctgcggcggcggcggcggcggcgggccgggagcgcggcgggcgggggctccgccttgcgcgtggggcgctgagccgagaggcgcggaggcggcgagggcgcgggggctctgaggaccgctcggcgccgcctcctgccacaccatgggcagcgcagaggacgcagtcaaagagaaactgctgtggaacgtgaagaaggaggtgaagcaaatcatggaggaggctgtcaccaggaagtttgtgcatgaagacagcagccacatcattgctttatgtggtgcagtggaggcttgcctcttgcatcagctgagacgccgtgccgctggcttcctgcgcagtgacaagatggcagccctgttcaccaaggtggggaagacgtgcccagtggcgggggagatttgccacaaggtacaggagctgcagcaacaagcagagggcaggaaaccctcaggggtcagccaggaggccctgcggagacagggctcagccagcgggaaggccccggccctcagccctcaggccttgaaacacgtatgggtacgcacggcgctcatcgagaaagttctggacaaggtcgtgcaatacctggcggaaaactgcagcaagtactacgagaaggaggcactgctggcagaccctgtgttcggcccgatcctggcctctcttctagtgggaccctgtgccttggaatacactaagctcaagacagccgatcactactggactgacccctctgctgatgagctggtccagcggcaccgcatccggggtccacctactcgccaggactcccctgcaaagcgcccagccctggggatccggaaacggcactcaagcggcagcgcgtcggaggacaggctggctgcctgtgcccgcgagtgtgtggagtccctgcaccagaactcacggacgcggctgctctatggcaagaaccacgtgctggtgcagccgaaggaggatatggaggcggtccctggctacctctccctgcaccagtctgcagagagcctgactctgaagtggacccccaaccagctcatgaatgggactctgggggactccgagctggaaaagagcgtttactgggactatgccctcgtggtgcccttcagccaggtcgtgtgcatccactgccaccagcaaaagagcggtggcacgcttgtgctggtgagccaggatggcatccagaggccgccgctgcatttcccacagggaggacacctgctgtcctttctgtcctgtctggagaatgggctgctgcctcggggacagctagagcccccgctgtggacccagcaagggaaggggaaagtgttccccaagctacggaaacgaagcagcattcgctccgtggatatggaggagatgggcacggggcgggccaccgactatgtgttccggatcatctaccccggccacaggcacgagcacaacgctggtgacatgatcgagatgcagggctttgggcccagcctgccagcctggcacctggagcccctgtgcagtcagggctcctcctgcctctcctgctcctccagcagctccccacatgcaacccccagccactgtagctgcatccccgaccggttgccgctcaggctactgtgtgagagtatgaagaggcagatcgtgtcccgggccttctacggctggctggcacactgccgccacctgtccacggtgcggacccacctgtcggcgctggtgcaccatagcgttatcccacctgaccggcccccgggggcctccgcgggcctcaccaaggacgtgtggagcaagtatcagaaggacaaaaagaactacaaagagctggagctgctgcggcaagtttactacggaggcatagagcacgagatccgcaaggacgtctggccctttctgcttggccactacaagttcggcatgagcaagaaggagatggagcaggtggacgcagtggtggcagcaaggtaccagcaggtgttggcagagtggaaggcctgcgaggtggtggtgaggcagcgggagcgggaggcccacccagccacacgcaccaagttctcctcaggcagcagcatcgacagccacgtgcagcgcctcatccaccgagactccaccatcagcaacgatgtgtttatctcagtggatgatctggaacccccggagccccaggaccctgaagattccagaccaaaacctgagcaggaagcaggacccgggactccgggcaccgccgtggtggagcagcagcattccgtggagttcgactctccagactcaggactgccctcctctcgcaattactccgtggcctcgggcatccagtcaagcctagatgaggggcagagcgtgggcttcgaagaggaggacggcggtggggaggaaggctccagtgggcccggccctgcagctcacactttgagggagccccaggatcccagccaggagaagcctcaggccggagaactggaggccggagaggagcttgcggctgtgtgtgcggctgcctacactatagaattactggacactgtggccttaaacctgcaccgcatagacaaggatgtgcagaggtgtgaccgcaactactggtacttcacgccccccaacctcgagaggctcagagacgtcatgtgcagctacgtgtgggagcacctggacgtgggctatgtgcagggcatgtgcgatctgctggcgcctctcctggtcaccctcgacaatgatcagctggcctacagctgcttcagccacctcatgaagaggatgagccagaacttccccaacgggggtgccatggacacccactttgccaacatgcgctccctcatccagatcctggactcagagctgtttgagctgatgcatcagaatggagactacacccacttctacttctgttatcgctggttcctgctggattttaagagagaactgctgtatgaggatgtgtttgctgtgtgggaggtgatctgggcagccaggcacatctcatcggagcactttgtcctgttcatcgccctcgccctggtggaggcctaccgagagatcatccgtgacaacaacatggacttcactgacatcatcaagtttttcaatgaacgtgctgagcatcacgatgcccaggagatcctgcggattgcccgggacctcgtccacaaggtgcagatgctcatagagaacaagtgagctggggccaggaggcagcagccgtgcagagcctgggctccggcagggagaggtgcaggggagtcaccgcccagacctccccagccaccaaccgaccccacctctgttcctaacaaagcggttgtgagcctggatccgactcccggcagtgctgaccctgcagggcaagtcaggggccaggatgccctcggatcagggccgggatgggaggggtcagcctcagggagcagctgccttgggggacacacctactctgctcccctctcacacatctgggagtagccccactgccacctgcagccgcagcctggactgctgcccacgagtgaacctggggccccacaggattaacaggggctatagcggcctgggccctactcagctggggtggcagagggcgagaggctctgtgctgtgtcccttctgagggtccctttgcagtcccagtatattgtgcgtgcaccagccccagctggagcaaccaaaactgcttctggtttaggcacacgtcacgggtgcgggagacccgggcacgggagacccgggccgccttcaggccgctcccccgagattctggggcagtcggaagatgtgggccctgggtgggagcagcccacttcagcagcactgccactgcctttggccacctgaggtgacccccaggcctccccggccttgtacagtgtacctctgtgtatctgtacagcctcgctcctgccaccccacccttgcgttctgcattaggtactcggagcacttgctctgaggaatcccagggtgactctgtcggggaagaatccggtcacagcctcccctcagagacaggcctcagttcgagggcagcccattatctgtcgcagacatctgccatgtccctgagactgcgggaggcaggggatgcatgggtgtccccatctgtccctggtgagaagcaaggctagctctgccttccacatgcttctcaggatgccaagaggcctaggaacccagaaacccccttggaggagctgtgtatgcgggggtgccaggaagggcatagctcctgcccccaggcctaggcatgctgcttgctcggccatccccacttcctcctctaccccaacacatgcaggctaggccttgccctggaacgtggaggccctgcccggggctggggcctagtccagcagccaccaaagtctggcagactttctgcatttgagaaacatgacaaagggccccgcagcccttctgcacccagcacagcctgcccagcccagccctgcccccgggcactgcacagcctgtctgggggccagaccaccccattgtccatccttgttgtccgtgagtccttggcctccaccaagcacgtgtggccattgtgtgcctgccttagtgactccgtggttttgtgaggagcagagtgtgtatgatttttgcctcagaaactatactcttctgtgtaacagaccaataaacaacatttgtcaacactggagcctctgggactggac

SEQ ID NO: 423513 - DNA, 2477 bp, Homo sapiens
tgctcctgaatcacacttggctccccctgcctggaacgcttttttcctgcacacccctcccccgcgcctcttcattcttaggggcctaccagacctccacttcagccacacctcttcaggaagctttccctcatccccgcaccccgccccacataccaagcgtgacggccttggctctccctaagtcggagtgccttgggggggacccgtgggttgttccccgttgtctccctgtggggggtgcacagtacatgccttagggtcgtggaaaggctgacttctgggcggcaggtggctctggaggacgtcttcccagggatcccgagggagggaagaatggggcacagccacagtgactctccccctgcctttcagctacgtgtgggagcacctggacgtgggctatgtgcagggcatgtgcgatctgctggcgcctctcctggtcaccctcgacaatgatcagctggcctacagctgcttcagccacctcatgaagaggatgagccagaacttccccaacgggggtgccatggacacccactttgccaacatgcgctccctcatccagatcctggactcagagctgtttgagctgatgcatcagaatggagactacacccacttctacttctgttatcgctggttcctgctggattttaagagagaactgctgtatgaggatgtgtttgctgtgtgggaggtgatctgggcagccaggcacatctcatcggagcactttgtcctgttcatcgccctcgccctggtggaggcctaccgagagatcatccgtgacaacaacatggacttcactgacatcatcaagtttttcaatgaacgtgctgagcatcacgatgcccaggagatcctgcggattgcccgggacctcgtccacaaggtgcagatgctcatagagaacaagtgagctggggccaggaggcagcagccgtgcagagcctgggctccggcagggagaggtgcaggggagtcaccgcccagacctccccagccaccaaccgaccccacctctgttcctaacaaagcggttgtgagcctggatccgactcccggcagtgctgaccctgcagggcaagtcaggggccaggatgccctcggatcagggccgggatgggaggggtcagcctcagggagcagctgccttgggggacacacctactctgctcccctctcacacatctgggagtagccccactgccacctgcagccgcagcctggactgctgcccacgagtgaacctggggccccacaggattaacaggggctatagcggcctgggccctactcagctggggtggcagagggcgagaggctctgtgctgtgtcccttctgagggtccctttgcagtcccagtatattgtgcgtgcaccagccccagctggagcaaccaaaactgcttctggtttaggcacacgtcacgggtgcgggagacccgggcacgggagacccgggccgccttcaggccgctcccccgagattctggggcagtcggaagatgtgggccctgggtgggagcagcccacttcagcagcactgccactgcctttggccacctgaggtgacccccaggcctccccggccttgtacagtgtacctctgtgtatctgtacagcctcgctcctgccaccccacccttgcgttctgcattaggtacttccctgaaaaccacgtgtaagaagtgatgcttttgccagtggatgatctggaatgcgaccggagcacttgctctgaggaatcccagggtgactctgtcggggaagaatccggtcacagcctcccctcagagacaggcctcagttcgagggcagcccattatctgtcgcagacatctgccatgtccctgagactgcgggaggcaggggatgcatgggtgtccccatctgtccctggtgagaagcaaggctagctctgccttccacatgcttctcaggatgccaagaggcctaggaacccagaaacccccttggaggagctgtgtatgcgggggtgccaggaagggcatagctcctgcccccaggcctaggcatgctgcttgctcggccatccccacttcctcctctaccccaacacatgcaggctaggccttgccctggaacgtggaggccctgcccggggctggggcctagtccagcagccaccaaagtctggcagactttctgcatttgagaaacatgacaaagggccccgcagcccttctgcacccagcacagcctgcccagcccagccctgcccccgggcactgcacagcctgtctgggggccagaccaccccattgtccatccttgttgtccgtgagtccttggcctccaccaagcacgtgtggccattgtgtgcctgccttagtgactccgtggttttgtgaggagcagagtgtgtatgatttttgcctcagaaactatactcttctgtgtaacagaccaataaacaacatttgtcaacactggagcctctgggactggac

SEQ ID NO: 423514 - DNA, 4718 bp, Homo sapiens
tgtgcggggctcggaagatggctgcggagccgagcaccgggcagtggctgcggcggcggcggcggcggcgggccgggagcgcggcgggcgggggctccgccttgcgcgtggggcgctgagccgagaggcgcggaggcggcgagggcgcgggggctctgaggaccgctcggcgccgcctcctgccacaccatgggcagcgcagaggacgcagtcaaagagaaactgctgtggaacgtgaagaaggaggtgaagcaaatcatggaggaggctgtcaccaggaagtttgtgcatgaagacagcagccacatcattgctttatgtggtgcagtggaggcttgcctcttgcatcagctgagacgccgtgccgctggcttcctgcgcagtgacaagatggcagccctgttcaccaaggtggggaagacgtgcccagtggcgggggagatttgccacaaggtacaggagctgcagcaacaagcagagggcaggaaaccctcaggggtcagccaggaggccctgcggagacagggctcagccagcgggaaggccccggccctcagccctcaggccttgaaacacgtatgggtacgcacggcgctcatcgagaaagttctggacaaggtcgtgcaatacctggcggaaaactgcagcaagtactacgagaaggaggcactgctggcagaccctgtgttcggcccgatcctggcctctcttctagtgggaccctgtgccttggaatacactaagctcaagacagccgatcactactggactgacccctctgctgatgagctggtccagcggcaccgcatccggggtccacctactcgccaggactcccctgcaaagcgcccagccctggggatccggaaacggcactcaagcggcagcgcgtcggaggacaggctggctgcctgtgcccgcgagtgtgtggagtccctgcaccagaactcacggacgcggctgctctatggcaagaaccacgtgctggtgcagccgaaggaggatatggaggcggtccctggctacctctccctgcaccagtctgcagagagcctgactctgaagtggacccccaaccagctcatgaatgggactctgggggactccgagctggaaaagagcgtttactgggactatgccctcgtggtgcccttcagccaggtcgtgtgcatccactgccaccagcaaaagagcggtggcacgcttgtgctggtgagccaggatggcatccagaggccgccgctgcatttcccacagggaggacacctgctgtcctttctgtcctgtctggagaatgggctgctgcctcggggacagctagagcccccgctgtggacccagcaagggaaggggaaagtgttccccaagctacggaaacgaagcagcattcgctccgtggatatggaggagatgggcacggggcgggccaccgactatgtgttccggatcatctaccccggccacaggcacgagcacaacgctggtgacatgatcgagatgcagggctttgggcccagcctgccagcctggcacctggagcccctgtgcagtcagggctcctcctgcctctcctgctcctccagcagctccccacatgcaacccccagccactgtagctgcatccccgaccggttgccgctcaggctactgtgtgagagtatgaagaggcagatcgtgtcccgggccttctacggctggctggcacactgccgccacctgtccacggtgcggacccacctgtcggcgctggtgcaccatagcgttatcccacctgaccggcccccgggggcctccgcgggcctcaccaaggacgtgtggagcaagtatcagaaggacaaaaagaactacaaagagctggagctgctgcggcaagtttactacggaggcatagagcacgagatccgcaaggacgtctggccctttctgcttggccactacaagttcggcatgagcaagaaggagatggagcaggtggacgcagtggtggcagcaaggtaccagcaggtgttggcagagtggaaggcctgcgaggtggtggtgaggcagcgggagcgggaggcccacccagccacacgcaccaagttctcctcaggcagcagcatcgacagccacgtgcagcgcctcatccaccgagactccaccatcagcaacgatgtgtttatctcagtggatgatctggaacccccggagccccaggaccctgaagattccagaccaaaacctgagcaggaagcaggacccgggactccgggcaccgccgtggtggagcagcagcattccgtggagttcgactctccagactcaggactgccctcctctcgcaattactccgtggcctcgggcatccagtcaagcctagatgaggggcagagcgtgggcttcgaagaggaggacggcggtggggaggaaggctccagtgggcccggccctgcagctcacactttgagggagccccaggatcccagccaggagaagcctcaggccggagaactggaggccggagaggagcttgcggctgtgtgtgcggctgcctacactatagaattactggacactgtggccttaaacctgcaccgcatagacaaggatgtgcagaggtgtgaccgcaactactggtacttcacgccccccaacctcgagaggctcagagacgtcatgtgcagctacgtgtgggagcacctggacgtgggctatgtgcagggcatgtgcgatctgctggcgcctctcctggtcaccctcgacaatgatcagctggcctacagctgcttcagccacctcatgaagaggatgagccagaacttccccaacgggggtgccatggacacccactttgccaacatgcgctccctcatccagatcctggactcagagctgtttgagctgatgcatcagaatggagactacacccacttctacttctgttatcgctggttcctgctggattttaagagagaactgctgtatgaggatgtgtttgctgtgtgggaggtgatctgggcagccaggcacatctcatcggagcactttgtcctgttcatcgccctcgccctggtggaggcctaccgagagatcatccgtgacaacaacatggacttcactgacatcatcaagtttttcaatgaacgtgctgagcatcacgatgcccaggagatcctgcggattgcccgggacctcgtccacaaggtgcagatgctcatagagaacaagtgagctggggccaggaggcagcagccgtgcagagcctgggctccggcagggagaggtgcaggggagtcaccgcccagacctccccagccaccaaccgaccccacctctgttcctaacaaagcggttgtgagcctggatccgactcccggcagtgctgaccctgcagggcaagtcaggggccaggatgccctcggatcagggccgggatgggaggggtcagcctcagggagcagctgccttgggggacacacctactctgctcccctctcacacatctgggagtagccccactgccacctgcagccgcagcctggactgctgcccacgagtgaacctggggccccacaggattaacaggggctatagcggcctgggccctactcagctggggtggcagagggcgagaggctctgtgctgtgtcccttctgagggtccctttgcagtcccagtatattgtgcgtgcaccagccccagctggagcaaccaaaactgcttctggtttaggcacacgtcacgggtgcgggagacccgggcacgggagacccgggccgccttcaggccgctcccccgagattctggggcagtcggaagatgtgggccctgggtgggagcagcccacttcagcagcactgccactgcctttggccacctgaggtgacccccaggcctccccggccttgtacagtgtacctctgtgtatctgtacagcctcgctcctgccaccccacccttgcgttctgcattaggtacttccctgaaaaccacgtgtaagaagtgatgcttttgccagtggatgatctggaatgcgaccggagcacttgctctgaggaatcccagggtgactctgtcggggaagaatccggtcacagcctcccctcagagacaggcctcagttcgagggcagcccattatctgtcgcagacatctgccatgtccctgagactgcgggaggcaggggatgcatgggtgtccccatctgtccctggtgagaagcaaggctagctctgccttccacatgcttctcaggatgccaagaggcctaggaacccagaaacccccttggaggagctgtgcatgctgcttgctcggccatccccacttcctcctctaccccaacacatgcaggctaggccttgccctggaacgtggaggccctgcccggggctggggcctagtccagcagccaccaaagtctggcagactttctgcatttgagaaacatgacaaagggccccgcagcccttctgcacccagcacagcctgcccagcccagccctgcccccgggcactgcacagcctgtctgggggccagaccaccccattgtccatccttgttgtccgtgagtccttggcctccaccaagcacgtgtggccattgtgtgcctgccttagtgactccgtggttttgtgaggagcagagtgtgtatgatttttgcctcagaaactatactcttctgtgtaacagaccaataaacaacatttgtcaacactggagcctctgggactggac

SEQ ID NO: 423515 - DNA, 3989 bp, Homo sapiens
tgtgcggggctcggaagatggctgcggagccgagcaccgggcagtggctgcggcggcggcggcggcggcgggccgggagcgcggcgggcgggggctccgccttgcgcgtggggcgctgagccgagaggcgcggaggcggcgagggcgcgggggctctgaggaccgctcggcgccgcctcctgccacaccatgggcagcgcagaggacgcagtcaaagagaaactgctgtggaacgtgaagaaggaggtgaagcaaatcatggaggaggctgtcaccaggaagtttgtgcatgaagacagcagccacatcattgctttatgtggtgcagtggaggcttgcctcttgcatcagctgagacgccgtgccgctggcttcctgcgcagtgacaagatggcagccctgttcaccaaggtggggaagacgtgcccagtggcgggggagatttgccacaaggtacaggagctgcagcaacaagcagagggcaggaaaccctcaggggtcagccaggaggccctgcggagacagggctcagccagcgggaaggccccggccctcagccctcaggccttgaaacacgtatgggtacgcacggcgctcatcgagaaagttctggacaaggtcgtgcaatacctggcggaaaactgcagcaagtactacgagaaggaggcactgctggcagaccctgtgttcggcccgatcctggcctctcttctagtgggaccctgtgccttggaatacactaagctcaagacagccgatcactactggactgacccctctgctgatgagctggtccagcggcaccgcatccggggtccacctactcgccaggactcccctgcaaagcgcccagccctggggatccggaaacggcactcaagcggcagcgcgtcggaggacaggctggctgcctgtgcccgcgagtgtgtggagtccctgcaccagaactcacggacgcggctgctctatggcaagaaccacgtgctggtgcagccgaaggaggatatggaggcggtccctggctacctctccctgcaccagtctgcagagagcctgactctgaagtggacccccaaccagctcatgaatgggactctgggggactccgagctggaaaagagcgtttactgggactatgccctcgtggtgcccttcagccaggtcgtgtgcatccactgccaccagcaaaagagcggtggcacgcttgtgctggtgagccaggatggcatccagaggccgccgctgcatttcccacagggaggacacctgctgtcctttctgtcctgtctggagaatgggctgctgcctcggggacagctagagcccccgctgtggacccagcaagggaaggggaaagtgttccccaagctacggaaacgaagcagcattcgctccgtggatatggaggagatgggcacggggcgggccaccgactatgtgttccggatcatctaccccggccacaggcacgagcacaacgctggtgacatgatcgagatgcagggctttgggcccagcctgccagcctggcacctggagcccctgtgcagtcagggctcctcctgcctctcctgctcctccagcagctccccacatgcaacccccagccactgtagctgcatccccgaccggttgccgctcaggctactgtgtgagagtatgaagaggcagatcgtgtcccgggccttctacggctggctggcacactgccgccacctgtccacggtgcggacccacctgtcggcgctggtgcaccatagcgttatcccacctgaccggcccccgggggcctccgcgggcctcaccaaggacgtgtggagcaagtatcagaaggacaaaaagaactacaaagagctggagctgctgcggcaagtttactacggaggcatagagcacgagatccgcaaggacgtctggccctttctgcttggccactacaagttcggcatgagcaagaaggagatggagcaggtggacgcagtggtggcagcaaggtaccagcaggtgttggcagagtggaaggcctgcgaggtggtggtgaggcagcgggagcgggaggcccacccagccacacgcaccaagttctcctcaggcagcagcatcgacagccacgtgcagcgcctcatccaccgagactccaccatcagcaacgatgtgtttatctcagtggatgatctggaacccccggagccccaggaccctgaagattccagaccaaaacctgagcaggaagcaggacccgggactccgggcaccgccgtggtggagcagcagcattccgtggagttcgactctccagactcaggactgccctcctctcgcaattactccgtggcctcgggcatccagtcaagcctagatgaggggcagagcgtgggcttcgaagaggaggacggcggtggggaggaaggctccagtgggcccggccctgcagctcacactttgagggagccccaggatcccagccaggagaagcctcaggccggagaactggaggccggagaggagcttgcggctgtgtgtgcggctgcctacactatagaattactggacactgtggccttaaacctgcaccgcatagacaaggatgtgcagaggtgtgaccgcaactactggtacttcacgccccccaacctcgagaggctcagagacgtcatgtgcagctacgtgtgggagcacctggacgtgggctatgtgcagggcatgtgcgatctgctggcgcctctcctggtcaccctcgacaatgatcagctggcctacagctgcttcagccacctcatgaagaggatgagccagaacttccccaacgggggtgccatggacacccactttgccaacatgcgctccctcatccagatcctggactcagagctgtttgagctgatgcatcagaatggagactacacccacttctacttctgttatcgctggttcctgctggattttaagagagaactgctgtatgaggatgtgtttgctgtgtgggaggtgatctgggcagccaggcacatctcatcggagcactttgtcctgttcatcgccctcgccctggtggaggcctaccgagagatcatccgtgacaacaacatggacttcactgacatcatcaagtttttcaatgaacgtgctgagcatcacgatgcccaggagatcctgcggattgcccgggacctcgtccacaagtccctgaaaaccacgtgtaagaagtgatgcttttgccagtggatgatctggaatgcgaccggagcacttgctctgaggaatcccagggtgactctgtcggggaagaatccggtcacagcctcccctcagagacaggcctcagttcgagggcagcccattatctgtcgcagacatctgccatgtccctgagactgcgggaggcaggggatgcatgggtgtccccatctgtccctggtgagaagcaaggctagctctgccttccacatgcttctcaggatgccaagaggcctaggaacccagaaacccccttggaggagctgtgtatgcgggggtgccaggaagggcatagctcctgcccccaggcctaggcatgctgcttgctcggccatccccacttcctcctctaccccaacacatgcaggctaggccttgccctggaacgtggaggccctgcccggggctggggcctagtccagcagccaccaaagtctggcagactttctgcatttgagaaacatgacaaagggccccgcagcccttctgcacccagcacagcctgcccagcccagccctgcccccgggcactgcacagcctgtctgggggccagaccaccccattgtccatccttgttgtccgtgagtccttggcctccaccaagcacgtgtggccattgtgtgcctgccttagtgactccgtggttttgtgaggagcagagtgtgtatgatttttgcctcagaaactatactcttctgtgtaacagaccaataaacaacatttgtcaacactggagcctctgggactggac

SEQ ID NO: 423516 - DNA, 4593 bp, Homo sapiens
tgtgcggggctcggaagatggctgcggagccgagcaccgggcagtggctgcggcggcggcggcggcggcgggccgggagcgcggcgggcgggggctccgccttgcgcgtggggcgctgagccgagaggcgcggaggcggcgagggcgcgggggctctgaggaccgctcggcgccgcctcctgccacaccatgggcagcgcagaggacgcagtcaaagagaaactgctgtggaacgtgaagaaggaggtgaagcaaatcatggaggaggctgtcaccaggaagtttgtgcatgaagacagcagccacatcattgctttatgtggtgcagtggaggcttgcctcttgcatcagctgagacgccgtgccgctggcttcctgcgcagtgacaagatggcagccctgttcaccaaggtggggaagacgtgcccagtggcgggggagatttgccacaaggtacaggagctgcagcaacaagcagagggcaggaaaccctcaggggtcagccaggaggccctgcggagacagggctcagccagcgggaaggccccggccctcagccctcaggccttgaaacacgtatgggtacgcacggcgctcatcgagaaagttctggacaaggtcgtgcaatacctggcggaaaactgcagcaagtactacgagaaggaggcactgctggcagaccctgtgttcggcccgatcctggcctctcttctagtgggaccctgtgccttggaatacactaagctcaagacagccgatcactactggactgacccctctgctgatgagctggtccagcggcaccgcatccggggtccacctactcgccaggactcccctgcaaagcgcccagccctggggatccggaaacggcactcaagcggcagcgcgtcggaggacaggctggctgcctgtgcccgcgagtgtgtggagtccctgcaccagaactcacggacgcggctgctctatggcaagaaccacgtgctggtgcagccgaaggaggatatggaggcggtccctggctacctctccctgcaccagtctgcagagagcctgactctgaagtggacccccaaccagctcatgaatgggactctgggggactccgagctggaaaagagcgtttactgggactatgccctcgtggtgcccttcagccaggtcgtgtgcatccactgccaccagcaaaagagcggtggcacgcttgtgctggtgagccaggatggcatccagaggccgccgctgcatttcccacagggaggacacctgctgtcctttctgtcctgtctggagaatgggctgctgcctcggggacagctagagcccccgctgtggacccagcaagggaaggggaaagtgttccccaagctacggaaacgaagcagcattcgctccgtggatatggaggagatgggcacggggcgggccaccgactatgtgttccggatcatctaccccggccacaggcacgagcacaacgctggtgacatgatcgagatgcagggctttgggcccagcctgccagcctggcacctggagcccctgtgcagtcagggctcctcctgcctctcctgctcctccagcagctccccacatgcaacccccagccactgtagctgcatccccgaccggttgccgctcaggctactgtgtgagagtatgaagaggcagatcgtgtcccgggccttctacggctggctggcacactgccgccacctgtccacggtgcggacccacctgtcggcgctggtgcaccatagcgttatcccacctgaccggcccccgggggcctccgcgggcctcaccaaggacgtgtggagcaagtatcagaaggacaaaaagaactacaaagagctggagctgctgcggcaagtttactacggaggcatagagcacgagatccgcaaggacgtctggccctttctgcttggccactacaagttcggcatgagcaagaaggagatggagcaggtggacgcagtggtggcagcaaggtaccagcaggtgttggcagagtggaaggcctgcgaggtggtggtgaggcagcgggagcgggaggcccacccagccacacgcaccaagttctcctcaggcagcagcatcgacagccacgtgcagcgcctcatccaccgagactccaccatcagcaacgatgtgtttatctcagtggatgatctggaacccccggagccccaggaccctgaagattccagaccaaaacctgagcaggaagcaggacccgggactccgggcaccgccgtggtggagcagcagcattccgtggagttcgactctccagactcaggactgccctcctctcgcaattactccgtggcctcgggcatccagtcaagcctagatgaggggcagagcgtgggcttcgaagaggaggacggcggtggggaggaaggctccagtgggcccggccctgcagctcacactttgagggagccccaggatcccagccaggagaagcctcaggccggagaactggaggccggagaggagcttgcggctgtgtgtgcggctgcctacactatagaattactggacactgtggccttaaacctgcaccgcatagacaaggatgtgcagaggtgtgaccgcaactactggtacttcacgccccccaacctcgagaggctcagagacgtcatgtgcagctacgtgtgggagcacctggacgtgggctatgtgcagggcatgtgcgatctgctggcgcctctcctggtcaccctcgacaatgatcagctggcctacagctgcttcagccacctcatgaagaggatgagccagaacttccccaacgggggtgccatggacacccactttgccaacatgcgctccctcatccagatcctggactcagagctgtttgagctgatgcatcagaatggagactacacccacttctacttctgttatcgctggttcctgctggattttaagagagaactgctgtatgaggatgtgtttgctgtgtgggaggtgatctgggcagccaggcacatctcatcggagcactttgtcctgttcatcgccctcgccctggtggaggcctaccgagagatcatccgtgacaacaacatggacttcactgacatcatcaagtttttcaatgaacgtgctgagcatcacgatgcccaggagatcctgcggattgcccgggacctcgtccacaaggtgcagatgctcatagagaacaagtgagctggggccaggaggcagcagccgtgcagagcctgggctccggcagggagaggtgcaggggagtcaccgcccagacctccccagccaccaaccgaccccacctctgttcctaacaaagcggttgtgagcctggatccgactcccggcagtgctgaccctgcagggcaagtcaggggccaggatgccctcggatcagggccgggatgggaggggtcagcctcagggagcagctgccttgggggacacacctactctgctcccctctcacacatctgggagtagccccactgccacctgcagccgcagcctggactgctgcccacgagtgaacctggggccccacaggattaacaggggctatagcggcctgggccctactcagctggggtggcagagggcgagaggctctgtgctgtgtcccttctgagggtccctttgcagtcccagtatattgtgcgtgcaccagccccagctggagcaaccaaaactgcttctggtttaggcacacgtcacgggtgcgggagacccgggcacgggagacccgggccgccttcaggccgctcccccgagattctggggcagtcggaagatgtgggccctgggtgggagcagcccacttcagcagcactgccactgcctttggccacctgaggtgacccccaggcctccccggccttgtacagtgtacctctgtgtatctgtacagcctcgctcctgccaccccacccttgcgttctgcattaggtacttccctgaaaaccacgtgtaagaagtgatgcttttgccagtggatgatctggaatgcgaccggagcacttgctctgaggaatcccagggtgactctgtcggggaagaatccggtcacagcctcccctcagagacaggcctcagttcgagggcagcccattatctgtcgcagacatctgccatgtccctgagactgcgggaggcaggggatgcatgggtgtccccatctgtccctggtgagaagcaaggctagctctgccttccacatgcttctcaggatgccaagaggcctaggaacccagaaacccccttggaggagctgtgtatgcgggggtgccaggaagggcatagctcctgcccccaggcctaggcatgctgcttgctcggccatccccacttcctcctctaccccaacacatgcaggctaggccttgccctggaacgtggaggccctgcccggggctggggcctagtccagcagccaccaaacacgtgtggccattgtgtgcctgccttagtgactccgtggttttgtgaggagcagagtgtgtatgatttttgcctcagaaactatactcttctgtgtaacagaccaataaacaacatttgtcaacactggagcctctgggactggac

SEQ ID NO: 423517 - DNA, 4129 bp, Homo sapiens
tgtgcggggctcggaagatggctgcggagccgagcaccgggcagtggctgcggcggcggcggcggcggcgggccgggagcgcggcgggcgggggctccgccttgcgcgtggggcgctgagccgagaggcgcggaggcggcgagggcgcgggggctctgaggaccgctcggcgccgcctcctgccacaccatgggcagcgcagaggacgcagtcaaagagaaactgctgtggaacgtgaagaaggaggtgaagcaaatcatggaggaggctgtcaccaggaagtttgtgcatgaagacagcagccacatcattgctttatgtggtgcagtggaggcttgcctcttgcatcagctgagacgccgtgccgctggcttcctgcgcagtgacaagatggcagccctgttcaccaaggtggggaagacgtgcccagtggcgggggagatttgccacaaggtacaggagctgcagcaacaagcagagggcaggaaaccctcaggggtcagccaggaggccctgcggagacagggctcagccagcgggaaggccccggccctcagccctcaggccttgaaacacgtatgggtacgcacggcgctcatcgagaaagttctggacaaggtcgtgcaatacctggcggaaaactgcagcaagtactacgagaaggaggcactgctggcagaccctgtgttcggcccgatcctggcctctcttctagtgggaccctgtgccttggaatacactaagctcaagacagccgatcactactggactgacccctctgctgatgagctggtccagcggcaccgcatccggggtccacctactcgccaggactcccctgcaaagcgcccagccctggggatccggaaacggcactcaagcggcagcgcgtcggaggacaggctggctgcctgtgcccgcgagtgtgtggagtccctgcaccagaactcacggacgcggctgctctatggcaagaaccacgtgctggtgcagccgaaggaggatatggaggcggtccctggctacctctccctgcaccagtctgcagagagcctgactctgaagtggacccccaaccagctcatgaatgggactctgggggactccgagctggaaaagagcgtttactgggactatgccctcgtggtgcccttcagccaggtcgtgtgcatccactgccaccagcaaaagagcggtggcacgcttgtgctggtgagccaggatggcatccagaggccgccgctgcatttcccacagggaggacacctgctgtcctttctgtcctgtctggagaatgggctgctgcctcggggacagctagagcccccgctgtggacccagcaagggaaggggaaagtgttccccaagctacggaaacgaagcagcattcgctccgtggatatggaggagatgggcacggggcgggccaccgactatgtgttccggatcatctaccccggccacaggcacgagcacaacgctggtgacatgatcgagatgcagggctttgggcccagcctgccagcctggcacctggagcccctgtgcagtcagggctcctcctgcctctcctgctcctccagcagctccccacatgcaacccccagccactgtagctgcatccccgaccggttgccgctcaggctactgtgtgagagtatgaagaggcagatcgtgtcccgggccttctacggctggctggcacactgccgccacctgtccacggtgcggacccacctgtcggcgctggtgcaccatagcgttatcccacctgaccggcccccgggggcctccgcgggcctcaccaaggacgtgtggagcaagtatcagaaggacaaaaagaactacaaagagctggagctgctgcggcaagtttactacggaggcatagagcacgagatccgcaaggacgtctggccctttctgcttggccactacaagttcggcatgagcaagaaggagatggagcaggtggacgcagtggtggcagcaaggtaccagcaggtgttggcagagtggaaggcctgcgaggtggtggtgaggcagcgggagcgggaggcccacccagccacacgcaccaagttctcctcaggcagcagcatcgacagccacgtgcagcgcctcatccaccgagactccaccatcagcaacgatgtgtttatctcagtggatgatctggaacccccggagccccaggaccctgaagattccagaccaaaacctgagcaggaagcaggacccgggactccgggcaccgccgtggtggagcagcagcattccgtggagttcgactctccagactcaggactgccctcctctcgcaattactccgtggcctcgggcatccagtcaagcctagatgaggggcagagcgtgggcttcgaagaggaggacggcggtggggaggaaggctccagtgggcccggccctgcagctcacactttgagggagccccaggatcccagccaggagaagcctcaggccggagaactggaggccggagaggagcttgcggctgtgtgtgcggctgcctacactatagaattactggacactgtggccttaaacctgcaccgcatagacaaggatgtgcagaggtgtgaccgcaactactggtacttcacgccccccaacctcgagaggctcagagacgtcatgtgcagctacgtgtgggagcacctggacgtgggctatgtgcagggcatgtgcgatctgctggcgcctctcctggtcaccctcgacaatgatcagctggcctacagctgcttcagccacctcatgaagaggatgagccagaacttccccaacgggggtgccatggacacccactttgccaacatgcgctccctcatccagatcctggactcagagctgtttgagctgatgcatcagaatggagactacacccacttctacttctgttatcgctggttcctgctggattttaagagagaactgctgtatgaggatgtgtttgctgtgtgggaggtgatctgggcagccaggcacatctcatcggagcactttgtcctgttcatcgccctcgccctggtggaggcctaccgagagatcatccgtgacaacaacatggacttcactgacatcatcaagtttttcaatgaacgtgctgagcatcacgatgcccaggagatcctgcggattgcccgggacctcgtccacaaggtgcagatgctcatagagaacaagtgagctggggccaggaggcagcagccgtgcagagcctgggctccggcagggagaggtgcaggggagtcaccgcccagacctccccagccaccaaccgaccccacctctgttcctaacaaagcggttgtgagcctggatccgactcccggcagtgctgaccctgcagggcaagtcaggggccaggatgccctcggatcagggccgggatgggaggggtcagcctcagggagcagctgccttgggggacacacctactctgctcccctctcacacatctgggagtagccccactgccacctgcagccgcagcctggactgctgcccacgagtgaacctggggccccacaggattaacaggggctatagcggcctgggccctactcagctggggtggcagagggcgagaggctctgtgctgtgtcccttctgagggtccctttgcagtcccagtatattgtgcgtgcaccagccccagctggagcaaccaaaactgcttctggtttaggcacacgtcacgggtgcgggagacccgggcacgggagacccgggccgccttcaggccgctcccccgagattctggggcagtcggaagatgtgggccctgggtgggagcagcccacttcagcagcactgccactgcctttggccacctgaggtgacccccaggcctccccggccttgtacagtgtacctctgtgtatctgtacagcctcgctcctgccagaccaccccattgtccatccttgttgtccgtgagtccttggcctccaccaagcacgtgtggccattgtgtgcctgccttagtgactccgtggttttgtgaggagcagagtgtgtatgatttttgcctcagaaactatactcttctgtgtaacagaccaataaacaacatttgtcaacactggagcctctgggactggac

SEQ ID NO: 423518 - DNA, 3908 bp, Homo sapiens
tgtgcggggctcggaagatggctgcggagccgagcaccgggcagtggctgcggcggcggcggcggcggcgggccgggagcgcggcgggcgggggctccgccttgcgcgtggggcgctgagccgagaggcgcggaggcggcgagggcgcgggggctctgaggaccgctcggcgccgcctcctgccacaccatgggcagcgcagaggacgcagtcaaagagaaactgctgtggaacgtgaagaaggaggtgaagcaaatcatggaggaggctgtcaccaggaagtttgtgcatgaagacagcagccacatcattgctttatgtggtgcagtggaggcttgcctcttgcatcagctgagacgccgtgccgctggcttcctgcgcagtgacaagatggcagccctgttcaccaaggtggggaagacgtgcccagtggcgggggagatttgccacaaggtacaggagctgcagcaacaagcagagggcaggaaaccctcaggggtcagccaggaggccctgcggagacagggctcagccagcgggaaggccccggccctcagccctcaggccttgaaacacgtatgggtacgcacggcgctcatcgagaaagttctggacaaggtcgtgcaatacctggcggaaaactgcagcaagtactacgagaaggaggcactgctggcagaccctgtgttcggcccgatcctggcctctcttctagtgggaccctgtgccttggaatacactaagctcaagacagccgatcactactggactgacccctctgctgatgagctggtccagcggcaccgcatccggggtccacctactcgccaggactcccctgcaaagcgcccagccctggggatccggaaacggcactcaagcggcagcgcgtcggaggacaggctggctgcctgtgcccgcgagtgtgtggagtccctgcaccagaactcacggacgcggctgctctatggcaagaaccacgtgctggtgcagccgaaggaggatatggaggcggtccctggctacctctccctgcaccagtctgcagagagcctgactctgaagtggacccccaaccagctcatgaatgggactctgggggactccgagctggaaaagagcgtttactgggactatgccctcgtggtgcccttcagccaggtcgtgtgcatccactgccaccagcaaaagagcggtggcacgcttgtgctggtgagccaggatggcatccagaggccgccgctgcatttcccacagggaggacacctgctgtcctttctgtcctgtctggagaatgggctgctgcctcggggacagctagagcccccgctgtggacccagcaagggaaggggaaagtgttccccaagctacggaaacgaagcagcattcgctccgtggatatggaggagatgggcacggggcgggccaccgactatgtgttccggatcatctaccccggccacaggcacgagcacaacgctggtgacatgatcgagatgcagggctttgggcccagcctgccagcctggcacctggagcccctgtgcagtcagggctcctcctgcctctcctgctcctccagcagctccccacatgcaacccccagccactgtagctgcatccccgaccggttgccgctcaggctactgtgtgagagtatgaagaggcagatcgtgtcccgggccttctacggctggctggcacactgccgccacctgtccacggtgcggacccacctgtcggcgctggtgcaccatagcgttatcccacctgaccggcccccgggggcctccgcgggcctcaccaaggacgtgtggagcaagtatcagaaggacaaaaagaactacaaagagctggagctgctgcggcaagtttactacggaggcatagagcacgagatccgcaaggacgtctggccctttctgcttggccactacaagttcggcatgagcaagaaggagatggagcaggtggacgcagtggtggcagcaaggtaccagcaggtgttggcagagtggaaggcctgcgaggtggtggtgaggcagcgggagcgggaggcccacccagccacacgcaccaagttctcctcaggcagcagcatcgacagccacgtgcagcgcctcatccaccgagactccaccatcagcaacgatgtgtttatctcagtggatgatctggaacccccggagccccaggaccctgaagattccagaccaaaacctgagcaggaagcaggacccgggactccgggcaccgccgtggtggagcagcagcattccgtggagttcgactctccagactcaggactgccctcctctcgcaattactccgtggcctcgggcatccagtcaagcctagatgaggggcagagcgtgggcttcgaagaggaggacggcggtggggaggaaggctccagtgggcccggccctgcagctcacactttgagggagccccaggatcccagccaggagaagcctcaggccggagaactggaggccggagaggagcttgcggctgtgtgtgcggctgcctacactatagaattactggacactgtggccttaaacctgcaccgcatagacaaggatgtgcagaggtgtgaccgcaactactggtacttcacgccccccaacctcgagaggctcagagacgtcatgtgcagctacgtgtgggagcacctggacgtgggctatgtgcagggcatgtgcgatctgctggcgcctctcctggtcaccctcgacaatgatcagctggcctacagctgcttcagccacctcatgaagaggatgagccagaacttccccaacgggggtgccatggacacccactttgccaacatgcgctccctcatccagatcctggactcagagctgtttgagctgatgcatcagaatggagactacacccacttctacttctgttatcgctggttcctgctggattttaagagagaactgctgtatgaggatgtgtttgctgtgtgggaggtgatctgggcagccaggcacatctcatcggagcactttgtcctgttcatcgccctcgccctggtggaggcctaccgagagatcatccgtgacaacaacatggacttcactgacatcatcaagtttttcaatgaacgtgctgagcatcacgatgcccaggagatcctgcggattgcccgggacctcgtccacaaggtgcagatgctcatagagaacaagtgagctggggccaggaggcagcagccgtgcagagcctgggctccggcagggagaggtgcaggggagtcaccgcccagacctccccagccaccaaccgaccccacctctgttcctaacaaagcggttgtgagcctggatccgactcccggcagtgctgaccctgcagggcaagtcaggggccaggatgccctcggatcagggccgggatgggaggggtcagcctcagggagcagctgccttgggggacacacctactctgctcccctctcacacatctgggagtagccccactgccacctgcagccgcagcctggactgctgcccacgagtgaacctggggccccacaggattaacaggggctatagcggcctgggccctactcagctggggtggcagagggcgagaggctctgtgctgtgtcccttctgagggtccctttgcagtcccagtatattgtgcgtgcacctgcccccgggcactgcacagcctgtctgggggccagaccaccccattgtccatccttgttgtccgtgagtccttggcctccaccaagcacgtgtggccattgtgtgcctgccttagtgactccgtggttttgtgaggagcagagtgtgtatgatttttgcctcagaaactatactcttctgtgtaacagaccaataaacaacatttgtcaacactggagcctctgggactggac

SEQ ID NO: 423519 - DNA, 3296 bp, Homo sapiens
tgtgcggggctcggaagatggctgcggagccgagcaccgggcagtggctgcggcggcggcggcggcggcgggccgggagcgcggcgggcgggggctccgccttgcgcgtggggcgctgagccgagaggcgcggaggcggcgagggcgcgggggctctgaggaccgctcggcgccgcctcctgccacaccatgggcagcgcagaggacgcagtcaaagagaaactgctgtggaacgtgaagaaggaggtgaagcaaatcatggaggaggctgtcaccaggaagtttgtgcatgaagacagcagccacatcattgctttatgtggtgcagtggaggcttgcctcttgcatcagctgagacgccgtgccgctggcttcctgcgcagtgacaagatggcagccctgttcaccaaggtggggaagacgtgcccagtggcgggggagatttgccacaaggtacaggagctgcagcaacaagcagagggcaggaaaccctcaggggtcagccaggaggccctgcggagacagggctcagccagcgggaaggccccggccctcagccctcaggccttgaaacacgtatgggtacgcacggcgctcatcgagaaagttctggacaaggtcgtgcaatacctggcggaaaactgcagcaagtactacgagaaggaggcactgctggcagaccctgtgttcggcccgatcctggcctctcttctagtgggaccctgtgccttggaatacactaagctcaagacagccgatcactactggactgacccctctgctgatgagctggtccagcggcaccgcatccggggtccacctactcgccaggactcccctgcaaagcgcccagccctggggatccggaaacggcactcaagcggcagcgcgtcggaggacaggctggctgcctgtgcccgcgagtgtgtggagtccctgcaccagaactcacggacgcggctgctctatggcaagaaccacgtgctggtgcagccgaaggaggatatggaggcggtccctggctacctctccctgcaccagtctgcagagagcctgactctgaagtggacccccaaccagctcatgaatgggactctgggggactccgagctggaaaagagcgtttactgggactatgccctcgtggtgcccttcagccaggtcgtgtgcatccactgccaccagcaaaagagcggtggcacgcttgtgctggtgagccaggatggcatccagaggccgccgctgcatttcccacagggaggacacctgctgtcctttctgtcctgtctggagaatgggctgctgcctcggggacagctagagcccccgctgtggacccagcaagggaaggggaaagtgttccccaagctacggaaacgaagcagcattcgctccgtggatatggaggagatgggcacggggcgggccaccgactatgtgttccggatcatctaccccggccacaggcacgagcacaacgctggtgacatgatcgagatgcagggctttgggcccagcctgccagcctggcacctggagcccctgtgcagtcagggctcctcctgcctctcctgctcctccagcagctccccacatgcaacccccagccactgtagctgcatccccgaccggttgccgctcaggctactgtgtgagagtatgaagaggcagatcgtgtcccgggccttctacggctggctggcacactgccgccacctgtccacggtgcggacccacctgtcggcgctggtgcaccatagcgttatcccacctgaccggcccccgggggcctccgcgggcctcaccaaggacgtgtggagcaagtatcagaaggacaaaaagaactacaaagagctggagctgctgcggcaagtttactacggaggcatagagcacgagatccgcaaggacgtctggccctttctgcttggccactacaagttcggcatgagcaagaaggagatggagcaggtggacgcagtggtggcagcaaggtaccagcaggtgttggcagagtggaaggcctgcgaggtggtggtgaggcagcgggagcgggaggcccacccagccacacgcaccaagttctcctcaggcagcagcatcgacagccacgtgcagcgcctcatccaccgagactccaccatcagcaacgatgtgtttatctcagtggatgatctggaacccccggagccccaggaccctgaagattccagaccaaaacctgagcaggaagcaggacccgggactccgggcaccgccgtggtggagcagcagcattccgtggagttcgactctccagactcaggactgccctcctctcgcaattactccgtggcctcgggcatccagtcaagcctagatgaggggcagagcgtgggcttcgaagaggaggacggcggtggggaggaaggctccagtgggcccggccctgcagctcacactttgagggagccccaggatcccagccaggagaagcctcaggccggagaactggaggccggagaggagcttgcggctgtgtgtgcggctgcctacactatagaattactggacactgtggccttaaacctgcaccgcatagacaaggatgtgcagaggtgtgaccgcaactactggtacttcacgccccccaacctcgagaggctcagagacgtcatgtgcagctacgtgtgggagcacctggacgtgggctatgtgcagggcatgtgcgatctgctggcgcctctcctggtcaccctcgacaatgatcagctggcctacagctgcttcagccacctcatgaagaggatgagccagaacttccccaacgggggtgccatggacacccactttgccaacatgcgctccctcatccagatcctggactcagagctgtttgagctgatgcatcagaatggagactacacccacttctacttctgttatcgctggttcctgctggattttaagagagaactgctgtatgaggatgtgtttgctgtgtgggaggtgatctgggcagccaggcacatctcatcggagcactttgtcctgttcatcgccctcgccctggtggaggcctaccgagagatcatccgtgacaacaacatggacttcactgacatcatcaagtttttcaatgcgagctggtccagccatccaggctgccctgagcagaggtgtggaggcccccacctctgccccgcacacagctggagggttctcaggaatcctgggggcccttccccaaaggccgggatgtcaagaatctagcagagcagatggaaacagagcagggtagtcagccacctcctagc

SEQ ID NO: 423520 - DNA, 3246 bp, Homo sapiens
tgtgcggggctcggaagatggctgcggagccgagcaccgggcagtggctgcggcggcggcggcggcggcgggccgggagcgcggcgggcgggggctccgccttgcgcgtggggcgctgagccgagaggcgcggaggcggcgagggcgcgggggctctgaggaccgctcggcgccgcctcctgccacaccatgggcagcgcagaggacgcagtcaaagagaaactgctgtggaacgtgaagaaggaggtgaagcaaatcatggaggaggctgtcaccaggaagtttgtgcatgaagacagcagccacatcattgctttatgtggtgcagtggaggcttgcctcttgcatcagctgagacgccgtgccgctggcttcctgcgcagtgacaagatggcagccctgttcaccaaggtggggaagacgtgcccagtggcgggggagatttgccacaaggtacaggagctgcagcaacaagcagagggcaggaaaccctcaggggtcagccaggaggccctgcggagacagggctcagccagcgggaaggccccggccctcagccctcaggccttgaaacacgtatgggtacgcacggcgctcatcgagaaagttctggacaaggtcgtgcaatacctggcggaaaactgcagcaagtactacgagaaggaggcactgctggcagaccctgtgttcggcccgatcctggcctctcttctagtgggaccctgtgccttggaatacactaagctcaagacagccgatcactactggactgacccctctgctgatgagctggtccagcggcaccgcatccggggtccacctactcgccaggactcccctgcaaagcgcccagccctggggatccggaaacggcactcaagcggcagcgcgtcggaggacaggctggctgcctgtgcccgcgagtgtgtggagtccctgcaccagaactcacggacgcggctgctctatggcaagaaccacgtgctggtgcagccgaaggaggatatggaggcggtccctggctacctctccctgcaccagtctgcagagagcctgactctgaagtggacccccaaccagctcatgaatgggactctgggggactccgagctggaaaagagcgtttactgggactatgccctcgtggtgcccttcagccaggtcgtgtgcatccactgccaccagcaaaagagcggtggcacgcttgtgctggtgagccaggatggcatccagaggccgccgctgcatttcccacagggaggacacctgctgtcctttctgtcctgtctggagaatgggctgctgcctcggggacagctagagcccccgctgtggacccagcaagggaaggggaaagtgttccccaagctacggaaacgaagcagcattcgctccgtggatatggaggagatgggcacggggcgggccaccgactatgtgttccggatcatctaccccggccacaggcacgagcacaacgctggtgacatgatcgagatgcagggctttgggcccagcctgccagcctggcacctggagcccctgtgcagtcagggctcctcctgcctctcctgctcctccagcagctccccacatgcaacccccagccactgtagctgcatccccgaccggttgccgctcaggctactgtgtgagagtatgaagaggcagatcgtgtcccgggccttctacggctggctggcacactgccgccacctgtccacggtgcggacccacctgtcggcgctggtgcaccatagcgttatcccacctgaccggcccccgggggcctccgcgggcctcaccaaggacgtgtggagcaagtatcagaaggacaaaaagaactacaaagagctggagctgctgcggcaagtttactacggaggcatagagcacgagatccgcaaggacgtctggccctttctgcttggccactacaagttcggcatgagcaagaaggagatggagcaggtggacgcagtggtggcagcaaggtaccagcaggtgttggcagagtggaaggcctgcgaggtggtggtgaggcagcgggagcgggaggcccacccagccacacgcaccaagttctcctcaggcagcagcatcgacagccacgtgcagcgcctcatccaccgagactccaccatcagcaacgatgtgagccagacgggacctggagggttgggggtctcgggggccacccgcgttttatgcacagtggtcctgagcaccagcctgacctctgggaactggtggggccctgcgagaaaggcctaaggtgcctgtgtctcattttctccaactggaaatggctaactgtgcctctgctgcctacttctctgggtattgtaggaataaagtgagagagtgcattgtgctcagttttagccaactatagggaaagatggacttactgggatttagggaagccctcctccttgtagaaagacctcaaagctagcaacaggcagcgctgggttctagtcccagatccactactgacaagctgaatgtctctgggcaagcacttcccgtctctgggtctcagtttcccctctccacccatatcctctgactgcagaggcttcctgagatctgtgggcctgagaataggggagcccgtagagcagccccattggtgtcgactggcgagatccttcctccccgcgatgttgcctgtcactgtacagaactgactatggcaggcttgttcggagcacgggagggtagctctttctggcatcactcctgccttttgaacagcaagttctaaactgtgactgcctggcccaaccaacactgataagtttcaattttaaggacgctttattaatttttctttaaaattgcctctttagataatgtgtattcttgttactttactaaatccttaccaacattaacagaaaatgtaagttgaagtaagttaaatataactggctgggtgtgatggctcatgcctgtaattccaacactttgggaggcagaggtgggaggattgcttcagttcaagagtttgagaccagcctgggtaacatggcgaaaccctgtctttacaaaaaatgcaaacctttgccgcatgtgttggggtgcgcctgtagtcccagcttctcgggaggctgaggtggggggaccacctgagccatggaggttgaggctgcagtgagccgtgataccaccactgtactctagcctgggccatagagtgagacaccctgcctcagaaataaataaaaaaaaagaaataga

SEQ ID NO: 423521 - DNA, 118 bp, Homo sapiens
atccctgggcgtgagcggacggtgagtggcggccagaggcagcatcggctcagggctcagcctctctcccttttcccacccacataagatcctggactcagagctgtttgagctgatg

SEQ ID NO: 423522 - DNA, 459 bp, Homo sapiens
aactgtgactgcctggcccaaccaacactgataagtttcaattttaaggacgctttattaatttttctttaaaattgcctctttagataatgtgtattcttgttactttactaaatccttaccaacattaacagaaaatgtaagttgaagtaagttaaatataactggctgggtgtgatggctcatgcctgtaattccaacactttgggaggcagaggtgggaggattgcttcagttcaagagtttgagaccagcctgggtaacatggcgaaaccctgtctttacaaaaaatgcaaacctttgccgcatgtgttggggtgcgcctgtagtcccagcttctcgggaggctgaggtggggggaccacctgagccatggaggttgaggctgcagtgagccgtgataccaccactgtactctagcctgggccatagagtgagacaccctgcctcagaaataaa

SEQ ID NO: 423523 - DNA, 539 bp, Homo sapiens
aaagctttgcctctctccgggcgccatttcctgccccttaaggaaggagagcagaacgagatctcatcccactgtgagctggggcacgggaggacgtggccaccccaaagcaggccttgcctgggcttcagcagtcactacaggccccgccccagcccattctccgtgggatggggctcacccagctgggccacggtgactgtggaggctgcacagtcttgactccccgggtccctcagaactacaaagagctggagctgctgcggcaagtttactacggaggcatagagcacgagatccgcaaggacgtctggccctttctgcttggccactacaagttcggcatgagcaagaaggagatggagcaggtgaggggagcctgttcccatggggctgatgagatggggagctgggccaggggacgccagggaggggaccttggaagcctcagccccttcccagccggaaagaagcatggcagggcagctccaccgtccttaccctgaggcccgtcttgagtctgagactcaggacccaag

SEQ ID NO: 423524 - DNA, 3322 bp, Homo sapiens
tgtgcggggctcggaagatggctgcggagccgagcaccgggcagtggctgcggcggcggcggcggcggcgggccgggagcgcggcgggcgggggctccgccttgcgcgtggggcgctgagccgagaggcgcggaggcggcgagggcgcgggggctctgaggaccgctcggcgccgcctcctgccacaccatgggcagcgcagaggacgcagtcaaagagaaactgctgtggaacgtgaagaaggaggtgaagcaaatcatggaggaggctgtcaccaggaagtttgtgcatgaagacagcagccacatcattgctttatgtggtgcagtggaggcttgcctcttgcatcagctgagacgccgtgccgctggcttcctgcgcagtgacaagatggcagccctgttcaccaaggtggggaagacgtgcccagtggcgggggagatttgccacaaggtacaggagctgcagcaacaagcagagggcaggaaaccctcaggggtcagccaggaggccctgcggagacagggctcagccagcgggaaggccccggccctcagccctcaggccttgaaacacgtatgggtacgcacggcgctcatcgagaaagttctggacaaggtcgtgcaatacctggcggaaaactgcagcaagtactacgagaaggaggcactgctggcagaccctgtgttcggcccgatcctggcctctcttctagtgggaccctgtgccttggaatacactaagctcaagacagccgatcactactggactgacccctctgctgatgagctggtccagcggcaccgcatccggggtccacctactcgccaggactcccctgcaaagcgcccagccctggggatccggaaacggcactcaagcggcagcgcgtcggaggacaggctggctgcctgtgcccgcgagtgtgtggagtccctgcaccagaactcacggacgcggctgctctatggcaagaaccacgtgctggtgcagccgaaggaggatatggaggcggtccctggctacctctccctgcaccagtctgcagagagcctgactctgaagtggacccccaaccagctcatgaatgggactctgggggactccgagctggaaaagagcgtttactgggactatgccctcgtggtgcccttcagccaggtcgtgtgcatccactgccaccagcaaaagagcggtggcacgcttgtgctggtgagccaggatggcatccagaggccgccgctgcatttcccacagggaggacacctgctgtcctttctgtcctgtctggagaatgggctgctgcctcggggacagctagagcccccgctgtggacccagcaagggaaggggaaagtgttccccaagctacggaaacgaagcagcattcgctccgtggatatggaggagatgggcacggggcgggccaccgactatgtgttccggatcatctaccccggccacaggcacgagcacaacgctggtgacatgatcgagatgcagggctttgggcccagcctgccagcctggcacctggagcccctgtgcagtcagggctcctcctgcctctcctgctcctccagcagctccccacatgcaacccccagccactgtagctgcatccccgaccggttgccgctcaggctactgtgtgagagtatgaagaggcagatcgtgtcccgggccttctacggctggctggcacactgccgccacctgtccacggtgcggacccacctgtcggcgctggtgcaccatagcgttatcccacctgaccggcccccgggggcctccgcgggcctcaccaaggacgtgtggagcaagtatcagaaggacaaaaagaactacaaagagctggagctgctgcggcaagtttactacggaggcatagagcacgagatccgcaaggacgtctggccctttctgcttggccactacaagttcggcatgagcaagaaggagatggagcaggtggacgcagtggtggcagcaaggtaccagcaggtgttggcagagtggaaggcctgcgaggtggtggtgaggcagcgggagcgggaggcccacccagccacacgcaccaagttctcctcaggcagcagcatcgacagccacgtgcagcgcctcatccaccgagactccaccatcagcaacgatgtgtttatctcagtggatgatctggaacccccggagccccaggaccctgaagattccagaccaaaacctgagcaggaagcaggacccgggactccgggcaccgccgtggtggagcagcagcattccgtggagttcgactctccagactcaggactgccctcctctcgcaattactccgtggcctcgggcatccagtcaagcctagatgaggggcagagcgtgggcttcgaagaggaggacggcggtggggaggaaggctccagtgggcccggccctgcagctcacactttgagggagccccaggatcccagccaggagaagcctcaggccggagaactggaggccggagaggagcttgcggctgtgtgtgcggctgcctacactatagaattactggacactgtggccttaaacctgcaccgcatagacaaggatgtgcagaggtgtgaccgcaactactggtacttcacgccccccaacctcgagaggctcagagacgtcatgtgcagctacgtgtgggagcacctggacgtgggctatgtgcagggcatgtgcgatctgctggcgcctctcctggtcaccctcgacaatgatcagctggcctacagctgcttcagccacctcatgaagaggatgagccagaacttccccaacgggggtgccatggacacccactttgccaacatgcgctccctcatccagatcctggactcagagctgtttgagctgatgcatcagaatggagactacacccacttctacttctgttatcgctggttcctgctggattttaagagagaactgctgtatgaggatgtgtttgctgtgtgggaggtgatctgggcagccaggcacatctcatcggagcactttgtcctgttcatcgccctcgccctggtggaggcctaccgagagatcatccgtgacaacaacatggacttcactgacatcatcaagtttttcaatgcagaccaccccattgtccatccttgttgtccgtgagtccttggcctccaccaagcacgtgtggccattgtgtgcctgccttagtgactccgtggttttgtgaggagcagagtgtgtatgatttttgcctcagaaactatactcttctgtgtaacagaccaataaacaacatttgtcaacactggagcctctgggactggac

SEQ ID NO: 423525 - DNA, 2993 bp, Homo sapiens
tgtgcggggctcggaagatggctgcggagccgagcaccgggcagtggctgcggcggcggcggcggcggcgggccgggagcgcggcgggcgggggctccgccttgcgcgtggggcgctgagccgagaggcgcggaggcggcgagggcgcgggggctctgaggaccgctcggcgccgcctcctgccacaccatgggcagcgcagaggacgcagtcaaagagaaactgctgtggaacgtgaagaaggaggtgaagcaaatcatggaggaggctgtcaccaggaagtttgtgcatgaagacagcagccacatcattgctttatgtggtgcagtggaggcttgcctcttgcatcagctgagacgccgtgccgctggcttcctgcgcagtgacaagatggcagccctgttcaccaaggtggggaagacgtgcccagtggcgggggagatttgccacaaggtacaggagctgcagcaacaagcagagggcaggaaaccctcaggggtcagccaggaggccctgcggagacagggctcagccagcgggaaggccccggccctcagccctcaggccttgaaacacgtatgggtacgcacggcgctcatcgagaaagttctggacaaggtcgtgcaatacctggcggaaaactgcagcaagtactacgagaaggaggcactgctggcagaccctgtgttcggcccgatcctggcctctcttctagtgggaccctgtgccttggaatacactaagctcaagacagccgatcactactggactgacccctctgctgatgagctggtccagcggcaccgcatccggggtccacctactcgccaggactcccctgcaaagcgcccagccctggggatccggaaacggcactcaagcggcagcgcgtcggaggacaggctggctgcctgtgcccgcgagtgtgtggagtccctgcaccagaactcacggacgcggctgctctatggcaagaaccacgtgctggtgcagccgaaggaggatatggaggcggtccctggctacctctccctgcaccagtctgcagagagcctgactctgaagtggacccccaaccagctcatgaatgggactctgggggactccgagctggaaaagagcgtttactgggactatgccctcgtggtgcccttcagccaggtcgtgtgcatccactgccaccagcaaaagagcggtggcacgcttgtgctggtgagccaggatggcatccagaggccgccgctgcatttcccacagggaggacacctgctgtcctttctgtcctgtctggagaatgggctgctgcctcggggacagctagagcccccgctgtggacccagcaagggaaggggaaagtgttccccaagctacggaaacgaagcagcattcgctccgtggatatggaggagatgggcacggggcgggccaccgactatgtgttccggatcatctaccccggccacaggcacgagcacaacgctggtgacatgatcgagatgcagggctttgggcccagcctgccagcctggcacctggagcccctgtgcagtcagggctcctcctgcctctcctgctcctccagcagctccccacatgcaacccccagccactgtagctgcatccccgaccggttgccgctcaggctactgtgtgagagtatgaagaggcagatcgtgtcccgggccttctacggctggctggcacactgccgccacctgtccacggtgcggacccacctgtcggcgctggtgcaccatagcgttatcccacctgaccggcccccgggggcctccgcgggcctcaccaaggacgtgtggagcaagtatcagaaggacaaaaagaactacaaagagctggagctgctgcggcaagtttactacggaggcatagagcacgagatccgcaaggacgtctggccctttctgcttggccactacaagttcggcatgagcaagaaggagatggagcaggtggacgcagtggtggcagcaaggtaccagcaggtgttggcagagtggaaggcctgcgaggtggtggtgaggcagcgggagcgggaggcccacccagccacacgcaccaagttctcctcaggcagcagcatcgacagccacgtgcagcgcctcatccaccgagactccaccatcagcaacgatgtgtttatctcagtggatgatctggaacccccggagccccaggaccctgaagattccagaccaaaacctgagcaggaagcaggacccgggactccgggcaccgccgtggtggagcagcagcattccgtggagttcgactctccagactcaggactgccctcctctcgcaattactccgtggcctcgggcatccagtcaagcctagatgaggggcagagcgtgggcttcgaagaggaggacggcggtggggaggaaggctccagtgggcccggccctgcagctcacactttgagggagccccaggatcccagccaggagaagcctcaggccggagaactggaggccggagaggagcttgcggctgtgtgtgcggctgcctacactatagaattactggacactgtggccttaaacctgcaccgcatagacaaggatgtgcagaggtgtgaccgcaactactggtacttcacgccccccaacctcgagaggctcagagacgtcatgtgcagctacgtgtgggagcacctggacgtgggctatgtgcagggcatgtgcgatctgctggcgcctctcctggtcaccctcgacaatgatcagctggcctacagctgcttcagccacctcatgaagaggatgagccagaacttccccaacgggggtgccatggacacccactttgccaacatgcgctccctcatccagatcctggactcagagctgtttgagctgatgcatcagaatggagactacacccacttctacttctgttatcgctggttcctgctggattttaagagaggaagctgctggataggatatggggctgaggtcagggacag

SEQ ID NO: 423526 - DNA, 1718 bp, Homo sapiens
tgagtcccggccggagccccacggccgcgggcggcgcctaggacggcgatccgcgccctggaggatccgccggccgcccggctccactacagctccagccgcctgcagcggggccctcctgaggccccagaggaagagaccatgaaagtgaggtcggccggcggcgatggagatgccttgtgcgttacagaagaggacctggcgggtgacgacgaggacatgccgaccttcccatgcacccagaagggccggccagggccccgctgcagccgctgccagaagaacctatctttgcacacatcggtgcggattctttacctcttcctggccctgctcctggtggccgtggctgtgttggcctctctggttttcagaaaagtggactctctctccgaagacatctccttgacccagtctatttatgacaagaagcttgtgttaatgcagaaaaatctccagggcctggatccgaaagccctgaacaactgctctttctgccatgaagctgggcagctggggccagagatccgaaaactgcaggaggagctggagggaattcagaagctgcttctggcccaggaggtgcagctggaccagaccttacaggcccaggaggtgctctccaccaccagcagacaaatctcccaggagatgggcagttgctccttctccatccaccaggttaaccagtctctggggctcttcctggcccaggtgagaggctggcaggccaccacagctggcctggacctctctctgaaggacctcacccaggagtgctacgatgtcaaggctgcagtgcaccagatcaacttcaccgtggggcagacttccgagtggatccacgggatccagcggaagacagacgaggagaccctgaccctccagaagattgtcaccgactggcagaactacacacggctcttcagcggcctgcgcaccacctccaccaagactggagaggcggtcaagaacatccaggccaccctgggggcctcctcacagcgcatcagccagaactcagagagcatgcacgacctggtactccaggtcatgggcttgcagctgcagctggataacatctcgtccttcctggatgaccacgaagagaacatgcatgatcttcagtaccatacccactacgcccagaaccgcactgtggagaggtttgagtctctggaaggacgcatggcttctcacgagattgaaattggcaccatcttcaccaacatcaatgccaccgacaaccacgtgcacagcatgctcaagtacctggatgacgtgcggctctcctgcacgctgggcttccacacccatgccgaggagctctactacctgaacaagtctgtctccatcatgctgggcaccacagacctgctccgggagcgcttcagcctgctcagtgcccggctggacctcaacgtccggaacctctccatgatcgtggaggagatgaaggcagtggacacacagcatggagaaatccttcgcaatgtcaccatcctacgaggtcacactttgttttcacataatcggatatgatatgaagccagccataaagcccaggatgaccaagaatataatttgaaaatgaatttgtttactatccttaatggtaagcatcaccttaagcacatattatgccttgagacactagccaattgtggtacatgaaaataatttataaataaataaatttacctatattaggaagatga

SEQ ID NO: 423527 - DNA, 1053 bp, Homo sapiens
aggttgcagtgagctgagattgtaccactgcactcctccctgggtgacacagtgagactccatctctaaataaatgaataaataaataaatgcagattgtgggcctcccccccagaaactctgattcagaatcagggacgcggtgggatgggaggaatggggcgggacggggtgtggggaggtgggggaggaacgtgtacttcccccagtttcccagggattctgacgccccagataaaacttgagagccacaggtgtaggagatatagaaaaatattgttttttgatttatgtatataatttcaattaatcttcacaagcaaagtgtgtttgcattttatagatcagaaaacaaggctcagaaaagctaactcgctcaaggccacatagatgttaagtggtttcaaacccaggatttttagaagctgctatactgagctgcttcttacagaaaggtggcattggaaattagataagacctgtgtttgcatctgagattgctgagttccacagaatcaacttgctcaagttcccagagccagctagtgacaaagctgtgacaaggcttcacactgagggctgctgggtttcccggttccagctgcctcgttactaacaccaccagtgagagcagtgcaggagatggcagcaggagtgtgcttctggctgggagagttggcaacttctcaaaggaagccaggtgctgacctcagccaggcccccgacttccctgaggccttttccctaagcccaaagtctccaacataggtgtccaacgaaatcccctgaagtgaggaacaaactattaaatattagaacatctcaatgtgtttcatctattctaggtcacactttgttttcacataatcggatatgatatgaagccagccataaagcccaggatgaccaagaatataatttgaaaatgaatttgtttactatccttaatggtaagcatcaccttaagcacatattatgccttgagacactagccaattgtggtacatgaaaataatttataaataaataaatttacctatattaggaagatga

SEQ ID NO: 423528 - DNA, 3638 bp, Homo sapiens
tgagtcccggccggagccccacggccgcgggcggcgcctaggacggcgatccgcgccctggaggatccgccggccgcccggctccactacagctccagccgcctgcagcggggccctcctgaggccccagaggaagagaccatgaaagtgaggtcggccggcggcgatggagatgccttgtgcgttacagaagaggacctggcgggtgacgacgaggacatgccgaccttcccatgcacccagaagggccggccagggccccgctgcagccgctgccagaagaacctatctttgcacacatcggtgcggattctttacctcttcctggccctgctcctggtggccgtggctgtgttggcctctctggttttcagaaaagtggactctctctccgaagacatctccttgacccagtctatttatgacaagaagcttgtgttaatgcagaaaaatctccagggcctggatccgaaagccctgaacaactgctctttctgccatgaagctgggcagctggggccagagatccgaaaactgcaggaggagctggagggaattcagaagctgcttctggcccaggaggtgcagctggaccagaccttacaggcccaggaggtgctctccaccaccagcagacaaatctcccaggagatgggcagttgctccttctccatccaccaggttaaccagtctctggggctcttcctggcccaggtgagaggctggcaggccaccacagctggcctggacctctctctgaaggacctcacccaggagtgctacgatgtcaaggctgcagtgcaccagatcaacttcaccgtggggcagacttccgagtggatccacgggatccagcggaagacagacgaggagaccctgaccctccagaagattgtcaccgactggcagaactacacacggctcttcagcggcctgcgcaccacctccaccaagactggagaggcggtcaagaacatccaggccaccctgggggcctcctcacagcgcatcagccagaactcagagagcatgcacgacctggtactccaggtcatgggcttgcagctgcagctggataacatctcgtccttcctggatgaccacgaagagaacatgcatgatcttcagtaccatacccactacgcccagaaccgcactgtggagaggtttgagtctctggaaggacgcatggcttctcacgagattgaaattggcaccatcttcaccaacatcaatgccaccgacaaccacgtgcacagcatgctcaagtacctggatgacgtgcggctctcctgcacgctgggcttccacacccatgccgaggagctctactacctgaacaagtctgtctccatcatgctgggcaccacagacctgctccgggagcgcttcagcctgctcagtgcccggctggacctcaacgtccggaacctctccatgatcgtggaggagatgaaggcagtggacacacagcatggagaaatccttcgcaatgtcaccatcctacgaggtgcccccggccctccaggaccaagaggattcaaaggagatatgggcgtgaaagggcctgttggcggcagaggcccgaaaggagaccccggcatcttgggccccctgggaccccagggtcctcaggggcaacctggagaggccgggcctgtgggagaaaggggccctgttggccctcgagggttcccaggcctcaaaggctcaaagggcagctttggaactggagggccgagaggacagccaggcccaaaaggggacatagggcccccagggccagaagggcccccggggtctccagggccctcagggcctcagggaaaaccgggaattgcagggaagacagggtcaccaggccagcggggggccatggggcctaagggtgaaccagggatccagggtccccctggtctcccggggcctccaggtccaccaggaagccagagcttctactgaggagggctgtggcagagccactgtcacacagaatgccggaggggcgcagagcagatccaggccccagaaagcctcacctacagacagctgtggtcctctgattccaatgagggggctccccagggctgaccctgcagctttgggctcccccatagtgactgtgccataggaaagcagcccctcctcacacatacatgtgcacatgcacacacatgcatgcacacacatgcacacatacacgcacatgcacacatacacatgcatgcacacatacacaggcatacatgcatgcacacacacatgcacgcacacacacatgcacacatacacgtgcacacatacacaggcacacatgcatgcacacatacacatgcacacacacatgcacacatatatgcacaggcacacacatgtacgcacacacacatgcactgcacacatatccatgcacacaaacacatatatacacatgcacatacacagatttttctgctggccaggtgggccaactgggtttccctggctgggcaggaggagagggcagaggaagaccccctctcctgtgactgagcctgccagggaggcagctacctcgggaggaaggtctcacatctgtctctgggcacccatgctggccagcagtttcccagggctccctggggttgaaaagccccaaggaaacctttgcgggtggggcgttactgccaaaactccagaggcaaagtggacctggcaaccacaagaccctccccataagcaggggaccagcatacccgggagctgtccctgtctgtcacagcacagtggggccacgaggctgacattctctggccttgcacacagtgccccctgagaagttcaacatttatttcttcacgtgtccagaaaattcctcaattcatccttgcctctgcccttcaggagcagcctggaaggaatccaagcaggagtttcatctgcatgggggcactctgcaggccctggaacattgggcctgagtggagatgggagacagaggcaggccagaaggttctctctgcacagctgcctcccttgccctccctgaggctggcctgccccattccccaagggggctcctctggagtggtggggaggatcaggctgcagaagggccaaccccttgcaacagggcagctctcgcctcccgcacacggctctcctgatcacagctgcatgccgaccttgtcccaccgggacccacaatggcccgagccctctttgcatgggcagccagctggactaggagtgggaagggcctggacactcacagaggccccctctgtcatcactccttggcacccaccaacttcctgcacacactggcagagaggggcgctgggaaatcaccccacagggtggaggtctcctgttggctacactctaaagctgctttgccttcatgttcaaacagattcaggcaccaccccctccaccgcccgcaaggttagggcatagagttgtctccttcccaacacggacccagagaccagcccttccctgctcaaagcctttccgcaccctcctgactgtcctggatgtgcaactggtttgcactgcacaccccacggccatgtaactctcctgtccacatatgataataccattctgcatagtattactgactcagtaaagagctatttccaggaaaaaaaagt

SEQ ID NO: 423529 - DNA, 439 bp, Homo sapiens
cgggagcgcttcagcctgctcagtgcccggctggacctcaacgtccggaacctctccatgatcgtggaggagatgaaggcagtggacacacagcatggagaaatccttcgcaatgtcaccatcctacgaggtaagagctgggtccaggtagggctgctacaaagcttccactgaggcttggtgatcttgctggacacagaagtacctggttttaggcaaagtaatagtgggctaacacaatcctatagcaaatgcctacagcagtcggcagctttaagaaatgtccttgcattagccaggcatggtggtgtgtacctatactcctagctgcttgggaagctgaggcagaaggatcacttgagcccaggagttcgaggctacagtgagctatgattgcaccactgcactgcagcctgggagacagagtaagtccttatct

SEQ ID NO: 423530 - DNA, 1114 bp, Homo sapiens
gcagtggtatcaacccagagtcgccattatggccggggaaggtgctttagtctgaagatggcggcctcagcagcgcgaggtgctgcggcgctgcgtagaagtatcaatcagccggttgcttttgtgagaagaattccttggactgcggcgtcgagtcagctgaaagaacactttgcacagttcggccatgtcagaaggtgcattttaccttttgacaaggagactggctttcacagaggtttgggttgggttcagttttcttcagaagaaggacttcggaatgcactacaacaggaaaatcatattatagatggagtaaaggtccaggttcacactagaaggccaaaacttccgcaaacatctgatgatgaaaagaaagatttttgagactgcagcctattaataaagttaacataactgagaaaaaaaaaaaacaaaaaaaaaaaaaaaaaaaaaaaaaacaaaaaagagaagaacaaacaaaaaaaaagaaaaaaagaaagagagaaaacaagaagaaaaaagagaaaaagaaaaaaaaaaaaaaaaaaaagaaaaaaaaaaaaaaaagaaagaaaaaaaaaacaaagaaaaagaaaaaaagaaaaaaaaaaaaaaaagacagggaaaaaaaagcgacaagaaggggaaaaggaagaagagcaaaaaaaaaaaggggggaaaagagagaaaaaaaggaggaagaagaaagaaagggaggagagaaagagaagaaaaagaaagcaagagagagagggaggaagagaagaaaaagagcaggcgcagacaagaaaagaagagaaaaaaagaggaggaagggagaagagagagcgaccaggacggacgaggcgggcgaaggggaggagaggacaaaaaaacagaaacaagacaacaagcaaggaacagaaaaaaagaaaggaaagaaagaaagaaaagagaacagaacaggaaggaaggaacaaaaaaaaaacagaaaagacaagaggaggaaagaagggagcaaaaaaagaagagcaaaagagaaggaaagaagcagaaagaaaggaaaggggacaagaggaacaagagagaaacagaaggaggaagagagagaagaacaggaagaagaaaaagg

SEQ ID NO: 423531 - DNA, 381 bp, Homo sapiens
ggatcatagtccacatagcacagtaactggtatgaaaacactcgatatttgctgaggatggagactgcagccaactcaacaacttctctgtccatctcaccaccaagtctggtcagctgaaagaacactttgcacagttcggccatgtcagaaggtgcattttaccttttgacaaggagactggctttcacagaggtttgggttgggttcagttttcttcagaagaaggacttcggaatgcactacaacaggaaaatcatattatagatggagtaaaggtccaggttcacactagaaggccaaaacttccgcaaacatctgatgatgaaaagaaagatttttgagactgcagcctattaataaagttaacataactgagaa

SEQ ID NO: 423532 - DNA, 1533 bp, Homo sapiens
ctgtctaaatctacagtttgaactgcttcttacagtggtgcatctgatttttagtatgtggattctgagagtattaatcaattttttataatgtttggtttccttatgttttctatttcagagtacccaagtggccttggaccatctggagtctgtgcctgagaaactgagcctactagaagatttcaaagacttcagagattcctgcagttcatctgagagaactgatggaagatattccaaatacagggttcgcagaaattctcttcagcatcaccaagatgacaccaagtacagaaccaaaagtttcaaaggtgacagaacctttctggaaggttcccacactcgtgggttagatcactcatcctcttggcaggatcacagtcgcttcctgtctagtccaagattttcatacgtgaactcatttaccaaaagaactgttgctccagattcagcttcaaacaaggaagatgccacaatgaatggaacaagttcacaacccaaaaaagaggaatatgggagctaaaaaagcaaatgtaatttgttattttacatgagtatgttacaaataataacatctctattcttacagcaatttggcccagattatctaacagacatacctgcagctttggctctttggtattgccaaacattgacaaaagtgacaatactgttggtccttgtgaatggtaaaccaatccaaataatatcagatcatgaatgatgtgcagctaatttatttgcaacttatactagcacagaaagaatgatattttttcactttgtattttcctttttcaagtgtggtcagtcacattttcccaaccaaaatttggatttctaattgaggccttttaaaaattactggctaaaaagaaggaaaatgagtttcccttgaggcaaaagttgccagcactttagattcagggagcatttatatacaactgattttttgaaaaatgctttctccctaataaattatcatgtgttataacatgtggagatgtgcatatataacattagacagtccactttataaatgctcaggacttttatatctatcatcttaacagtccacaactgcataccgtagctgaaaattatttccaatcatccatttttaatagcaataaagaattcataaatgatatctgaactgtagagcactgtaaagaattcatagcacaatttatttatttgtctttttgtggccaaatatcctactgtgatcacttcagtcatatcctggaccgtctttggtttactgtgactaaaatcatagcaccaaactcctttgtccatgagatttatatataatcttgtataatttggtcctatctgcttctaccatcccaacttttttcatcaaagtgtctaagaacgtattccctttacacgctgatctcctagtggagaaggatttatattaaatgctaagtaatagtaaactttcaggaactgaatcctattgggtcatggattctgcatagacaagggcaataaagcaatacctttgtaatatgcataaaa

SEQ ID NO: 423533 - DNA, 553 bp, Homo sapiens
ggatcatagtccacatagcacagtaactggtatgaaaacactcgatatttgctgaggatggagactgcagccaactcaacaacttctctgtccatctcaccaccaagtctggtacattatggctttatagtcagtaccatagctgcttcctaaatcttaagcctttaaggaaatgcaaagtagttcctgtccacaagaaatctggtgaccctgtctttctacagtctaagatagagaatccaaaatatagtaactacttttaatgttttcttctgccacacaggtcagctgaaagaacactttgcacagttcggccatgtcagaaggtgcattttaccttttgacaaggagactggctttcacagaggtttgggttgggttcagttttcttcagaagaaggacttcggaatgcactacaacaggaaaatcatattatagatggagtaaaggtccaggttcacactagaaggccaaaacttccgcaaacatctgatgatgaaaagaaagatttttgagactgcagcctattaataaagttaacataactgagaa

SEQ ID NO: 423534 - DNA, 309 bp, Homo sapiens
atttacaatttttaattgagggttagggagtcataataccaacaaagatggtaaaaggaatttgaggagaaaacgaaagaacaagggacaaataaaaactgcctgggttattcattattcatactgactccctaataaagtgattttcagtttgaatgtttttgcagacattgcctttcctcccttacagtgcttatttttttaaggtccaggttcacactagaaggccaaaacttccgcaaacatctgatgatgaaaagaaagatttttgagactgcagcctattaataaagttaacataactgagaa

SEQ ID NO: 423535 - DNA, 500 bp, Homo sapiens
ctgtctaaatctacagtttgaactgcttcttacagtggtgcatctgatttttagtatgtggattctgagagtattaatcaattttttataatgtttggtttccttatgttttctatttcagagtacccaagtggccttggaccatctggagtctgtgcctgagaaactgagcctactagaagatttcaaagacttcagagattcctgcagttcatctgagagaactgatggaagatattccaaatacagggttcgcagaaattctcttcagcatcaccaagatgacaccaagtacagaaccaaaagtttcaaagtaattttctttatatacttttttagtctttaagtagtatccatgtttaaggctacaacctcttaagcagcctctgcagtgtttgtgtaagggcacttgtgaaagaaaatattttccttgatatattaaatagactttcaattctgtggaaatggagaataaaaatccagagtttgtgcctaccaca

SEQ ID NO: 423536 - DNA, 951 bp, Homo sapiens
  misc_feature (453)..(453): n is a, c, g, or t
  misc_feature (463)..(464): n is a, c, g, or t
  misc_feature (485)..(485): n is a, c, g, or t
  misc_feature (492)..(492): n is a, c, g, or t
  misc_feature (499)..(499): n is a, c, g, or t
  misc_feature (509)..(509): n is a, c, g, or t
  misc_feature (527)..(527): n is a, c, g, or t
  misc_feature (544)..(545): n is a, c, g, or t
  misc_feature (549)..(549): n is a, c, g, or t
  misc_feature (553)..(553): n is a, c, g, or t
  misc_feature (568)..(568): n is a, c, g, or t
  misc_feature (578)..(578): n is a, c, g, or t
  misc_feature (605)..(605): n is a, c, g, or t
  misc_feature (619)..(619): n is a, c, g, or t
  misc_feature (623)..(623): n is a, c, g, or t
gcagtggtatcaacccagagtcgccattatggccggggaaggtgctttagtctgaagatggcggcctcagcagcgcgaggtgctgcggcgctgcgtagaagtatcaatcagccggttgcttttgtgagaagaattccttggactgcggcgtcgagtcagctgaaagaacactttgcacagttcggccatgtcagaaggtgcattttaccttttgacaaggagactggctttcacagaggtttgggttgggttcagttttcttcagaagaaggacttcggaatgcactacaacaggaaaatcatattatagatggagtaaaggtccaggttcacactagaaggccaaaacttccgcaaacatctgatgatgaaaagaaagatttttgagactgcagcctattaataaagttaacataactgagaaaaaaaaaaaaaaaactcgagactatctcncggctcatanncccatgagcgtgtaagcaagngtctacntcagagntcccaggccngggtagatcactggcccnaggagcttgtgccccgnnaaanggcngagagaccagcaagnggctcatggntgaggggctggagggcctgtgcctgtnccaccactgtgatncagngaccctgctttttgtggcggctttacccagtttttcgggtgtccacatccgggccagttttcaaggcccctttagtgctaagcccgaggccagataacctgggggggtgtcgtggggcttctgtgttgtggggcccttggaccccaccacttggaagacacggaaggttgcctttacagcgcccctgggccctctgggaactgtgcccttacccgtgttttgccttgtccctggcgccagtggccctctttcgacctgaatcttgcaaggtgcgtgcacttccccggttgtggttccgccgtcggaggggtcgctcccaactggtgtg

SEQ ID NO: 423537 - DNA, 618 bp, Homo sapiens
  misc_feature (427)..(427): n is a, c, g, or t
  misc_feature (429)..(430): n is a, c, g, or t
  misc_feature (444)..(444): n is a, c, g, or t
gcagtggtatcaacccagagtcgccattatggccggggaaggtgctttagtctgaagatggcggcctcagcagcgcgaggtgctgcggcgctgcgtagaagtatcaatcagccggttgcttttgtgagaagaattccttggactgcggcgtcgagtcagctgaaagaacactttgcacagttcggccatgtcagaaggtgcattttaccttttgacaaggagactggctttcacagaggtttgggttgggttcagttttcttcagaagaaggacttcggaatgcactacaacaggaaaatcatattatagatggagtaaaggtccaggttcacactagaaggccaaaacttccgcaaacatctgatgatgaaaagaaagatttttgagactgcagcctattaataaagttaacataactgagaatanannaaaaaaaaaaaaanacttgggcaagcttattgcatgcggccgaatttggggtcattggccaattcgccctaatagggggccgtataaaattaactgggccgggtgtttaaaaaaggggggtgtggaaaaacccgggggtccaccaatttaattgggtggaaaacatccttcttttggggggggagaaa

SEQ ID NO: 423538 - DNA, 1918 bp, Homo sapiens
aggaaaaacatataagcattgaagaggagcacttaaggaggatggaagaggccagattgcagctcaaggatcaacttctttgcttggagactgaacaggaatccattcttggtgtgataggaaaggaaattgatgcagcttgtaaaacattctccaaggactcagtggagaaattaaaagttttttcatctggtcctgatatacattatgacccacatcgctggttagcagaaagcaagactaaacttcagtggctctgtgaggaactgaaagagagagaaaacagagagaaaaatctgcgacaccagctgatgctctgcagacaacaactcaggaatttgactgaaaacaaggaatctgagttgcagtgtctctttcaacagatagaaaggcaggagcagcttctggatgaaatacatcgtgagaagagagatctactggaagagacccaaagaaaagatgaagaaatgggatctctgcaggaccgtgtaattgcattagaaacgagtacccaagtggccttggaccatctggagtctgtgcctgagaaactgagcctactagaagatttcaaagacttcagagattcctgcagttcatctgagagaactgatggaagatattccaaatacagggttcgcagaaattctcttcagcatcaccaagatgacaccaagtacagaaccaaaagtttcaaaggtgacagaacctttctggaaggttcccacactcgtgggttagatcactcatcctcttggcaggatcacagtcgcttcctgtctagtccaagattttcatacgtgaactcatttaccaaaagaactgttgctccagattcagcttcaaacaaggaagatgccacaatgaatggaacaagttcacaacccaaaaaagaggaatatgggagctaaaaaagcaaatgtaatttgttattttacatgagtatgttacaaataataacatctctattcttacagcaatttggcccagattatctaacagacatacctgcagctttggctctttggtattgccaaacattgacaaaagtgacaatactgttggtccttgtgaatggtaaaccaatccaaataatatcagatcatgaatgatgtgcagctaatttatttgcaacttatactagcacagaaagaatgatattttttcactttgtattttcctttttcaagtgtggtcagtcacattttcccaaccaaaatttggatttctaattgaggccttttaaaaattactggctaaaaagaaggaaaatgagtttcccttgaggcaaaagttgccagcactttagattcagggagcatttatatacaactgattttttgaaaaatgctttctccctaataaattatcatgtgttataacatgtggagatgtgcatatataacattagacagtccactttataaatgctcaggacttttatatctatcatcttaacagtccacaactgcataccgtagctgaaaattatttccaatcatccatttttaatagcaataaagaattcataaatgatatctgaactgtagagcactgtaaagaattcatagcacaatttatttatttgtctttttgtggccaaatatcctactgtgatcacttcagtcatatcctggaccgtctttggtttactgtgactaaaatcatagcaccaaactcctttgtccatgagatttatatataatcttgtataatttggtcctatctgcttctaccatcccaacttttttcatcaaagtgtctaagaacgtattccctttacacgctgatctcctagtggagaaggatttatattaaatgctaagtaatagtaaactttcaggaactgaatcctattgggtcatggattctgcatagacaagggcaataaagcaatacctttgtaatatgcataaaa

SEQ ID NO: 423539 - DNA, 351 bp, Homo sapiens
gcagtggtatcaacccagagtcgccattatggccggggaaggtgctttagtctgaagatggcggcctcagcagcgcgaggtgctgcggcgctgcgtagaagtatcaatcagccggttgcttttgtgagaagaattccttggactgcggcgtcgagtcagctgaaagaacactttgcacagttcggccatgtcagaaggtgcattttaccttttgacaaggagactggctttcacagaggtttgggttgggttcagttttcttcagaagaaggacttcggaatgcactacaacaggaaaatcatattatagatggagtaaaggtaatttatttctatgccagatacatacat

SEQ ID NO: 423540 - DNA, 424 bp, Homo sapiens
gcagtggtatcaacccagagtcgccattatggccggggaaggtgctttagtctgaagatggcggcctcagcagcgcgaggtgctgcggcgctgcgtagaagtatcaatcagccggttgcttttgtgagaagaattccttggactgcggcgtcgagtcagctgaaagaacactttgcacagttcggccatgtcagaaggtgcattttaccttttgacaaggagactggctttcacagaggtttgggttgggttcagttttcttcagaagaaggacttcggaatgcactacaacaggaaaatcatattatagatggagtaaaggtccaggttcacactagaaggccaaaacttccgcaaacatctgatgatgaaaagaaagatttttgagactgcagcctattaataaagttaacataactgagaa

SEQ ID NO: 423541 - DNA, 702 bp, Homo sapiens
aggaaaaacatataagcattgaagaggagcacttaaggaggatggaagaggccagattgcagctcaaggatcaacttctttgcttggagactgaacaggaatccattcttggtgtgataggaaaggaaattgatgcagcttgtaaaacattctccaaggactcagtggagaaattaaaagttttttcatctggtcctgatatacattatgacccacatcgctggttagcagaaagcaagactaaacttcagtggctctgtgaggaactgaaagagagagaaaacagagagaaaaatctgcgacaccagctgatgctctgcagacaacaactcaggaatttgactgaaaacaaggaatctgagttgcagtgtctctttcaacagatagaaaggcaggagcagcttctggatgaaatacatcgtgagaagagaggtcagctgaaagaacactttgcacagttcggccatgtcagaaggtgcattttaccttttgacaaggagactggctttcacagaggtttgggttgggttcagttttcttcagaagaaggacttcggaatgcactacaacaggaaaatcatattatagatggagtaaaggtccaggttcacactagaaggccaaaacttccgcaaacatctgatgatgaaaagaaagatttttgagactgcagcctattaataaagttaacataactgagaa

SEQ ID NO: 423542 - DNA, 626 bp, Homo sapiens
gcagtggtatcaacccagagtcgccattatggccggggaaggtgctttagtctgaagatggcggcctcagcagcgcgaggtgctgcggcgctgcgtagaagtatcaatcagccggttgcttttgtgagaagaattccttggactgcggcgtcgagtcagctgaaagaacactttgcacagttcggccatgtcagaaggtgcattttaccttttgacaaggagactggctttcacagaggtttgggttgggttcagttttcttcagaagaaggacttcggaatgcactacaacaggaaaatcatattatagatggagtaaaggtccaggttcacactagaaggccaaaacttccgcaaacatctgatgatgaaaagaaagatttttgagactgcagcctattaataaagttaacataactgagaaaaaaaaaaaaaaaacttgggggcttctatggggggggggggaaaagggggttttggaattggcgcccttgggcctatagctgttccctggacccagttttttttggtccccagtggggtgagatctgcccgggtccccctaataagggaggcggtataaaattgcggataacgccgggttacccttgcttatatcgtccggg

SEQ ID NO: 423543 - DNA, 396 bp, Homo sapiens
  misc_feature (383)..(384): n is a, c, g, or t
gcagtggtatcaacccagagtcgccattatggccggggaaggtgctttagtctgaagatggcggcctcagcagcgcgaggtgctgcggcgctgcgtagaagtatcaatcagccggttgcttttgtgagaagaattccttggactgcggcgtcgagtcagctgaaagaacactttgcacagttcggccatgtcagaaggtgcattttaccttttgacaaggagactggctttcacagaggtttgggttgggttcagttttcttcagaagaaggacttcggaatgcactacaacaggaaaatcatattatagatggagtaaaggtccaggttcacactagaaggccaaaacttccgcaaacatcttcagaatccaaatcagggtnncgagctcgaatg

SEQ ID NO: 423544 - DNA, 418 bp, Homo sapiens
  misc_feature (375)..(375): n is a, c, g, or t
  misc_feature (407)..(407): n is a, c, g, or t
gcagtggtatcaacccagagtcgccattatggccggggaaggtgctttagtctgaagatggcggcctcagcagcgcgaggtgctgcggcgctgcgtagaagtatcaatcagccggttgcttttgtgagaagaattccttggactgcggcgtcgagtcagctgaaagaacactttgcacagttcggccatgtcagaaggtgcattttaccttttgacaaggagactggctttcacagaggtttgggttgggttcagttttcttcagaagaaggacttcggaatgcactacaacaggaaaatcatattatagatggagtaaaggtccagggttcacacttaggaaggcccaaaactttaccgccaaacatctaaatnattgaaaaaggaaaggttttttagaggacttncagcctattta

SEQ ID NO: 423545 - DNA, 1427 bp, Homo sapiens
tcagaggcgccccaagagtgaggagaggcaggtggcagaagagccctgctaaggccagggggcctcaggaaaactcccccagcagctcctgggcaccccacggcttacacccgctcctggggcagagggcgatggggttaggggccagccgctgcctgcagggaacccaggccttgcctcccagcgctcttccctggcacgcaccccccatcctgtccccttctggggtccctgccctgaggcctgtcctttcctccccagctctggaaggagtgttgctccctgggcaggtctgaggtgggcttgagggagggtgacacagaggcatgccccacctggcttctggctttctgggcctccgcctctcttcactttgctagaagaagccgtcactgccaggatccgggcattactttgggggtggggaatgttttccatgcaggtggggaactcctgcactttggccagtgtttaatgcccgtggaagcctggcacagagagattcacacccttcacccaccatggtcccggagagcctgatggcaatgcctgacctcaggaacaggagaccaacaaaatacactttcttggcttggtgctgtggctcatgcctgtaatcccaacactttgggagtccaaggtgggtggatcacatgaggtcaggagttggagaccagcctgagcaacgtggtgaaaccccatctctactaaaaatagaaaaattagccagacatggtggtatgcgcctactcaggaggctgaggcaggagaatcgcttgaacttgggaagcagaggttgcagtgagccaagatcacaacactgcactccagcctgggtgacagagcaagaatccatctctaaaataaaaatatactttctcccaaggtccccagcccagagggtgtgagggccttgcagtgggaggtaggtgtcactgcgcatccgtgacagtggggagagtgggatgagggggacccaccagacctctagagcagttttctcccactgtcactttctccctccataatagagggcacaaggggcatcatggggcactgggtgtggctggccagacacctgttcccacctgagtgatgcaggactttcctcaatcacttttgccagctggagacacccagccggcccttgccctgcctcggccctcaacttcagggctggctcaggcccaccgccatttctgtcatggagggcagaggaccacagtgttacagccttctctgtaccacgttcgatgggtcccatgctcttgtactgcatccaagaagaatgaggatatgttgacaatcagatagtgaggaggggctgggcacagtggctcaggcctgggaggctgaggtgggaggatcacttgagttcaaaagtctgagaccagcctggccaactggtgaaaccctgtctctactaa

SEQ ID NO: 423546 - DNA, 1132 bp, Homo sapiens
ggccgaagtcgggcgagcgcgccgtgcggcggctgggagtgggctgcatgtgccgcgcggggagcccgcccgacttcggggaggcagcggggcgccgtggccccgcggctcagctccctgccgggtcgggtgtcccagccctgcgacttccggggcccggcggctcctcggggagctcgtccacaggcagcctccggggcgagagagcgcgcggcgcgggcgccgggacggtccgcggcacgcgggtggagccgccggcgctcgggctcccgcaggggcggcgggcggggcggggtgaggcgggccggccgccctcccctctcctccctcccgcagcccgccctcccttcctccggtcccgcagccaattaggcggccccctcgggcgggaggcgtggggcgctgcataaagcggcggggagctgccaccccgggagcgggctgcgcagtgtccgggccgagccggtgcgccgcagactagggcgcctcgggccagggagcgcggaggagccatggccaccgctaacggggccgtggaaaacgggcagccggacaggaagccgccggccctgccgcgccccatccgcaacctggaggtcaagttcaccaagatatttatcaacaatgaatggcacgaatccaagagtgggaaaaagtttgctacatgtaacccttcaactcgggagcaaatatgtgaagtggaagaaggagataagcccgacgtggacaaggctgtggaggctgcacaggttgccttccagaggggctcgccatggcgccggctggatgccctgagtcgtgggcggctgctgcaccagctggctgacctggtggagagggaccgcgccaccttggccttcgaggagggcagctcccactgcagccaccccagagccagctaaccttcagagagcttcctgggaacacacaagcacacacgactggccacacagcagaggccactgtgctacagatggaagatcagatgccagtgtgcgttccttcccagcacagctttaaatccgcctggcctccaaggggcccttcaaagagggtgcatgtctatgttttagcccaccaccctgcagcccactttaggtgttttgaaataaaagcaatcctcacactcaga

SEQ ID NO: 423547 - DNA, 2113 bp, Homo sapiens
ggccgaagtcgggcgagcgcgccgtgcggcggctgggagtgggctgcatgtgccgcgcggggagcccgcccgacttcggggaggcagcggggcgccgtggccccgcggctcagctccctgccgggtcgggtgtcccagccctgcgacttccggggcccggcggctcctcggggagctcgtccacaggcagcctccggggcgagagagcgcgcggcgcgggcgccgggacggtccgcggcacgcgggtggagccgccggcgctcgggctcccgcaggggcggcgggcggggcggggtgaggcgggccggccgccctcccctctcctccctcccgcagcccgccctcccttcctccggtcccgcagccaattaggcggccccctcgggcgggaggcgtggggcgctgcataaagcggcggggagctgccaccccgggagcgggctgcgcagtgtccgggccgagccggtgcgccgcagactagggcgcctcgggccagggagcgcggaggagccatggccaccgctaacggggccgtggaaaacgggcagccggacaggaagccgccggccctgccgcgccccatccgcaacctggaggtcaagttcaccaaggtgaggcgggcgcccctcccacccgacggccgcgggcccctgcgctgggcagccagactcggggcggcgggggcgagggagcagcgggccgggggtccgccgggcgccgccgagacccgagcctccctgcccgggcgcggctctccagaaaccgcacctttcgcgggacgtctcgggcgggatcgcaggcggcggggctcggcgctgtgagcctcgaagccgggaaaccgaggccgtccagcgcccgcgcggggccgggccgcccgcatccctgcgaggccccgacgtgtccctgcgctgcccgctttgatcgcgagtggaggtgcgcgccgcgttgactcggagcgcgctggttttggggagctccctccccaaaaacccctgcgatgatttccagggtggacgagtctggctttgagagggtcggagggtccgagagcgccaagagagagtccgggaggcagatggcggagctgcagttggaagactggggaagcgggtcctccgagcaaagcgcagcgggcgccttccgtgcttagtttatacccggctcagcagcagaacgaggaggagtaggaaggtgctcgcttactgacgaaacctccccggagcccagaggtcccggtgtttacacacaaggcgcgcgctccggaaggtcgcagacctgggcctttgggaagcggtgggtcgcgaggccgcagaagcgcacggttctctgcctcctcgctctgtgggctgggaggctacagcgttggcagaacggcgagattacctgcccggggcagaaaggaataaaagaagattggtgaggcctccgaggcctctgagctggggctgaggagggccgagagacccgggtccgggagcgcgacccgatggaggacacccccaggctgtctggcgtgcgcgtctgtcgtgggccggtgctggggcactttagaggcacaggccaggccgagagccattgccttaactttccccacctttggcttctcttgatttttgcttttacccatagcccccaactccagctgacaccgcacttagagaatttcctcatccgttttactttaagaagtagcaattatctttctcaaagaattttaatcaagcggagaaagttgcagggcactatgtgtggccttcagatttgggtctcttggcacttaattcccaatgtcggctgagcctctgatcacaagacatttaaattaactgttttcagaaggctctgtaatcaacaaagacacgtcgctgtaaactaaacgctggaaattattcttaatgtagttttatttgtaatatcagcttcagagtgaaaattccaacacgaattctgggaagagtgaaaatggtacccgaattttgtaagaccctaaccccaggtgcttggctgctgctactgatggttaagtggggaggttgtttgttttcttttggttgtacaggatttcaaaatactgtatatagaaaccagacagtaaatgtattatggtcctttt

SEQ ID NO: 423548 - DNA, 319 bp, Homo sapiens
gctcgactgtaagtacacagaggtggtatatttacagctataaaaagatacaataactctaccaattatttataattggtagagttattgtatctttttatagttgtaagtacacagaggtggtatatttaaacttctgtaatatactgtatttagaaatggaaatatatatagtgttaggtttcacttcttttaaggtttacccctgtggtgtggtttaaaaatctataggcctgggaattccgatcctagctgcagatcgcatcccacaatgcgagaatgataaaataaaattggatatttgagaaaaaaaaaaagc

SEQ ID NO: 423549 - DNA, 310 bp, Homo sapiens
gtggcaggtggtgtgggccagcttccagcagctttggctgctaaggggccgggactttattcattgggcggtggggatgcttataggtgcccaagaagtgcaacaatgctgcctgtctgtttgggaagcctctggccattgcaacaacagccaggcaggaagctgaagagccaggtggcaacatgaagtgagggttcaaaaagtgcccatggaggcagggaggaggacacgtcttcagcagatgttttagagggagaggtagaacacatgcaacagcatcctctttgcaaaggctgcctattagtaccac

SEQ ID NO: 423550 - DNA, 3784 bp, Homo sapiens
ggccgaagtcgggcgagcgcgccgtgcggcggctgggagtgggctgcatgtgccgcgcggggagcccgcccgacttcggggaggcagcggggcgccgtggccccgcggctcagctccctgccgggtcgggtgtcccagccctgcgacttccggggcccggcggctcctcggggagctcgtccacaggcagcctccggggcgagagagcgcgcggcgcgggcgccgggacggtccgcggcacgcgggtggagccgccggcgctcgggctcccgcaggggcggcgggcggggcggggtgaggcgggccggccgccctcccctctcctccctcccgcagcccgccctcccttcctccggtcccgcagccaattaggcggccccctcgggcgggaggcgtggggcgctgcataaagcggcggggagctgccaccccgggagcgggctgcgcagtgtccgggccgagccggtgcgccgcagactagggcgcctcgggccagggagcgcggaggagccatggccaccgctaacggggccgtggaaaacgggcagccggacaggaagccgccggccctgccgcgccccatccgcaacctggaggtcaagttcaccaagatatttatcaacaatgaatggcacgaatccaagagtgggaaaaagtttgctacatgtaacccttcaactcgggagcaaatatgtgaagtggaagaaggagataagcccgacgtggacaaggctgtggaggctgcacaggttgccttccagaggggctcgccatggcgccggctggatgccctgagtcgtgggcggctgctgcaccagctggctgacctggtggagagggaccgcgccaccttggccatgacaacgtcgtgtgcttcaccaggcatgagcccattggtgtctgtggggccatcactccatggaacttccccctgctgatgctggtgtggaagctggcacccgccctctgctgtgggaacaccatggtcctgaagcctgcggagcagacacctctcaccgccctttatctcggctctctgatcaaagaggccgggttccctccaggagtggtgaacattgtgccaggattcgggcccacagtgggagcagcaatttcttctcaccctcagatcaacaagatcgccttcaccggctccacagaggttggaaaactggttaaagaagctgcgtcccggagcaatctgaagcgggtgacgctggagctgggggggaagaacccctgcatcgtgtgtgcggacgctgacttggacttggcagtggagtgtgcccatcagggagtgttcttcaaccaaggccagtgttgcacggcagcctccagggtgttcgtggaggagcaggtctactctgagtttgtcaggcggagcgtggagtatgccaagaaacggcccgtgggagaccccttcgatgtcaaaacagaacaggggcctcagattgatcaaaagcagttcgacaaaatcttagagctgatcgagagtgggaagaaggaaggggccaagctggaatgcgggggctcagccatggaagacaaggggctcttcatcaaacccactgtcttctcagaagtcacagacaacatgcggattgccaaagaggagattttcgggccagtgcaaccaatactgaagttcaaaagtatcgaagaagtgataaaaagagcgaatagcaccgactatggactcacagcagccgtgttcacaaaaaatctcgacaaagccctgaagttggcttctgccttagagtctggaacggtctggatcaactgctacaacgccctctatgcacaggctccatttggtggctttaaaatgtcaggaaatggcagagaactaggtgaatacgctttggccgaatacacagaagtgaaaactgtcaccatcaaacttggcgacaagaacccctgaaggaaaggcggggctccttcctcaaacatcggacggcggaatgtggcagatgaaatgtgctggaggaaaaaaatgacatttctgaccttcccgggacacattcttctggaggctttacatctactggagttgaatgattgctgttttcctctcactctcctgtttattcaccagactggggatgcctataggttgtctgtgaaatcgcagtcctgcctggggagggagctgttggccatttctgtgtttccctttaaaccagatcctggagacagtgagatactcagggcgttgttaacagggagtggtatttgaagtgtccagcagttgcttgaaatgctttgccgaatctgactccagtaagaatgtgggaaaaccccctgtgtgttctgcaagcagggctcttgcaccagcggtctcctcagggtggacctgcttacagagcaagccacgcctctttccgaggtgaaggtgggaccattccttgggaaaggattcacagtaaggttttttggtttttgttttttgttttcttgtttttaaaaaaaggatttcacagtgagaaagttttggttagtgcataccgtggaagggcgccagggtctttgtggattgcatgttgacattgaccgtgagattcggcttcaaaccaatactgcctttggaatatgacagaatcaatagcccagagagcttagtcaaagacgatatcacggtctaccttaaccaaggcactttcttaagcagaaaatattgttgaggttacctttgctgctaaagatccaatcttctaacgccacaacagcatagcaaatcctaggataattcacctcctcatttgacaaatcagagctgtaattcgctttaacaaattacgcatttctatcacgttcactaacagcttatgataagtctgtgtagtcttccttttctccagttctgttacccaatttagattagtaaagcgtacacaactggaaagactgctgtaataacacagccttgttatttttaagtcctattttgatattaatttctgattagttagtaaataacacctggattctatggaggacctcggtcttcatccaagtggcctgagtatttcactggcaggttgtgaatttttcttttcctctttggggatccaaatgatgatgtgcaatttcatgttttaacttgggaaactgaaagtgttcccatatagcttcaaaaacaaaaacaaatgtgttatccgacggatacttttatggttactaactagtactttcctaattgggaaagtagtgcttaagtttgcaaattaagttggggagggcaataataaaatgagggcccgtaacagaaccagtgtgtgtataacgaaaaccatgtataaaatgggcctatcacccttgtcagagatataaattaccacatttgccttcccttcatcagctaacacttatcacttatactaccaataacttgttaaatcaggatttggcttcatacactgaattttcagtattttatctcaagtagatatagacactaaccttgatagtgatacgttagagggttcctattcttccattgtacgataatgtctttaatatgaaatgctacattatttataattggtagagttattgtatctttttatagttgtaagtacacagaggtggtatatttaaacttctgtaatatactgtatttagaaatggaaatatatatagtgttaggtttcacttcttttaaggtttacccctgtggtgtggtttaaaaatctataggcctgggaattccgatcctagctgcagatcgcatcccacaatgcgagaatgataaaataaaattggatatttgagaaaaaaaaaaagc

SEQ ID NO: 423551 - DNA, 3860 bp, Homo sapiens
ggccgaagtcgggcgagcgcgccgtgcggcggctgggagtgggctgcatgtgccgcgcggggagcccgcccgacttcggggaggcagcggggcgccgtggccccgcggctcagctccctgccgggtcgggtgtcccagccctgcgacttccggggcccggcggctcctcggggagctcgtccacaggcagcctccggggcgagagagcgcgcggcgcgggcgccgggacggtccgcggcacgcgggtggagccgccggcgctcgggctcccgcaggggcggcgggcggggcggggtgaggcgggccggccgccctcccctctcctccctcccgcagcccgccctcccttcctccggtcccgcagccaattaggcggccccctcgggcgggaggcgtggggcgctgcataaagcggcggggagctgccaccccgggagcgggctgcgcagtgtccgggccgagccggtgcgccgcagactagggcgcctcgggccagggagcgcggaggagccatggccaccgctaacggggccgtggaaaacgggcagccggacaggaagccgccggccctgccgcgccccatccgcaacctggaggtcaagttcaccaagatatttatcaacaatgaatggcacgaatccaagagtgggaaaaagtttgctacatgtaacccttcaactcgggagcaaatatgtgaagtggaagaaggagataagcccgacgtggacaaggctgtggaggctgcacaggttgccttccagaggggctcgccatggcgccggctggatgccctgagtcgtgggcggctgctgcaccagctggctgacctggtggagagggaccgcgccaccttggccgccctggagacgatggatacagggaagccatttcttcatgcttttttcatcgacctggagggctgtattagaaccctcagatactttgcagggtgggcagacaaaatccagggcaagaccatccccacagatgacaacgtcgtgtgcttcaccaggcatgagcccattggtgtctgtggggccatcactccatggaacttccccctgctgatgctggtgtggaagctggcacccgccctctgctgtgggaacaccatggtcctgaagcctgcggagcagacacctctcaccgccctttatctcggctctctgatcaaagaggccgggttccctccaggagtggtgaacattgtgccaggattcgggcccacagtgggagcagcaatttcttctcaccctcagatcaacaagatcgccttcaccggctccacagaggttggaaaactggttaaagaagctgcgtcccggagcaatctgaagcgggtgacgctggagctgggggggaagaacccctgcatcgtgtgtgcggacgctgacttggacttggcagtggagtgtgcccatcagggagtgttcttcaaccaaggccagtgttgcacggcagcctccagggtgttcgtggaggagcaggtctactctgagtttgtcaggcggagcgtggagtatgccaagaaacggcccgtgggagaccccttcgatgtcaaaacagaacaggggcctcagattgatcaaaagcagttcgacaaaatcttagagctgatcgagagtgggaagaaggaaggggccaagctggaatgcgggggctcagccatggaagacaaggggctcttcatcaaacccactgtcttctcagaagtcacagacaacatgcggattgccaaagaggagattttcgggccagtgcaaccaatactgaagttcaaaagtatcgaagaagtgataaaaagagcgaatagcaccgactatggactcacagcagccgtgttcacaaaaaatctcgacaaagccctgaagttggcttctgccttagagtctggaacggtctggatcaactgctacaacgccctctatgcacaggctccatttggtggctttaaaatgtcaggaaatggcagagaactaggtgaatacgctttggccgaatacacagaagtgaaaactgtcaccatcaaacttggcgacaagaacccctgaaggaaaggcggggctccttcctcaaacatcggacggcggaatgtggcagatgaaatgtgctggaggaaaaaaatgacatttctgaccttcccgggacacattcttctggaggctttacatctactggagttgaatgattgctgttttcctctcactctcctgtttattcaccagactggggatgcctataggttgtctgtgaaatcgcagtcctgcctggggagggagctgttggccatttctgtgtttccctttaaaccagatcctggagacagtgagatactcagggcgttgttaacagggagtggtatttgaagtgtccagcagttgcttgaaatgctttgccgaatctgactccagtaagaatgtggggtggacctgcttacagagcaagccacgcctctttccgaggtgaaggtgggaccattccttgggaaaggattcacagtaaggttttttggtttttgttttttgttttcttgtttttaaaaaaaggatttcacagtgagaaagttttggttagtgcataccgtggaagggcgccagggtctttgtggattgcatgttgacattgaccgtgagattcggcttcaaaccaatactgcctttggaatatgacagaatcaatagcccagagagcttagtcaaagacgatatcacggtctaccttaaccaaggcactttcttaagcagaaaatattgttgaggttacctttgctgctaaagatccaatcttctaacgccacaacagcatagcaaatcctaggataattcacctcctcatttgacaaatcagagctgtaattcgctttaacaaattacgcatttctatcacgttcactaacagcttatgataagtctgtgtagtcttccttttctccagttctgttacccaatttagattagtaaagcgtacacaactggaaagactgctgtaataacacagccttgttatttttaagtcctattttgatattaatttctgattagttagtaaataacacctggattctatggaggacctcggtcttcatccaagtggcctgagtatttcactggcaggttgtgaatttttcttttcctctttggggatccaaatgatgatgtgcaatttcatgttttaacttgggaaactgaaagtgttcccatatagcttcaaaaacaaaaacaaatgtgttatccgacggatacttttatggttactaactagtactttcctaattgggaaagtagtgcttaagtttgcaaattaagttggggagggcaataataaaatgagggcccgtaacagaaccagtgtgtgtataacgaaaaccatgtataaaatgggcctatcacccttgtcagagatataaattaccacatttgccttcccttcatcagctaacacttatcacttatactaccaataacttgttaaatcaggatttggcttcatacactgaattttcagtattttatctcaagtagatatagacactaaccttgatagtgatacgttagagggttcctattcttccattgtacgataatgtctttaatatgaaatgctacattatttataattggtagagttattgtatctttttatagttgtaagtacacagaggtggtatatttaaacttctgtaatatactgtatttagaaatggaaatatatatagtgttaggtttcacttcttttaaggtttacccctgtggtgtggtttaaaaatctataggcctgggaattccgatcctagctgcagatcgcatcccacaatgcgagaatgataaaataaaattggatatttgagaaaaaaaaaaagc

SEQ ID NO: 423552 - DNA, 2442 bp, Homo sapiens
ggcccttggtgttcttcccactggtcctctggccacatccccagccaatagctttgggcctctgcctcttctgtctcctcttcaagcagctcccaattgccatctaaaagttatcaacccagtgtaatttctgcccctccctcgttcacagacaccccaccgtccaccaggctctctcgttttgctctctattgccaccccagggaattcacctctttactttttttaaaatccccttcattctctaaagggaaacccttagtcctggccatttcaaaagcatcacacagaagaagaccttgatatttacatttaagtcacatatgcagctactgacacttactagtgctgttatagtcctggctattattccatgaggtcgtcacattttaaccttttgcataagcctccaacggcctgatggaatgatgaagcctcagaacagtttctacacaatggctaagggatgtacccattttgaattttcctcttttctgtgatcacagaggtgaatacgctttggccgaatacacagaagtgaaaactgtcaccatcaaacttggcgacaagaacccctgaaggaaaggcggggctccttcctcaaacatcggacggcggaatgtggcagatgaaatgtgctggaggaaaaaaatgacatttctgaccttcccgggacacattcttctggaggctttacatctactggagttgaatgattgctgttttcctctcactctcctgtttattcaccagactggggatgcctataggttgtctgtgaaatcgcagtcctgcctggggagggagctgttggccatttctgtgtttccctttaaaccagatcctggagacagtgagatactcagggcgttgttaacagggagtggtatttgaagtgtccagcagttgcttgaaatgctttgccgaatctgactccagtaagaatgtgggaaaaccccctgtgtgttctgcaagcagggctcttgcaccagcggtctcctcagggtggacctgcttacagagcaagccacgcctctttccgaggtgaaggtgggaccattccttgggaaaggattcacagtaaggttttttggtttttgttttttgttttcttgtttttaaaaaaaggatttcacagtgagaaagttttggttagtgcataccgtggaagggcgccagggtctttgtggattgcatgttgacattgaccgtgagattcggcttcaaaccaatactgcctttggaatatgacagaatcaatagcccagagagcttagtcaaagacgatatcacggtctaccttaaccaaggcactttcttaagcagaaaatattgttgaggttacctttgctgctaaagatccaatcttctaacgccacaacagcatagcaaatcctaggataattcacctcctcatttgacaaatcagagctgtaattcgctttaacaaattacgcatttctatcacgttcactaacagcttatgataagtctgtgtagtcttccttttctccagttctgttacccaatttagattagtaaagcgtacacaactggaaagactgctgtaataacacagccttgttatttttaagtcctattttgatattaatttctgattagttagtaaataacacctggattctatggaggacctcggtcttcatccaagtggcctgagtatttcactggcaggttgtgaatttttcttttcctctttggggatccaaatgatgatgtgcaatttcatgttttaacttgggaaactgaaagtgttcccatatagcttcaaaaacaaaaacaaatgtgttatccgacggatacttttatggttactaactagtactttcctaattgggaaagtagtgcttaagtttgcaaattaagttggggagggcaataataaaatgagggcccgtaacagaaccagtgtgtgtataacgaaaaccatgtataaaatgggcctatcacccttgtcagagatataaattaccacatttgccttcccttcatcagctaacacttatcacttatactaccaataacttgttaaatcaggatttggcttcatacactgaattttcagtattttatctcaagtagatatagacactaaccttgatagtgatacgttagagggttcctattcttccattgtacgataatgtctttaatatgaaatgctacattatttataattggtagagttattgtatctttttatagttgtaagtacacagaggtggtatatttaaacttctgtaatatactgtatttagaaatggaaatatatatagtgttaggtttcacttcttttaaggtttacccctgtggtgtggtttaaaaatctataggcctgggaattccgatcctagctgcagatcgcatcccacaatgcgagaatgataaaataaaattggatatttgagaaaaaaaaaaagc

SEQ ID NO: 423553 - DNA, 2393 bp, Homo sapiens
gttattattttttatttttgtttcatgttaatccttcccttcagtctccaatggcaatgcagctgaagcaatgtttggacgttctttcttctctaatcatcgtttttcaggcatgtgtgtgctctgggcatatgaaaaacatgtaaagagaaggaaatgcttgttcacagcatgcatttccattcagtcatgcctctcattgccattcttgcaattaatcatagattttcgggccagtgcaaccaatactgaagttcaaaagtatcgaagaagtgataaaaagagcgaatagcaccgactatggactcacagcagccgtgttcacaaaaaatctcgacaaagccctgaagttggcttctgccttagagtctggaacggtctggatcaactgctacaacgccctctatgcacaggctccatttggtggctttaaaatgtcaggaaatggcagagaactaggtgaatacgctttggccgaatacacagaagtgaaaactgtcaccatcaaacttggcgacaagaacccctgaaggaaaggcggggctccttcctcaaacatcggacggcggaatgtggcagatgaaatgtgctggaggaaaaaaatgacatttctgaccttcccgggacacattcttctggaggctttacatctactggagttgaatgattgctgttttcctctcactctcctgtttattcaccagactggggatgcctataggttgtctgtgaaatcgcagtcctgcctggggagggagctgttggccatttctgtgtttccctttaaaccagatcctggagacagtgagatactcagggcgttgttaacagggagtggtatttgaagtgtccagcagttgcttgaaatgctttgccgaatctgactccagtaagaatgtgggaaaaccccctgtgtgttctgcaagcagggctcttgcaccagcggtctcctcagggtggacctgcttacagagcaagccacgcctctttccgaggtgaaggtgggaccattccttgggaaaggattcacagtaaggttttttggtttttgttttttgttttcttgtttttaaaaaaaggatttcacagtgagaaagttttggttagtgcataccgtggaagggcgccagggtctttgtggattgcatgttgacattgaccgtgagattcggcttcaaaccaatactgcctttggaatatgacagaatcaatagcccagagagcttagtcaaagacgatatcacggtctaccttaaccaaggcactttcttaagcagaaaatattgttgaggttacctttgctgctaaagatccaatcttctaacgccacaacagcatagcaaatcctaggataattcacctcctcatttgacaaatcagagctgtaattcgctttaacaaattacgcatttctatcacgttcactaacagcttatgataagtctgtgtagtcttccttttctccagttctgttacccaatttagattagtaaagcgtacacaactggaaagactgctgtaataacacagccttgttatttttaagtcctattttgatattaatttctgattagttagtaaataacacctggattctatggaggacctcggtcttcatccaagtggcctgagtatttcactggcaggttgtgaatttttcttttcctctttggggatccaaatgatgatgtgcaatttcatgttttaacttgggaaactgaaagtgttcccatatagcttcaaaaacaaaaacaaatgtgttatccgacggatacttttatggttactaactagtactttcctaattgggaaagtagtgcttaagtttgcaaattaagttggggagggcaataataaaatgagggcccgtaacagaaccagtgtgtgtataacgaaaaccatgtataaaatgggcctatcacccttgtcagagatataaattaccacatttgccttcccttcatcagctaacacttatcacttatactaccaataacttgttaaatcaggatttggcttcatacactgaattttcagtattttatctcaagtagatatagacactaaccttgatagtgatacgttagagggttcctattcttccattgtacgataatgtctttaatatgaaatgctacattatttataattggtagagttattgtatctttttatagttgtaagtacacagaggtggtatatttaaacttctgtaatatactgtatttagaaatggaaatatatatagtgttaggtttcacttcttttaaggtttacccctgtggtgtggtttaaaaatctataggcctgggaattccgatcctagctgcagatcgcatcccacaatgcgagaatgataaaataaaattggatatttgagaaaaaaaaaaagc

SEQ ID NO: 423554 - DNA, 1974 bp, Homo sapiens
gactctagaggaccccggctatacattatcagagaactaggtgaatacgctttggccgaatacacagaagtgaaaactgtcaccatcaaacttggcgacaagaacccctgaaggaaaggcggggctccttcctcaaacatcggacggcggaatgtggcagatgaaatgtgctggaggaaaaaaatgacatttctgaccttcccgggacacattcttctggaggctttacatctactggagttgaatgattgctgttttcctctcactctcctgtttattcaccagactggggatgcctataggttgtctgtgaaatcgcagtcctgcctggggagggagctgttggccatttctgtgtttccctttaaaccagatcctggagacagtgagatactcagggcgttgttaacagggagtggtatttgaagtgtccagcagttgcttgaaatgctttgccgaatctgactccagtaagaatgtgggaaaaccccctgtgtgttctgcaagcagggctcttgcaccagcggtctcctcagggtggacctgcttacagagcaagccacgcctctttccgaggtgaaggtgggaccattccttgggaaaggattcacagtaaggttttttggtttttgttttttgttttcttgtttttaaaaaaaggatttcacagtgagaaagttttggttagtgcataccgtggaagggcgccagggtctttgtggattgcatgttgacattgaccgtgagattcggcttcaaaccaatactgcctttggaatatgacagaatcaatagcccagagagcttagtcaaagacgatatcacggtctaccttaaccaaggcactttcttaagcagaaaatattgttgaggttacctttgctgctaaagatccaatcttctaacgccacaacagcatagcaaatcctaggataattcacctcctcatttgacaaatcagagctgtaattcgctttaacaaattacgcatttctatcacgttcactaacagcttatgataagtctgtgtagtcttccttttctccagttctgttacccaatttagattagtaaagcgtacacaactggaaagactgctgtaataacacagccttgttatttttaagtcctattttgatattaatttctgattagttagtaaataacacctggattctatggaggacctcggtcttcatccaagtggcctgagtatttcactggcaggttgtgaatttttcttttcctctttggggatccaaatgatgatgtgcaatttcatgttttaacttgggaaactgaaagtgttcccatatagcttcaaaaacaaaaacaaatgtgttatccgacggatacttttatggttactaactagtactttcctaattgggaaagtagtgcttaagtttgcaaattaagttggggagggcaataataaaatgagggcccgtaacagaaccagtgtgtgtataacgaaaaccatgtataaaatgggcctatcacccttgtcagagatataaattaccacatttgccttcccttcatcagctaacacttatcacttatactaccaataacttgttaaatcaggatttggcttcatacactgaattttcagtattttatctcaagtagatatagacactaaccttgatagtgatacgttagagggttcctattcttccattgtacgataatgtctttaatatgaaatgctacattatttataattggtagagttattgtatctttttatagttgtaagtacacagaggtggtatatttaaacttctgtaatatactgtatttagaaatggaaatatatatagtgttaggtttcacttcttttaaggtttacccctgtggtgtggtttaaaaatctataggcctgggaattccgatcctagctgcagatcgcatcccacaatgcgagaatgataaaataaaattggatatttgagaaaaaaaaaaagc

SEQ ID NO: 423555 - DNA, 1170 bp, Homo sapiens
tcgtgtccgtcctccatcacggtattactcgaacaaaggccatttcttaagcagaaaatattgttgaggttacctttgctgctaaagatccaatcttctaacgccacaacagcatagcaaatcctaggataattcacctcctcatttgacaaatcagagctgtaattcgctttaacaaattacgcatttctatcacgttcactaacagcttatgataagtctgtgtagtcttccttttctccagttctgttacccaatttagattagtaaagcgtacacaactggaaagactgctgtaataacacagccttgttatttttaagtcctattttgatattaatttctgattagttagtaaataacacctggattctatggaggacctcggtcttcatccaagtggcctgagtatttcactggcaggttgtgaatttttcttttcctctttggggatccaaatgatgatgtgcaatttcatgttttaacttgggaaactgaaagtgttcccatatagcttcaaaaacaaaaacaaatgtgttatccgacggatacttttatggttactaactagtactttcctaattgggaaagtagtgcttaagtttgcaaattaagttggggagggcaataataaaatgagggcccgtaacagaaccagtgtgtgtataacgaaaaccatgtataaaatgggcctatcacccttgtcagagatataaattaccacatttgccttcccttcatcagctaacacttatcacttatactaccaataacttgttaaatcaggatttggcttcatacactgaattttcagtattttatctcaagtagatatagacactaaccttgatagtgatacgttagagggttcctattcttccattgtacgataatgtctttaatatgaaatgctacattatttataattggtagagttattgtatctttttatagttgtaagtacacagaggtggtatatttaaacttctgtaatatactgtatttagaaatggaaatatatatagtgttaggtttcacttcttttaaggtttacccctgtggtgtggtttaaaaatctataggcctgggaattccgatcctagctgcagatcgcatcccacaatgcgagaatgataaaataaaattggatatttgagaaaaaaaaaaagc

SEQ ID NO: 423556 - DNA, 2200 bp, Homo sapiens
ggccgaagtcgggcgagcgcgccgtgcggcggctgggagtgggctgcatgtgccgcgcggggagcccgcccgacttcggggaggcagcggggcgccgtggccccgcggctcagctccctgccgggtcgggtgtcccagccctgcgacttccggggcccggcggctcctcggggagctcgtccacaggcagcctccggggcgagagagcgcgcggcgcgggcgccgggacggtccgcggcacgcgggtggagccgccggcgctcgggctcccgcaggggcggcgggcggggcggggtgaggcgggccggccgccctcccctctcctccctcccgcagcccgccctcccttcctccggtcccgcagccaattaggcggccccctcgggcgggaggcgtggggcgctgcataaagcggcggggagctgccaccccgggagcgggctgcgcagtgtccgggccgagccggtgcgccgcagactagggcgcctcgggccagggagcgcggaggagccatggccaccgctaacggggccgtggaaaacgggcagccggacaggaagccgccggccctgccgcgccccatccgcaacctggaggtcaagttcaccaaggtgaggcgggcgcccctcccacccgacggccgcgggcccctgcgctgggcagccagactcggggcggcgggggcgagggagcagcgggccgggggtccgccgggcgccgccgagacccgagcctccctgcccgggcgcggctctccagaaaccgcacctttcgcgggacgtctcgggcgggatcgcaggcggcggggctcggcgctgtgagcctcgaagccgggaaaccgaggccgtccagcgcccgcgcggggccgggccgcccgcatccctgcgaggccccgacgtgtccctgcgctgcccgctttgatcgcgagtggaggtgcgcgccgcgttgactcggagcgcgctggttttggggagctccctccccaaaaacccctgcgatgatttccagggtggacgagtctggctttgagagggtcggagggtccgagagcgccaagagagagtccgggaggcagatggcggagctgcagttggaagactggggaagcgggtcctccgagcaaagcgcagcgggcgccttccgtgcttagtttatacccggctcagcagcagaacgaggaggagtaggaaggtgctcgcttactgacgaaacctccccggagcccagaggtcccggtgtttacacacaaggcgcgcgctccggaaggtcgcagacctgggcctttgggaagcggtgggtcgcgaggccgcagaagcgcacggttctctgcctcctcgctctgtgggctgggaggctacagcgttggcagaacggcgagattacctgcccggggcagaaaggaataaaagaagattggtgaggcctccgaggcctctgagctggggctgaggagggccgagagacccgggtccgggagcgcgacccgatggaggacacccccaggctgtctggcgtgcgcgtctgtcgtgggccggtgctggggcactttagaggcacaggccaggccgagagccattgccttaactttccccacctttggcttctcttgatttttgcttttacccatagcccccaactccagctgacaccgcacttagagaatttcctcatccgttttactttaagaagtagcaattatctttctcaaagaattttaatcaagcggagaaagttgcagggcactatgtgtggccttcagatttgggtctcttggcacttaattcccaatgtcggctgagcctctgatcacaagacatttaaattaactgttttcagaaggctctgtaatcaacaaagacacgtcgctgtaaactaaacgctggaaattattcttaatgtagttttatttgtaatatcagcttcagagtgaaaattccaacacgaattctgggaagagtgaaaatggtacccgaattttgtaagaccctaaccccaggtgcttggctgctgctactgatggttaagtggggaggttgtttgttttcttttggttgtacaggatttcaaaatactgtatatagaaaccagacagtaaatgtattatggtccttttactttttatgtttttgagtcctatcagcaatctgaccacatacaaaaagtttacctctttctctatgatttttaggacacttttaaa

SEQ ID NO: 423557 - DNA, 3914 bp, Homo sapiens
ggccgaagtcgggcgagcgcgccgtgcggcggctgggagtgggctgcatgtgccgcgcggggagcccgcccgacttcggggaggcagcggggcgccgtggccccgcggctcagctccctgccgggtcgggtgtcccagccctgcgacttccggggcccggcggctcctcggggagctcgtccacaggcagcctccggggcgagagagcgcgcggcgcgggcgccgggacggtccgcggcacgcgggtggagccgccggcgctcgggctcccgcaggggcggcgggcggggcggggtgaggcgggccggccgccctcccctctcctccctcccgcagcccgccctcccttcctccggtcccgcagccaattaggcggccccctcgggcgggaggcgtggggcgctgcataaagcggcggggagctgccaccccgggagcgggctgcgcagtgtccgggccgagccggtgcgccgcagactagggcgcctcgggccagggagcgcggaggagccatggccaccgctaacggggccgtggaaaacgggcagccggacaggaagccgccggccctgccgcgccccatccgcaacctggaggtcaagttcaccaagatatttatcaacaatgaatggcacgaatccaagagtgggaaaaagtttgctacatgtaacccttcaactcgggagcaaatatgtgaagtggaagaaggagataagcccgacgtggacaaggctgtggaggctgcacaggttgccttccagaggggctcgccatggcgccggctggatgccctgagtcgtgggcggctgctgcaccagctggctgacctggtggagagggaccgcgccaccttggccgccctggagacgatggatacagggaagccatttcttcatgcttttttcatcgacctggagggctgtattagaaccctcagatactttgcagggtgggcagacaaaatccagggcaagaccatccccacagatgacaacgtcgtgtgcttcaccaggcatgagcccattggtgtctgtggggccatcactccatggaacttccccctgctgatgctggtgtggaagctggcacccgccctctgctgtgggaacaccatggtcctgaagcctgcggagcagacacctctcaccgccctttatctcggctctctgatcaaagaggccgggttccctccaggagtggtgaacattgtgccaggattcgggcccacagtgggagcagcaatttcttctcaccctcagatcaacaagatcgccttcaccggctccacagaggttggaaaactggttaaagaagctgcgtcccggagcaatctgaagcgggtgacgctggagctgggggggaagaacccctgcatcgtgtgtgcggacgctgacttggacttggcagtggagtgtgcccatcagggagtgttcttcaaccaaggccagtgttgcacggcagcctccagggtgttcgtggaggagcaggtctactctgagtttgtcaggcggagcgtggagtatgccaagaaacggcccgtgggagaccccttcgatgtcaaaacagaacaggggcctcagattgatcaaaagcagttcgacaaaatcttagagctgatcgagagtgggaagaaggaaggggccaagctggaatgcgggggctcagccatggaagacaaggggctcttcatcaaacccactgtcttctcagaagtcacagacaacatgcggattgccaaagaggagattttcgggccagtgcaaccaatactgaagttcaaaagtatcgaagaagtgataaaaagagcgaatagcaccgactatggactcacagcagccgtgttcacaaaaaatctcgacaaagccctgaagttggcttctgccttagagtctggaacggtctggatcaactgctacaacgccctctatgcacaggctccatttggtggctttaaaatgtcaggaaatggcagagaactaggtgaatacgctttggccgaatacacagaagtgaaaactgtcaccatcaaacttggcgacaagaacccctgaaggaaaggcggggctccttcctcaaacatcggacggcggaatgtggcagatgaaatgtgctggaggaaaaaaatgacatttctgaccttcccgggacacattcttctggaggctttacatctactggagttgaatgattgctgttttcctctcactctcctgtttattcaccagactggggatgcctataggttgtctgtgaaatcgcagtcctgcctggggagggagctgttggccatttctgtgtttccctttaaaccagatcctggagacagtgagatactcagggcgttgttaacagggagtggtatttgaagtgtccagcagttgcttgaaatgctttgccgaatctgactccagtaagaatgtgggaaaaccccctgtgtgttctgcaagcagggctcttgcaccagcggtctcctcagggtggacctgcttacagagcaagccacgcctctttccgaggtgaaggtgggaccattccttgggaaaggattcacagtaaggttttttggtttttgttttttgttttcttgtttttaaaaaaaggatttcacagtgagaaagttttggttagtgcataccgtggaagggcgccagggtctttgtggattgcatgttgacattgaccgtgagattcggcttcaaaccaatactgcctttggaatatgacagaatcaatagcccagagagcttagtcaaagacgatatcacggtctaccttaaccaaggcactttcttaagcagaaaatattgttgaggttacctttgctgctaaagatccaatcttctaacgccacaacagcatagcaaatcctaggataattcacctcctcatttgacaaatcagagctgtaattcgctttaacaaattacgcatttctatcacgttcactaacagcttatgataagtctgtgtagtcttccttttctccagttctgttacccaatttagattagtaaagcgtacacaactggaaagactgctgtaataacacagccttgttatttttaagtcctattttgatattaatttctgattagttagtaaataacacctggattctatggaggacctcggtcttcatccaagtggcctgagtatttcactggcaggttgtgaatttttcttttcctctttggggatccaaatgatgatgtgcaatttcatgttttaacttgggaaactgaaagtgttcccatatagcttcaaaaacaaaaacaaatgtgttatccgacggatacttttatggttactaactagtactttcctaattgggaaagtagtgcttaagtttgcaaattaagttggggagggcaataataaaatgagggcccgtaacagaaccagtgtgtgtataacgaaaaccatgtataaaatgggcctatcacccttgtcagagatataaattaccacatttgccttcccttcatcagctaacacttatcacttatactaccaataacttgttaaatcaggatttggcttcatacactgaattttcagtattttatctcaagtagatatagacactaaccttgatagtgatacgttagagggttcctattcttccattgtacgataatgtctttaatatgaaatgctacattatttataattggtagagttattgtatctttttatagttgtaagtacacagaggtggtatatttaaacttctgtaatatactgtatttagaaatggaaatatatatagtgttaggtttcacttcttttaaggtttacccctgtggtgtggtttaaaaatctataggcctgggaattccgatcctagctgcagatcgcatcccacaatgcgagaatgataaaataaaattggatatttgagaaaaaaaaaaagc

SEQ ID NO: 423558 - DNA, 3868 bp, Homo sapiens
ggccgaagtcgggcgagcgcgccgtgcggcggctgggagtgggctgcatgtgccgcgcggggagcccgcccgacttcggggaggcagcggggcgccgtggccccgcggctcagctccctgccgggtcgggtgtcccagccctgcgacttccggggcccggcggctcctcggggagctcgtccacaggcagcctccggggcgagagagcgcgcggcgcgggcgccgggacggtccgcggcacgcgggtggagccgccggcgctcgggctcccgcaggggcggcgggcggggcggggtgaggcgggccggccgccctcccctctcctccctcccgcagcccgccctcccttcctccggtcccgcagccaattaggcggccccctcgggcgggaggcgtggggcgctgcataaagcggcggggagctgccaccccgggagcgggctgcgcagtgtccgggccgagccggtgcgccgcagactagggcgcctcgggccagggagcgcggaggagccatggccaccgctaacggggccgtggaaaacgggcagccggacaggaagccgccggccctgccgcgccccatccgcaacctggaggtcaagttcaccaagatatttatcaacaatgaatggcacgaatccaagagtgggaaaaagtttgctacatgtaacccttcaactcgggagcaaatatgtgaagtggaagaaggagataagcccgacgtggacaaggctgtggaggctgcacaggttgccttccagaggggctcgccatggcgccggctggatgccctgagtcgtgggcggctgctgcaccagctggctgacctggtggagagggaccgcgccaccttggccgccctggagacgatggatacagggaagccatttcttcatgcttttttcatcgacctggagggctgtattagaaccctcagatactttgcagggtgggcagacaaaatccagggcaagaccatccccacagatgacaacgtcgtgtgcttcaccaggcatgagcccattggtgtctgtggggccatcactccatggaacttccccctgctgatgctggtgtggaagctggcacccgccctctgctgtgggaacaccatggtcctgaagcctgcggagcagacacctctcaccgccctttatctcggctctctgatcaaagaggccgggttccctccaggagtggtgaacattgtgccaggattcgggcccacagtgggagcagcaatttcttctcaccctcagatcaacaagatcgccttcaccggctccacagaggttggaaaactggttaaagaagctgcgtcccggagcaatctgaagcgggtgacgctggagctgggggggaagaacccctgcatcgtgtgtgcggacgctgacttggacttggcagtggagtgtgcccatcagggagtgttcttcaaccaaggccagtgttgcacggcagcctccagggtgttcgtggaggagcaggtctactctgagtttgtcaggcggagcgtggagtatgccaagaaacggcccgtgggagaccccttcgatgtcaaaacagaacaggggcctcagattgatcaaaagcagttcgacaaaatcttagagctgatcgagagtgggaagaaggaaggggccaagctggaatgcgggggctcagccatggaagacaaggggctcttcatcaaacccactgtcttctcagaagtcacagacaacatgcggattgccaaagaggagattttcgggccagtgcaaccaatactgaagttcaaaagtatcgaagaagtgataaaaagagcgaatagcaccgactatggactcacagcagccgtgttcacaaaaaatctcgacaaagccctgaagttggcttctgccttagagtctggaacggtctggatcaactgctacaacgccctctatgcacaggctccatttggtggctttaaaatgtcaggaaatggcagagaactaggtgaatacgctttggccgaatacacagaagtgaaaactgtcaccatcaaacttggcgacaagaacccctgaaggaaaggcggggctccttcctcaaacatcggacggcggaatgtggcagatgaaatgtgctggaggctttacatctactggagttgaatgattgctgttttcctctcactctcctgtttattcaccagactggggatgcctataggttgtctgtgaaatcgcagtcctgcctggggagggagctgttggccatttctgtgtttccctttaaaccagatcctggagacagtgagatactcagggcgttgttaacagggagtggtatttgaagtgtccagcagttgcttgaaatgctttgccgaatctgactccagtaagaatgtgggaaaaccccctgtgtgttctgcaagcagggctcttgcaccagcggtctcctcagggtggacctgcttacagagcaagccacgcctctttccgaggtgaaggtgggaccattccttgggaaaggattcacagtaaggttttttggtttttgttttttgttttcttgtttttaaaaaaaggatttcacagtgagaaagttttggttagtgcataccgtggaagggcgccagggtctttgtggattgcatgttgacattgaccgtgagattcggcttcaaaccaatactgcctttggaatatgacagaatcaatagcccagagagcttagtcaaagacgatatcacggtctaccttaaccaaggcactttcttaagcagaaaatattgttgaggttacctttgctgctaaagatccaatcttctaacgccacaacagcatagcaaatcctaggataattcacctcctcatttgacaaatcagagctgtaattcgctttaacaaattacgcatttctatcacgttcactaacagcttatgataagtctgtgtagtcttccttttctccagttctgttacccaatttagattagtaaagcgtacacaactggaaagactgctgtaataacacagccttgttatttttaagtcctattttgatattaatttctgattagttagtaaataacacctggattctatggaggacctcggtcttcatccaagtggcctgagtatttcactggcaggttgtgaatttttcttttcctctttggggatccaaatgatgatgtgcaatttcatgttttaacttgggaaactgaaagtgttcccatatagcttcaaaaacaaaaacaaatgtgttatccgacggatacttttatggttactaactagtactttcctaattgggaaagtagtgcttaagtttgcaaattaagttggggagggcaataataaaatgagggcccgtaacagaaccagtgtgtgtataacgaaaaccatgtataaaatgggcctatcacccttgtcagagatataaattaccacatttgccttcccttcatcagctaacacttatcacttatactaccaataacttgttaaatcaggatttggcttcatacactgaattttcagtattttatctcaagtagatatagacactaaccttgatagtgatacgttagagggttcctattcttccattgtacgataatgtctttaatatgaaatgctacattatttataattggtagagttattgtatctttttatagttgtaagtacacagaggtggtatatttaaacttctgtaatatactgtatttagaaatggaaatatatatagtgttaggtttcacttcttttaaggtttacccctgtggtgtggtttaaaaatctataggcctgggaattccgatcctagctgcagatcgcatcccacaatgcgagaatgataaaataaaattggatatttgagaaaaaaaaaaagc

SEQ ID NO: 423559 - DNA, 2378 bp, Homo sapiens
ggccgaagtcgggcgagcgcgccgtgcggcggctgggagtgggctgcatgtgccgcgcggggagcccgcccgacttcggggaggcagcggggcgccgtggccccgcggctcagctccctgccgggtcgggtgtcccagccctgcgacttccggggcccggcggctcctcggggagctcgtccacaggcagcctccggggcgagagagcgcgcggcgcgggcgccgggacggtccgcggcacgcgggtggagccgccggcgctcgggctcccgcaggggcggcgggcggggcggggtgaggcgggccggccgccctcccctctcctccctcccgcagcccgccctcccttcctccggtcccgcagccaattaggcggccccctcgggcgggaggcgtggggcgctgcataaagcggcggggagctgccaccccgggagcgggctgcgcagtgtccgggccgagccggtgcgccgcagactagggcgcctcgggccagggagcgcggaggagccatggccaccgctaacggggccgtggaaaacgggcagccggacaggaagccgccggccctgccgcgccccatccgcaacctggaggtcaagttcaccaagatatttatcaacaatgaatggcacgaatccaagagtgggaaaaagtttgctacatgtaacccttcaactcgggagcaaatatgtgaagtggaagaaggagataagcccgacgtggacaaggctgtggaggctgcacaggttgccttccagaggggctcgccatggcgccggctggatgccctgagtcgtgggcggctgctgcaccagctggctgacctggtggagagggaccgcgccaccttggccgccctggagacgatggatacagggaagccatttcttcatgcttttttcatcgacctggagggctgtattagaaccctcagatactttgcagggtgggcagacaaaatccagggcaagaccatccccacagatgacaacgtcgtgtgcttcaccaggcatgagcccattggtgtctgtggggccatcactccatggaacttccccctgctgatgctggtgtggaagctggcacccgccctctgctgtgggaacaccatggtcctgaagcctgcggagcagacacctctcaccgccctttatctcggctctctgatcaaagaggccgggttccctccaggagtggtgaacattgtgccaggattcgggcccacagtgggagcagcaatttcttctcaccctcagatcaacaagatcgccttcaccggctccacagaggttggaaaactggttaaagaagctgcgtcccggagcaatctgaagcgggtgacgctggagctgggggggaagaacccctgcatcgtgtgtgcggacgctgacttggacttggcagtggagtgtgcccatcagggagtgttcttcaaccaaggccagtgttgcacggcagcctccagggtgttcgtggaggagcaggtctactctgagtttgtcaggcggagcgtggagtatgccaagaaacggcccgtgggagaccccttcgatgtcaaaacagaacaggggcctcagattgatcaaaagcagttcgacaaaatcttagagctgatcgagagtgggaagaaggaaggggccaagctggaatgcgggggctcagccatggaagacaaggggctcttcatcaaacccactgtcttctcagaagtcacagacaacatgcggattgccaaagaggagattttcgggccagtgcaaccaatactgaagttcaaaagtatcgaagaagtgataaaaagagcgaatagcaccgactatggactcacagcagccgtgttcacaaaaaatctcgacaaagccctgaagttggcttctgccttagagtctggaacggtctggatcaactgctacaacgccctctatgcacaggctccatttggtggctttaaaatgtcaggaaatggcagagaactaggtgaatacgctttggccgaatacacagaagtgaaaactgtcaccatcaaacttggcgacaagaacccctgaaggaaaggcggggctccttcctcaaacatcggacggcggaatgtggcagatgaaatgtgctggaggaaaaaaatgacatttctgaccttcccgggacacattcttctggaggctttacatctactggagttgaatgattgctgttttcctctcactctcctgtttattcaccagactggggatgcctataggttgtctgtgaaatcgcagtcctgcctggggagggagctgttggccatttctgtgtttccctttaaaccacgagtgtcagaagactgtgacacagtgcagggcgttgcccagcatgagagccggtattcctggttg

SEQ ID NO: 423560 - DNA, 705 bp, Homo sapiens
gcaacagcatcctctttgcaaaggctgcctattagtaccacccagaatgcagtttaggaagtgctgtgcaggattgcagttctgatcattgcacactcctatgttaccccacataccccaaatccagaccatgaaaagcaagtgtcctccacaaaggcatcgttgagcacatgggacagggtaagagggtggatctgggcctccaaagcccctgtgctctgtcgcagtggaacttccccctgctgatgctggtgtggaagctggcacccgccctctgctgtgggaacaccatggtcctgaagcctgcggagcagacacctctcaccgccctttatctcggctctctgatcaaagaggtgagacatccaaaaagaaaatatcacatgttcttggtaacattcccactcctaggaaccaggccaccgtcacgagatgggacagtggcagactgctggcaatcgagtgggaagggaatgacttccagtgttttgtttggcgactgcacgttctttctcctgcttgtggccactgagctggagaaactccattcctcccagtggtcctaatgagaatgcttaactcttattatgggctcaaacctatggttgaggacccagtggtttgtctagagaattttcagggggggtcaaccaagagggagccaaatatttgggaggttctctgggatttgcattctcagtttat

SEQ ID NO: 423561 - DNA, 3361 bp, Homo sapiens
aaaccagtaagagaaaatgctaccggaatgactaaaaagacttatgtggaatctatacttgaaggtataaaacagtccaaacaagaaaacttggacattgatgttaggtatttgatagcagttgacagaagaggtggccctttagtagccaaggagactgtaaaacttgccgaggagttcttcctttctactgagggtacagttcttggccttgacctcagtggagaccctactgtaggacaagcaaaagacttcttggaacctcttttagaagctaagaaagcaggtctgaagttagcattgcatctttcagagattccaaaccaaaaaaaagaaacacaaatactcctggatctgcttcctgacagaatcgggcatggaacatttctcaactccggtgagggaggatccctggatctggtggactttgtgaggcaacatcggataccactggaactctgtttgacctcaaacgtcaaaagtcagacagttccatcttatgaccagcaccatttcggattctggtacagcattgcccatccttctgtgatctgtactgatgataagggtgtttttgcaacacacctttctcaagagtaccagctggcagctgaaacatttaatttgacccagtctcaggtgtgggatctgtcttatgaatccatcaactacatctttgcttctgacagcaccagatctgaactgaggaagaaatggaatcacctgaagcccagagtgttacatatttaagctataatgaggtgaactacttctgagtatgtgtttcaatcaagttcctgccatatcccacttagtaaaacagtccaccactcctttgaagcatagcaaccaagttccttgggctctatcaccagcaccttacacatggcaggtactcagtaaatacgtgtcttcaactgactcacaagctctcaggtgcttactgggtgggacttgactgttgttgctaattaaatccccattccaccagtgattattgtgactcagcagtccttccctattagtgatcataaaatttcagggaaatcgaagtttctcatcaggaaatgttttggaattactagtataaagttaggaaagtggggaaattaggttactgccgagacctttaagccttctaaacagctttatattttattgtgcatactttaatcagactcccttcactcgctttaagtttttaaaagtattccccagccggatgtgatggctcatgcctgtaatcccagcactttgggaagccaaagtgggcagattgcttgatcctaggagttcagtagcagcctaggcaacatggagaaaccctgtctctacaaaaacaaaaaaacaaaaaaccggaaattagtcaggcacggtggtacacacctgtagtcccagccaccagggaggctaaggtgggaggagacctgatcccagggatgtttgaggctgcagtgagctgtgatgctacagcactccagcctgggcaacagagtgaaaccctgtttcaagaaaaagaaaagtattctccaagatcccaagaccattgacaccaggccacattgtataccagggatttatgtgaatgcctagggatgaccgtagtgacagataaagctaggtgctgagatctggttttgccctctttatgattgtcccatcggtactagaaagtgaagtcattgctccaattttggaagaggagagaataactggctgaggggtgagaaagacagaaatagctgcagctctctttttttttttttttcaacaaaggctctcactctgttccccaggctggagtgcagtgacatgatcacagatcactgcagctttcagttttaaaacagcttttattacattttctttgtggaagctgtatttctaccttagtactcactttctgcttggtctgaaagatacctctagtagtggcaacattgtgttaagtagagttcattgggtctcttgtaaccctacccctacataatggaccactggtgcaggcttacataaacacacatactgtggccacttcagctgaagacaagggacaaactaagatagttctgaaaggtaaaaaaacaaacaaacaaacaaaaaacaaaaacaaaattattagataccaagttatgcttgaattgctttgctctttagaatgtgtgtttttccctggtatcagaagaagttaaggctgatgacacccctaatttaaattactaaggatttctgataggttttctgtctttctgtgatatcgtaaagtatttatttggtctttgaccctgtttcctggcatactgctcctaaaatccttagagtctccagagtgatggctttttgtatctaatgagttgactgctggctggcagcccctaggggctggtcactggaaagacaaatgcatgattagagttgggactttcagtcctcccccaaactcttgggagaagggctgaaggttaagttgatcaccagtgaccagtggtaatcataccttcataatgaagcctccataaaactccagaagaacagattttggagcatttccaggtaactgaacatatggaggtccctagagggtgctgtacctgaagagggtagagggtataggagctccctgtcccttcccacatgccttgctctatccatttcttcatctctatcctttgtactgtcctttataataaaccagtgaacctaagtgtttccctgagttctgtgagctttactagcaaattaaactcaaggaggggtcatgggaaccctgatttataggtttggtcagaagcacaggtaaaaccacctggggtttgaacttggcactggaagtgggcagcagtcttgtgggactgggccctcaatctgtgggatcaaatgccatctctaggggatagcatgggaaactggaggacacctagctggtatctgctgcaaaattgattgcttgcttgatggtggggaaaaaactccacacatttggtcagagaagttttctgtctttattgtggtgtgagagcagaggaaaaaagtttgttttttccgctcagactttgttttaaggaacaggggagagggaagttctgtggtttttgaagttcttagatacgtgtgtgtagctttgtgtggcattatatatagcattatattattttctacccttatctactcatacagaaattgcacagtaaaaacatcaaagtttattcataaaatgtggatctattgcagtcactaaaaatgttgcagaacagattttaatgactgaaagtgttcatgataatatattcaatgaaaatatggttataaagttttatagtcctttttttgtttaatatctatacaaaagctactgaagtgt

SEQ ID NO: 423562 - DNA, 3023 bp, Homo sapiens
aaaccagtaagagaaaatgctaccggaatgactaaaaagacttatgtggaatctatacttgaaggtataaaacagtccaaacaagaaaacttggacattgatgttaggtatttgatagcagttgacagaagaggtggccctttagtagccaaggagactgtaaaacttgccgaggagttcttcctttctactgagggtacagttcttggccttgacctcagtggagaccctactgtaggacaagcaaaagacttcttggaacctcttttagaagctaagaaagcaggtctgaagttagcattgcatctttcagagattccaaaccaaaaaaaagaaacacaaatactcctggatctgcttcctgacagaatcgggcatggaacatttctcaactccggtgagggaggatccctggatctggtggactttgtgaggcaacatcggataccactggaactctgtttgacctcaaacgtcaaaagtcagacagttccatcttatgaccagcaccatttcggattctggtacagcattgcccatccttctgtgatctgtactgatgataagggtgtttttgcaacacacctttctcaagagtaccagctggcagctgaaacatttaatttgacccagtctcaggtgtgggatctgtcttatgaatccatcaactacatctttgcttctgacagcaccagatctgaactgaggaagaaatggaatcacctgaagcccagagtgttacatatttaagctataatgaggtgaactacttctgagtatgtgtttcaatcaagttcctgccatatcccacttagtaaaacagtccaccactcctttgaagcatagcaaccaagttccttgggctctatcaccagcaccttacacatggcaggtactcagtaaatacgtgtcttcaactgactcacaagctctcaggtgcttactgggtgggacttgactgttgttgctaattaaatccccattccaccagtgattattgtgactcagcagtccttccctattagtgatcataaaatttcagggaaatcgaagtttctcatcaggaaatgttttggaattactagtataaagttaggaaagtggggaaattaggttactgccgagacctttaagccttctaaacagctttatattttattgtgcatactttaatcagactcccttcactcgctttaagtttttaaaagtattccccagccggatgtgatggctcatgcctgtaatcccagcactttgggaagccaaagtgggcagattgcttgatcctaggagttcagtagcagcctaggcaacatggagaaaccctgtctctacaaaaacaaaaaaacaaaaaaccggaaattagtcaggcacggtggtacacacctgtagtcccagccaccagggaggctaaggtgggaggagacctgatcccagggatgtttgaggctgcagtgagctggagtgcagtgacatgatcacagatcactgcagctttcagttttaaaacagcttttattacattttctttgtggaagctgtatttctaccttagtactcactttctgcttggtctgaaagatacctctagtagtggcaacattgtgttaagtagagttcattgggtctcttgtaaccctacccctacataatggaccactggtgcaggcttacataaacacacatactgtggccacttcagctgaagacaagggacaaactaagatagttctgaaaggtaaaaaaacaaacaaacaaacaaaaaacaaaaacaaaattattagataccaagttatgcttgaattgctttgctctttagaatgtgtgtttttccctggtatcagaagaagttaaggctgatgacacccctaatttaaattactaaggatttctgataggttttctgtctttctgtgatatcgtaaagtatttatttggtctttgaccctgtttcctggcatactgctcctaaaatccttagagtctccagagtgatggctttttgtatctaatgagttgactgctggctggcagcccctaggggctggtcactggaaagacaaatgcatgattagagttgggactttcagtcctcccccaaactcttgggagaagggctgaaggttaagttgatcaccagtgaccagtggtaatcataccttcataatgaagcctccataaaactccagaagaacagattttggagcatttccaggtaactgaacatatggaggtccctagagggtgctgtacctgaagagggtagagggtataggagctccctgtcccttcccacatgccttgctctatccatttcttcatctctatcctttgtactgtcctttataataaaccagtgaacctaagtgtttccctgagttctgtgagctttactagcaaattaaactcaaggaggggtcatgggaaccctgatttataggtttggtcagaagcacaggtaaaaccacctggggtttgaacttggcactggaagtgggcagcagtcttgtgggactgggccctcaatctgtgggatcaaatgccatctctaggggatagcatgggaaactggaggacacctagctggtatctgctgcaaaattgattgcttgcttgatggtggggaaaaaactccacacatttggtcagagaagttttctgtctttattgtggtgtgagagcagaggaaaaaagtttgttttttccgctcagactttgttttaaggaacaggggagagggaagttctgtggtttttgaagttcttagatacgtgtgtgtagctttgtgtggcattatatatagcattatattattttctacccttatctactcatacagaaattgcacagtaaaaacatcaaagtttattcataaaatgtggatctattgcagtcactaaaaatgttgcagaacagattttaatgactgaaagtgttcatgataatatattcaatgaaaatatggttataaagttttatagtcctttttttgtttaatatctatacaaaagctactgaagtgt

SEQ ID NO: 423563 - DNA, 832 bp, Homo sapiens
aaaccagtaagagaaaatgctaccggaatgactaaaaagacttatgtggaatctatacttgaaggtataaaacagtccaaacaagaaaacttggacattgatgttaggtatttgatagcagttgacagaagaggtggccctttagtagccaaggagactgtaaaacttgccgaggagttcttcctttctactgagggtacagttcttggccttgacctcagtggagaccctactgtaggacaagcaaaagacttcttggaacctcttttagaagctaagaaagcaggtctgaagttagcattgcatctttcagagattccaaaccaaaaaaaagaaacacaaatactcctggatctgcttcctgacagaatcgggcatggaacatttctcaactccggtgagggaggatccctggatctggtggactttgtgaggcaacatcggataccactgggtaaggcttggagtttcaggtcttccagatgactctctgtctctcccccaatccccaggttgcctggggattacagagaagtactgttctaaaagtacgaatgtcatctagctattaaaagatggagtgtgtgctttctgagccttatttaaaacagaaagctttagcttccattagaatataagctctatgagagcagggcccctgcttgtcttattcgttgttacattctccaatgcttggaactcaataagaattttttaaaggaataaagggtcatctagaattttaaaatgactttaacaaaattgacatgtgttatgaaaatatgtaacattatttaaaaattaaacatggaaaatcccaagtaaaaaaaca

SEQ ID NO: 423564 - DNA, 3334 bp, Homo sapiens
gagcacacccagaagagaaaatgctaccggaatgactaaaaagacttatgtggaatctatacttgaaggtataaaacagtccaaacaagaaaacttggacattgatgttaggtatttgatagcagttgacagaagaggtggccctttagtagccaaggagactgtaaaacttgccgaggagttcttcctttctactgagggtacagttcttggccttgacctcagtggagaccctactgtaggacaagcaaaagacttcttggaacctcttttagaagctaagaaagcaggtctgaagttagcattgcatctttcagagattccaaaccaaaaaaaagaaacacaaatactcctggatctgcttcctgacagaatcgggcatggaacatttctcaactccggtgagggaggatccctggatctggtggactttgtgaggcaacatcggataccactggaactctgtttgacctcaaacgtcaaaagtcagacagttccatcttatgaccagcaccatttcggattctgactgatgataagggtgtttttgcaacacacctttctcaagagtaccagctggcagctgaaacatttaatttgacccagtctcaggtgtgggatctgtcttatgaatccatcaactacatctttgcttctgacagcaccagatctgaactgaggaagaaatggaatcacctgaagcccagagtgttacatatttaagctataatgaggtgaactacttctgagtatgtgtttcaatcaagttcctgccatatcccacttagtaaaacagtccaccactcctttgaagcatagcaaccaagttccttgggctctatcaccagcaccttacacatggcaggtactcagtaaatacgtgtcttcaactgactcacaagctctcaggtgcttactgggtgggacttgactgttgttgctaattaaatccccattccaccagtgattattgtgactcagcagtccttccctattagtgatcataaaatttcagggaaatcgaagtttctcatcaggaaatgttttggaattactagtataaagttaggaaagtggggaaattaggttactgccgagacctttaagccttctaaacagctttatattttattgtgcatactttaatcagactcccttcactcgctttaagtttttaaaagtattccccagccggatgtgatggctcatgcctgtaatcccagcactttgggaagccaaagtgggcagattgcttgatcctaggagttcagtagcagcctaggcaacatggagaaaccctgtctctacaaaaacaaaaaaacaaaaaaccggaaattagtcaggcacggtggtacacacctgtagtcccagccaccagggaggctaaggtgggaggagacctgatcccagggatgtttgaggctgcagtgagctgtgatgctacagcactccagcctgggcaacagagtgaaaccctgtttcaagaaaaagaaaagtattctccaagatcccaagaccattgacaccaggccacattgtataccagggatttatgtgaatgcctagggatgaccgtagtgacagataaagctaggtgctgagatctggttttgccctctttatgattgtcccatcggtactagaaagtgaagtcattgctccaattttggaagaggagagaataactggctgaggggtgagaaagacagaaatagctgcagctctctttttttttttttttcaacaaaggctctcactctgttccccaggctggagtgcagtgacatgatcacagatcactgcagctttcagttttaaaacagcttttattacattttctttgtggaagctgtatttctaccttagtactcactttctgcttggtctgaaagatacctctagtagtggcaacattgtgttaagtagagttcattgggtctcttgtaaccctacccctacataatggaccactggtgcaggcttacataaacacacatactgtggccacttcagctgaagacaagggacaaactaagatagttctgaaaggtaaaaaaacaaacaaacaaacaaaaaacaaaaacaaaattattagataccaagttatgcttgaattgctttgctctttagaatgtgtgtttttccctggtatcagaagaagttaaggctgatgacacccctaatttaaattactaaggatttctgataggttttctgtctttctgtgatatcgtaaagtatttatttggtctttgaccctgtttcctggcatactgctcctaaaatccttagagtctccagagtgatggctttttgtatctaatgagttgactgctggctggcagcccctaggggctggtcactggaaagacaaatgcatgattagagttgggactttcagtcctcccccaaactcttgggagaagggctgaaggttaagttgatcaccagtgaccagtggtaatcataccttcataatgaagcctccataaaactccagaagaacagattttggagcatttccaggtaactgaacatatggaggtccctagagggtgctgtacctgaagagggtagagggtataggagctccctgtcccttcccacatgccttgctctatccatttcttcatctctatcctttgtactgtcctttataataaaccagtgaacctaagtgtttccctgagttctgtgagctttactagcaaattaaactcaaggaggggtcatgggaaccctgatttataggtttggtcagaagcacaggtaaaaccacctggggtttgaacttggcactggaagtgggcagcagtcttgtgggactgggccctcaatctgtgggatcaaatgccatctctaggggatagcatgggaaactggaggacacctagctggtatctgctgcaaaattgattgcttgcttgatggtggggaaaaaactccacacatttggtcagagaagttttctgtctttattgtggtgtgagagcagaggaaaaaagtttgttttttccgctcagactttgttttaaggaacaggggagagggaagttctgtggtttttgaagttcttagatacgtgtgtgtagctttgtgtggcattatatatagcattatattattttctacccttatctactcatacagaaattgcacagtaaaaacatcaaagtttattcataaaatgtggatctattgcagtcactaaaaatgttgcagaacagattttaatgactgaaagtgttcatgataatatattcaatgaaaatatggttataaagttttatagtcctttttttgtttaatatctatacaaaagctactgaagtgt

SEQ ID NO: 423565 - DNA, 4021 bp, Homo sapiens
gcatctgattcaatctccagtttcctgttcttgctggggctggggtctctcctttaacaaagacacgccgcgcggccgagtccaggggctgcagaggcctggcgcgcgcacgcgcacgcgcacgcccaccgcgcggcttcccgcggtccccggtgctgaggagagagcgatccgagggactgcgccgcccggacggcctgcagagcgctgccatcatgagtgaaattcgtaaggacaccttgaaggccattctgttggagttagaatgtcattttacatggaatttacttaaggaagacattgatctgtttgaggtagaagatacaattgggcaacagcttgaatttcttaccacaaaatctagacttgctctttataacctattggcctatgtgaaacacctaaaaggccaaaataaagacgcccttgagtgcttggaacaagcagaagaaataatccagcaagaacactcagacaaagaagaagtacgaagcctggtcacttggggaaactatgcctgggtgtattatcacatggaccagcttgaagaagctcagaagtatacaggtaagatagggaatgtctgtaagaaattgtccagtccttctaactacaagttggagtgtcctgagactgactgtgagaaaggctgggcactcttgaaatttggaggaaagtattatcaaaaggctaaagcggcttttgagaaggctctggaagtggagcctgacaatccagaatttaacatcggctatgctatcacagtgtatcggctggatgattctgatagagaagggtctgtaaagagcttttctctggggcctttgagaaaggctgttaccctgaacccagataacagctatattaaggtttttctggcactgaagcttcaagatgtacatgcagaagctgaaggggaaaagtatattgaagaaatcctggaccaaatatcatcccagccttacgtccttcgttatgcagccaagttctataggagaaaaaattcctggaacaaagctctcgaacttttaaaaaaggccttggaggtgacaccaacttcttctttcctgcatcaccagatgggactttgctacagggcacaaatgatccaaatcaagaaggccacacacaacagacctaaaggaaaggataaactaaaggttgatgagctgatttcatctgctatatttcatttcaaagcagccatggaacgagactctatgtttgcatttgcctacacagacctggccaacatgtatgctgaaggaggccagtatagcaatgctgaggacattttccggaaagctcttcgtctggagaacataaccgatgatcacaaacatcagatccattaccactatggccgctttcaggaatttcaccgtaaatcagaaaatactgccatccatcattatttagaagccttaaaggtcaaagacagatcaccccttcgcaccaaactgacaagtgctctgaagaaattgtctaccaagagactttgtcacaatgctttagatgtgcagagtttaagtgccctagggtttgtttacaagctggaaggagaaaagaggcaagctgctgagtactatgagaaggcacaaaagatagatccagaaaatgcagaattcctgactgctctctgtgagctccgactttccatttaaatacatactctaggaaattagctctaagtttttcccttcattttgggttctcctgtttgttttttttttattattttaatcccttgtttattatagagctaatatttattgaatagttattgtgtaccaagcattgtgctaaatactttatatgcattatgatgaatcttgtgcggttttctttctttttttctttttaattaaaatactataatccattgagaaatagcaatattctagctattgtaacttctaaaaatggtatggccattagatctgtgctttttatctctgctctttgaatttctcatattatatagtaaatatattcctacgtaaacctttgatacctagatcaggaatactcttccaggagtacaaaattacattattgatagttaagctcttaattgtgtagcttgcaaaagacagcactttttagttacagatgttttgactttgatgaggatatttagctatcaatctaatagtcacctaaaatatcttttttgttggaaaaaagtttataataaaaaagtttgtcatctctagtgacttcaataaagaaaaaactagaagaggagaaaaaggatttcctcaaattttaaatatgtaacttcagggattcaatccccaaatgtttattaagtagctagaaataattatgtggaaaaaaatgaataatggaaaatagtgagtctcaaattgttctctttttttttttaactaaaacaaatctgcaatgaatctagatgcaattaattttattccttccaactaaaattacaatatttttaggttaaaattattgagatataaagcagccattgggaaattgggagaaatgataaacaaatggaaaaagaagatgtccctaacctacacccatagattaccaaggtttcagtgtactagttttgaatctgttctgaatggagtttttataccctcaatttctggcctttggctattttagcatttcaaagtgacttctatgaagctttttttttaatgtgaaattttcagaatgttgtttttttcatgtagatactccaggaagagttaagcactgctttcagttttaatatccaccttgaggggtcgctgcttgagggctcttatcccaggggactttttaattcggatgttacttaatgtggcttctctaatgtagtttctttgattaccgactacacaattatgtaccatcacagtattagtggaaaagtaccatgtgatttaattctccattcctccaatgtaactcttaaaattattatgtatgtgtgtgtgttttactttttgttttttatcatctttaaaatttctattatggtttgattattataaaaataatgaattctcactgtaaatttcaaaaaaaaaattacaaaagtatgtgaatttaaaaatgagagcagtcccctcaccctaccacagttccacaccctcaaggtaaacttataacttataatttgatatgtaaacttccagatcttttttctatgcgtaatcagacatacatatatactgcagtgtatctcacgtattaatttttaaaaatcttttgttttacttaattctgtttttattattattattattttgtttgatctattaaggaagaacaaggaagggaatgatctttactcaagaatttcagaaagtcagcactgaagtcctgacctatcagtagacacatttgtccctttcagatattttaggatattctagcaaagcaggccatttctcccacctgaaagtacataacttctatcacttgccacataattaaaagaactcacattaagcggttactcagacagttaatcatagaaaagattatttgcttcatcagttcatagaaaagattatttgcttcatcagttaacttgtttttataaatcagggctgtgttcatacacagaaggggcctgagatttctgcactttaaacaagctcctcctaggtgaggatgctgtggctgttctaattacattttgagtagtaaggtctacagcattgttcctcaaacttggctacgtattggaatcacctaaaaagttaaaacaaaacatggatgtctgggtcccgccccatagagaatgacttaattggcatggggtgcagtccaggcatcatgatttttagatttcccagttggaacttgtgcagcaaagtttgggagctactgatggacatgtgaaaagtaagtataaatggaataaaattaattaggctaataggcttaacccaggaaatcctaagttccttgaatatccagtttgcatttggactcctcatcatatacttggtatataatactctaataaaagctgcctgagttgaattgtaaa

SEQ ID NO: 423566 - DNA, 2249 bp, Homo sapiens
gcatctgattcaatctccagtttcctgttcttgctggggctggggtctctcctttaacaaagacacgccgcgcggccgagtccaggggctgcagaggcctggcgcgcgcacgcgcacgcgcacgcccaccgcgcggcttcccgcggtccccggtgctgaggagagagcgatccgagggactgcgccgcccggacggcctgcagagcgctgccatcatgagtgaaattcgtaaggacaccttgaaggccattctgttggagttagaatgtcattttacatggaatttacttaaggaagacattgatctgtttgaggtagaagatacaattgggcaacagcttgaatttcttaccacaaaatctagacttgctctttataacctattggcctatgtgaaacacctaaaaggccaaaataaagacgcccttgagtgcttggaacaagcagaagaaataatccagcaagaacactcagacaaagaagaagtacgaagcctggtcacttggggaaactatgcctgggtgtattatcacatggaccagcttgaagaagctcagaagtatacaggtaagatagggaatgtctgtaagaaattgtccagtccttctaactacaagttggagtgtcctgagactgactgtgagaaaggctgggcactcttgaaatttggaggaaagtattatcaaaaggctaaagcggcttttgagaaggctctggaagtggagcctgacaatccagaatttaacatcggctatgctatcacagtgtatcggctggatgattctgatagagaagggtctgtaaagagcttttctctggggcctttgagaaaggctgttaccctgaacccagataacagctatattaaggtttttctggcactgaagcttcaagatgtacatgcagaagctgaaggggaaaagtatattgaagaaatcctggaccaaatatcatcccagccttacgtccttcgttatgcagccaagttctataggagaaaaaattcctggaacaaagctctcgaacttttaaaaaaggccttggaggtgacaccaacttcttctttcctgcatcaccagatgggactttgctacagggcacaaatgatccaaatcaagaaggccacacacaacagacctaaaggaaaggataaactaaaggttgatgagctgatttcatctgctatatttcatttcaaagcagccatggaacgagactctatgtttgcatttgcctacacagacctggccaacatgtatgctgaaggaggccagtatagcaatgctgaggacattttccggaaagctcttcgtctggagaacataaccgatgatcacaaacatcagatccattaccactatggccgctttcaggaatttcaccgtaaatcagaaaatactgccatccatcattatttagaagccttaaaggtcaaagacagatcaccccttcgcaccaaactgacaagtgctctgaagaaattgtctaccaagagactttgtcacaatgctttagatgtgcagagtttaagtgccctagggtttgtttacaagctggaaggagaaaagaggcaagctgctgagtactatgagaaggcacaaaagatagatccagaaaatgcagaattcctgactgctctctgtgagctccgactttccatttaaatacatactctaggaaattagctctaagtttttcccttcattttgggttctcctgtttgttttttttttattattttaatcccttgtttattatagagctaatatttattgaatagttattgtgtaccaagcattgtgctaaatactttatatgcattatgatgaatcttgtgcggttttctttctttttttctttttaattaaaatactataatccattgagaaatagcaatattctagctattgtaacttctaaaaatggtatggccattagatctgtgctttttatctctgctctttgaatttctcatattatatagtaaatatattcctacgtaaacctttgatacctagatcaggaatactcttccaggagtacaaaattacattattgatagttaagctcttaattgtgtagcttgcaaaagacagcactttttagttacagatgttttgactttgatgaggatatttagctatcaatctaatagtcacctaaaatatcttttttgttggaaaaaagtttataataaaaaagtttgtcatctctagtgacttcaataaagaaaaaactagaagaggaga

SEQ ID NO: 423567 - DNA, 1080 bp, Homo sapiens
gcatctgattcaatctccagtttcctgttcttgctggggctggggtctctcctttaacaaagacacgccgcgcggccgagtccaggggctgcagaggcctggcgcgcgcacgcgcacgcgcacgcccaccgcgcggcttcccgcggtccccggtgctgaggagagagcgatccgagggactgcgccgcccggacggcctgcagagcgctgccatcatgaggtaagggttttcctttgcctctcctcccaagccctgcgtcggccttggtttcaaaccgggctgcttttattcatttccagcgcagttctgcggccttttcaggggccgagcccctcgcgcccagcaaccgggcatctgcgttggggaccctccccgggcgctctgtcccggcgcgcggcgtctgaagtcgggcctgccggggagggtggccgagtggacgcttctcgggagtccggcccctccccagcgcctaagaaggccggtcagggaggaggaacaggagatgctccccgggagcctgtcccatccctggcgtctgcggtcgggactgtcagggtatgtgccgggcgacgctcccccggaaggcctgtccacccatcgcgacccgacggctcttctcggcagcggcgacggtgaccgtgctgggtccgcggccgccgcctccgggaaactggtcagcgcctgcagagcccccaggcgctgttccgggggcagctgctacgtgccacgggtctccttaggcctgtcgcgtgcctctctttccagctgccattccctcggtgtggcatacgcggtttcgccgcagccctgcaggcgtcacgttcgcctgccactgccagtttgcgtttctgatttctgggtctgagttcttcccttcccaggagctacctctgtaccaagcacagattgttatcgtcccacccaatccgctgttttatgaggatttctttatctgtttcctttactgatttagtatgatggcgtccttttcttgatcattttgtatccccaggggctagcaccccgccctgcacgtggttagtgaaccttccgcatttaatgagttgaggaatgagatg

SEQ ID NO: 423568 - DNA, 660 bp, Homo sapiens
ccacctccagagattgattgggacctaagagactgagtcaggagagggcaagaaagcagctaagtgggaagtttcaggggcactagagcaaatacattgagaaatgggaaatacaaacagcatgcaaaatcacatcctactcctacccaccccactcccaagggaaattgctgggttttggacgaattttcactttgtgtgcaccttttatgtatgtaaaactacaaacatactactttgaaatctgattccgctatttcatgtttgtcttaccatgttattatgtattttcctacatccaaagctacctagtatctcttttgtatgaaggtttcatcatgtatcccccagtgccctttggttgtttttctttgttgtcatttattttggtgggggttggtttgctttttgttgttgtttttccttgtttttataaatgatacagtgacagatgccgttgtggataaatgctgtggcatagtcatcaattccttgatatatattcctagaaagtgcaccaaagggtatgcatggcttagggcttttgatactctccagagttgggataccaagtcacactactcactggagtcaggatgagagttttttgagacaatggtggcaattctgattcaatagattaaaaaatttattactacc

SEQ ID NO: 423569 - DNA, 369 bp, Homo sapiens
ctcgctatggaacctggttttattagtctactctaagtgccctcttaaatgtcaccagagatttgctagttacctcatgaaatggtccttttatttttttcttcatttgacttcacttctcagccatgattttacattgttgaccaccctttctttctttaaattctccacccttcgggaccctttaaattattggcactctttagaatttatttcatttcctaaaatttgctaatattatgtcctcaactgtatttcataaaccttggtaagctcctccagatatatgattgcataatacctcaatgaaaagaagtcccaaatatttatattcttatttgaacccggtgtctggcacttatcaaatac

SEQ ID NO: 423570 - DNA, 732 bp, Homo sapiens
gccaatgtgaatgcgacaagttcccgatccaggcgtcccgctctccccggccccactcgccaggtcctaccacgatgcctgactcgtttgcggctttgggaccggttgtaggtggcttgaccgtcactagtagacgtttctgagtgtgtcgcggtcaccatggtaacgactttagcttcccttccgccccttgcggtgacgtcactggcggaggccggactggggggaggttccctgctcaagctctcttctcttgtctgctgccatgtgagacgtgcctttgaccttctgccatgattgtgaggcctccccagccacgtgaaactggtcgtgaaagacaaagattgaggaggttcaatcacacatcctaaggacaaatcacaagaccaaaggagatgggataacaaaatgcaacatggttgagcaagagctggattttctgaaacaaaacaaaacaaaacaaaacaaaaaacttaattgaaaatacaaggtgggatcctggattggatcctcaaatagaatagtttttctattagtagaaacattagtaaaatttgaatgaggtctgtaatttctttaatagttttgttctggtgttgggtcttgcttttagtcattgtgctatggttaggtaagatgttaacagctgagataactgggtgaagaatattcagaaacttaatttttgtgacttttcctcaagtctaaaataatttcaaaataaatttttta

SEQ ID NO: 423571 - DNA, 1954 bp, Homo sapiens
agcgggggctggttggagagcgcatcccagaccgagaaggtcggaggcagaagccgggaaggagacttctgaatgaacagtgaatctattactgaggaaaaccagaggaagcctgtgtagataggtatcaattagataccagctactggaagagctttctcagagactgattaaaaaattctccactagatatggctgcaaattgcacatcctcatggagtctaggagaatcctgcaacagacctgggttggagctgccacggtctatggcatcctcagaaactcaacttggaaatcacgacgtggaccctgagatttctcacgtgaacttcaggatgttcagctgcccgaaggagtcggaccccatccaggctctgaggaaactcactgagctgtgccatctgtggctgaggcccgacctccacaccaaagagcagatcctggacatgctggtgatggagcagttcatgatctccatgccccaggagctccaggtcttagtcatgatgaacggtgtgcagagctgcaaagacctggaggacctgctacgaaataacagaagacccaagaaatggtctgtggtcaccttccacggaaaggaatatattgtgcaggactcagatatcgagatggctgaagccccctccagtgtcagagatgatctgaaagacgtgtccagccaacgggcctcctcggtgaaccagatgcgtccaggggaaggccaggcccaccgagagctgcagatcctgcccagggtccctgcattgtccaggaggcagggagaggactttctgctacacaagagtattgacgtaacaggtgacccaaagtctctgagacccaagcagaccttggagaaggatctgaaggaaaacagggaagagaacccaggactgacatccccagagcctcagcttccaaagagtcccacagatctggtgagagcaaaggaggggaaggaccccccaaaaatagcctctgtggaaaatgtggatgctgacacaccttctgcctgcgttgtggagagagaagcttcgactcacagcgggaacagaggagacgctctgaatctgagcagtcccaaaagaagcaaaccagatgcctcctccatttcccaagaagagcctcaaggagaagccacacctgtgggcaacagagaatccccgggacaagctgggatgaattcaattcattccccaggccctgcgagcccagtcagtcacccggatggccaagaagccaaggcactgccgccctttgcatgtgacgtgtgcgagaagaggtttacgtgtaattccaagctagtcatccacaagagatcacacacaggcgagagactctttcaatgtaatctctgtgggaagcgcttcatgcagcttattagcctccaatttcaccagcgaacccacactggcgagaggccctacacgtgtgacgtctgccagaagcagttcacccagaagtcctacttgaagtgtcacaagagaagccacacaggggagaagcccttcgaatgtaaagactgcaagaaagttttcacctacagggggagcctgaaggagcaccagcgcatccactccggagagaaaccctacaaatgttccaagtgtccaagagccttcagtcggctgaaattgttaagacgccaccagaaaacacatccagaagctacttctcagtgattgcataatccggtctatgccttctgcaccaagaagaagtgaatgatatttttcatcaatgttatcagatgacatttgacacatgcaagggcgtctgacacacagagggagtgccctagatatgaattgccaggatgtttgagtaaatatgtgtcctccccactgagctttgttttctgtttcattatgtccattgttttcttataggtttattttggtttgtgttgctgttcttccaataaacgatcatcttattagttttcaatattgta

SEQ ID NO: 423572 - DNA, 825 bp, Homo sapiens
ggttcttatgaaatctatacttctttaaaaatggtgattttcgcaattccttgtctttgtttaaatgcataattctctcctctctcgcctcccttctttcagatgttttaggtagaagtagaaagaggaaagtgttagagtttcttccaaagaatatgggaagatgttctgattgcgtcgtttagaacatccagggtctagagttgcagtttttctgggttaaggcactcagaacattttatctatcaaagccacttgggactggtaggtcctgatagcatagatgcaggattccttaatgccctttgcaactccatccctgtaaattcaacgagcctccttctggcttggagatgaaaggaagatgaataagatgattcttactagatctgggatcccaaagctctggctttcggaaaagtgaaatattatttgttccagagggcacataacatgttcctggcacattggagggctattcctcataagctggagctcagcgcttgcccttaaaatgcacttcacccagctcaccgtctcatgtaggccaaagctggaagaaccttagatatcaccacattccagaagcccactgctaaatgttgagtatgtgggcaatcttcttggaagaagagttgaagctgttaccaagtcattggaggtatgcctggccccaagaagggcaaaggatcactgcctagtcccaaggcatcattcagatgtgcatgtgaggagtctctaccaagtgtctctatgttcagtaatacatactcctaccttacccatcactaaggaatttataatctactaaatttgtttttaaaa

SEQ ID NO: 423573 - DNA, 536 bp, Homo sapiens
ttttctctagcttcccttattgtaagaatcagcatgtaatatatgtaacatacaaaatatatgttaatctactgtttatgttattagtaagtcttctggtcaacagtaggctattcgtagttaagttttggggaagtcaaaagttatatgtgaattttcaactgcactggaggttggtgcccctaactctcacattgttcaagggtcaaatgtgtatgtgttatggtttgagtgtgtaccccaaacagcatgtgttggaaacttaatcccaaatgcagcagtgttgggaggtggggcctaatgggaggtatttaggtcacaagggctcaactttcatgaatagataaatgctggttataaaagggcttgaagctctgagctctctgtctctgtttctgtctctctctctgtcctttgatcataggatgacacaacaggaaggctctcacaagatgccaacccctcaatcttggacttctcagcctccagaaacatgagccaataaatttctattcattataaattaaaaagtctca

SEQ ID NO: 423574 - DNA, 376 bp, Homo sapiens
gccaatgtgaatgcgacaagttcccgatccaggcgtcccgctctccccggccccactcgccaggtcctaccacgatgcctgactcgtttgcggctttgggaccggttgtaggtggcttgaccgtcactagtagacgtttctgagtgtgtcgcggtcaccatggggaggttccctgctcaagctctcttctcttgtctgctgccatgtgagacgtgcctttgaccttctgccatgattgtgaggcctccccagccacgtgaaactgatgacacaacaggaaggctctcacaagatgccaacccctcaatcttggacttctcagcctccagaaacatgagccaataaatttctattcattataaattaaaaagtctca

SEQ ID NO: 423575 - DNA, 1957 bp, Homo sapiens
ctagtataggtacgaggccgggctggtgccagaatcgagaaggtcggaggcagaagccgggaaggagacttctgaatgaacagtgaatctattactgaggaaaaccagaggaagcctgtgtagataggtatcaattagataccagctactggaagagctttctcagagactgattaaaaaattctccactagatatggctgcaaattgcacatcctcatggagtctaggagaatcctgcaacagacctgggttggagctgccacggtctatggcatcctcagaaactcaacttggaaatcacgacgtggaccctgagatttctcacgtgaacttcaggatgttcagctgcccgaaggagtcggaccccatccaggctctgaggaaactcactgagctgtgccatctgtggctgaggcccgacctccacaccaaagagcagatcctggacatgctggtgatggagcagttcatgatctccatgccccaggagctccaggtcttagtcatgatgaacggtgtgcagagctgcaaagacctggaggacctgctacgaaataacagaagacccaagaaatggtctgtggtcaccttccacggaaaggaatatattgtgcaggactcagatatcgagatggctgaagccccctccagtgtcagagatgatctgaaagacgtgtccagccaacgggcctcctcggtgaaccagatgcgtccaggggaaggccaggcccaccgagagctgcagatcctgcccagggtccctgcattgtccaggaggcagggagaggactttctgctacacaagagtattgacgtaacaggtgacccaaagtctctgagacccaagcagaccttggagaaggatctgaaggaaaacagggaagagaacccaggactgacatccccagagcctcagcttccaaagagtcccacagatctggtgagagcaaaggaggggaaggaccccccaaaaatagcctctgtggaaaatgtggatgctgacacaccttctgcctgcgttgtggagagagaagcttcgactcacagcgggaacagaggagacgctctgaatctgagcagtcccaaaagaagcaaaccagatgcctcctccatttcccaagaagagcctcaaggagaagccacacctgtgggcaacagagaatccccgggacaagctgggatgaattcaattcattccccaggccctgcgagcccagtcagtcacccggatggccaagaagccaaggcactgccgccctttgcatgtgacgtgtgcgagaagaggtttacgtgtaattccaagctagtcatccacaagagatcacacacaggcgagagactctttcaatgtaatctctgtgggaagcgcttcatgcagcttattagcctccaatttcaccagcgaacccacactggcgagaggccctacacgtgtgacgtctgccagaagcagttcacccagaagtcctacttgaagtgtcacaagagaagccacacaggggagaagcccttcgaatgtaaagactgcaagaaagttttcacctacagggggagcctgaaggagcaccagcgcatccactccggagagaaaccctacaaatgttccaagtgtccaagagccttcagtcggctgaaattgttaagacgccaccagaaaacacatccagaagctacttctcagtgattgcataatccggtctatgccttctgcaccaagaagaagtgaatgatatttttcatcaatgttatcagatgacatttgacacatgcaagggcgtctgacacacagagggagtgccctagatatgaattgccaggatgtttgagtaaatatgtgtcctccccactgagctttgttttctgtttcattatgtccattgttttcttataggtttattttggtttgtgttgctgttcttccaataaacgatcatcttattagttttcaatattgta

SEQ ID NO: 423576 - DNA, 2289 bp, Homo sapiens
cgagcccggggatgggactggaggagtttccgtgaccttgcgggctgtttgtgctgagggacagctttatttaaataataatatgcgtgcaggcgccctgcatgattcctggccgcgtgctttctagtaagtgcgcagagacttttcgcaagaattgattcactcttttttccttccctcccgatttttgattggaaacccagacttcctttcacgcctgtcgccaggttaactaggtcactgtttgctctcaggagcaaccctgcctcccgcagttcgcttggtccttgattacaggggaggttccctgctcaagctctcttctcttgtctgctgccatgtgagacgtgcctttgaccttctgccatgattgtgaggcctccccagccacgtgaaactacttctgaatgaacagtgaatctattactgaggaaaaccagaggaagcctgtgtagataggtatcaattagataccagctactggaagagctttctcagagactgattaaaaaattctccactagatatggctgcaaattgcacatcctcatggagtctaggagaatcctgcaacagacctgggttggagctgccacggtctatggcatcctcagaaactcaacttggaaatcacgacgtggaccctgagatttctcacgtgaacttcaggatgttcagctgcccgaaggagtcggaccccatccaggctctgaggaaactcactgagctgtgccatctgtggctgaggcccgacctccacaccaaagagcagatcctggacatgctggtgatggagcagttcatgatctccatgccccaggagctccaggtcttagtcatgatgaacggtgtgcagagctgcaaagacctggaggacctgctacgaaataacagaagacccaagaaatggtctgtggtcaccttccacggaaaggaatatattgtgcaggactcagatatcgagatggctgaagccccctccagtgtcagagatgatctgaaagacgtgtccagccaacgggcctcctcggtgaaccagatgcgtccaggggaaggccaggcccaccgagagctgcagatcctgcccagggtccctgcattgtccaggaggcagggagaggactttctgctacacaagagtattgacgtaacaggtgacccaaagtctctgagacccaagcagaccttggagaaggatctgaaggaaaacagggaagagaacccaggactgacatccccagagcctcagcttccaaagagtcccacagatctggtgagagcaaaggaggggaaggaccccccaaaaatagcctctgtggaaaatgtggatgctgacacaccttctgcctgcgttgtggagagagaagcttcgactcacagcgggaacagaggagacgctctgaatctgagcagtcccaaaagaagcaaaccagatgcctcctccatttcccaagaagagcctcaaggagaagccacacctgtgggcaacagagaatccccgggacaagctgggatgaattcaattcattccccaggccctgcgagcccagtcagtcacccggatggccaagaagccaaggcactgccgccctttgcatgtgacgtgtgcgagaagaggtttacgtgtaattccaagctagtcatccacaagagatcacacacaggcgagagactctttcaatgtaatctctgtgggaagcgcttcatgcagcttattagcctccaatttcaccagcgaacccacactggcgagaggccctacacgtgtgacgtctgccagaagcagttcacccagaagtcctacttgaagtgtcacaagagaagccacacaggggagaagcccttcgaatgtaaagactgcaagaaagttttcacctacagggggagcctgaaggagcaccagcgcatccactccggagagaaaccctacaaatgttccaagtgtccaagagccttcagtcggctgaaattgttaagacgccaccagaaaacacatccagaagctacttctcagtgattgcataatccggtctatgccttctgcaccaagaagaagtgaatgatatttttcatcaatgttatcagatgacatttgacacatgcaagggcgtctgacacacagagggagtgccctagatatgaattgccaggatgtttgagtaaatatgtgtcctccccactgagctttgttttctgtttcattatgtccattgttttcttataggtttattttggtttgtgttgctgttcttccaataaacgatcatcttattagttttcaatattgta

SEQ ID NO: 423577 - DNA, 1829 bp, Homo sapiens
agcgggggctggttggagagcgcatcccagaccgagaaggtcggaggcagaagccgggaaggagatatggctgcaaattgcacatcctcatggagtctaggagaatcctgcaacagacctgggttggagctgccacggtctatggcatcctcagaaactcaacttggaaatcacgacgtggaccctgagatttctcacgtgaacttcaggatgttcagctgcccgaaggagtcggaccccatccaggctctgaggaaactcactgagctgtgccatctgtggctgaggcccgacctccacaccaaagagcagatcctggacatgctggtgatggagcagttcatgatctccatgccccaggagctccaggtcttagtcatgatgaacggtgtgcagagctgcaaagacctggaggacctgctacgaaataacagaagacccaagaaatggtctgtggtcaccttccacggaaaggaatatattgtgcaggactcagatatcgagatggctgaagccccctccagtgtcagagatgatctgaaagacgtgtccagccaacgggcctcctcggtgaaccagatgcgtccaggggaaggccaggcccaccgagagctgcagatcctgcccagggtccctgcattgtccaggaggcagggagaggactttctgctacacaagagtattgacgtaacaggtgacccaaagtctctgagacccaagcagaccttggagaaggatctgaaggaaaacagggaagagaacccaggactgacatccccagagcctcagcttccaaagagtcccacagatctggtgagagcaaaggaggggaaggaccccccaaaaatagcctctgtggaaaatgtggatgctgacacaccttctgcctgcgttgtggagagagaagcttcgactcacagcgggaacagaggagacgctctgaatctgagcagtcccaaaagaagcaaaccagatgcctcctccatttcccaagaagagcctcaaggagaagccacacctgtgggcaacagagaatccccgggacaagctgggatgaattcaattcattccccaggccctgcgagcccagtcagtcacccggatggccaagaagccaaggcactgccgccctttgcatgtgacgtgtgcgagaagaggtttacgtgtaattccaagctagtcatccacaagagatcacacacaggcgagagactctttcaatgtaatctctgtgggaagcgcttcatgcagcttattagcctccaatttcaccagcgaacccacactggcgagaggccctacacgtgtgacgtctgccagaagcagttcacccagaagtcctacttgaagtgtcacaagagaagccacacaggggagaagcccttcgaatgtaaagactgcaagaaagttttcacctacagggggagcctgaaggagcaccagcgcatccactccggagagaaaccctacaaatgttccaagtgtccaagagccttcagtcggctgaaattgttaagacgccaccagaaaacacatccagaagctacttctcagtgattgcataatccggtctatgccttctgcaccaagaagaagtgaatgatatttttcatcaatgttatcagatgacatttgacacatgcaagggcgtctgacacacagagggagtgccctagatatgaattgccaggatgtttgagtaaatatgtgtcctccccactgagctttgttttctgtttcattatgtccattgttttcttataggtttattttggtttgtgttgctgttcttccaataaacgatcatcttattagttttcaatattgta

SEQ ID NO: 423578 - DNA, 2029 bp, Homo sapiens
gccaatgtgaatgcgacaagttcccgatccaggcgtcccgctctccccggccccactcgccaggtcctaccacgatgcctgactcgtttgcggctttgggaccggttgtaggtggcttgaccgtcactagtagacgtttctgagtgtgtcgcggtcaccatggggaggttccctgctcaagctctcttctcttgtctgctgccatgtgagacgtgcctttgaccttctgccatgattgtgaggcctccccagccacgtgaaactatatggctgcaaattgcacatcctcatggagtctaggagaatcctgcaacagacctgggttggagctgccacggtctatggcatcctcagaaactcaacttggaaatcacgacgtggaccctgagatttctcacgtgaacttcaggatgttcagctgcccgaaggagtcggaccccatccaggctctgaggaaactcactgagctgtgccatctgtggctgaggcccgacctccacaccaaagagcagatcctggacatgctggtgatggagcagttcatgatctccatgccccaggagctccaggtcttagtcatgatgaacggtgtgcagagctgcaaagacctggaggacctgctacgaaataacagaagacccaagaaatggtctgtggtcaccttccacggaaaggaatatattgtgcaggactcagatatcgagatggctgaagccccctccagtgtcagagatgatctgaaagacgtgtccagccaacgggcctcctcggtgaaccagatgcgtccaggggaaggccaggcccaccgagagctgcagatcctgcccagggtccctgcattgtccaggaggcagggagaggactttctgctacacaagagtattgacgtaacaggtgacccaaagtctctgagacccaagcagaccttggagaaggatctgaaggaaaacagggaagagaacccaggactgacatccccagagcctcagcttccaaagagtcccacagatctggtgagagcaaaggaggggaaggaccccccaaaaatagcctctgtggaaaatgtggatgctgacacaccttctgcctgcgttgtggagagagaagcttcgactcacagcgggaacagaggagacgctctgaatctgagcagtcccaaaagaagcaaaccagatgcctcctccatttcccaagaagagcctcaaggagaagccacacctgtgggcaacagagaatccccgggacaagctgggatgaattcaattcattccccaggccctgcgagcccagtcagtcacccggatggccaagaagccaaggcactgccgccctttgcatgtgacgtgtgcgagaagaggtttacgtgtaattccaagctagtcatccacaagagatcacacacaggcgagagactctttcaatgtaatctctgtgggaagcgcttcatgcagcttattagcctccaatttcaccagcgaacccacactggcgagaggccctacacgtgtgacgtctgccagaagcagttcacccagaagtcctacttgaagtgtcacaagagaagccacacaggggagaagcccttcgaatgtaaagactgcaagaaagttttcacctacagggggagcctgaaggagcaccagcgcatccactccggagagaaaccctacaaatgttccaagtgtccaagagccttcagtcggctgaaattgttaagacgccaccagaaaacacatccagaagctacttctcagtgattgcataatccggtctatgccttctgcaccaagaagaagtgaatgatatttttcatcaatgttatcagatgacatttgacacatgcaagggcgtctgacacacagagggagtgccctagatatgaattgccaggatgtttgagtaaatatgtgtcctccccactgagctttgttttctgtttcattatgtccattgttttcttataggtttattttggtttgtgttgctgttcttccaataaacgatcatcttattagttttcaatattgta

SEQ ID NO: 423579 - DNA, 1122 bp, Homo sapiens
cgagcccggggatgggactggaggagtttccgtgaccttgcgggctgtttgtgctgagggacagctttatttaaataataatatgcgtgcaggcgccctgcatgattcctggccgcgtgctttctagtaagtgcgcagagacttttcgcaagaattgattcactcttttttccttccctcccgatttttgattggaaacccagacttcctttcacgcctgtcgccaggttaactaggtcactgtttgctctcaggagcaaccctgcctcccgcagttcgcttggtccttgattacaggggaggttccctgctcaagctctcttctcttgtctgctgccatgtgagacgtgcctttgaccttctgccatgattgtgaggcctccccagccacgtgaaactatgttttaggtagaagtagaaagaggaaagtgttagagtttcttccaaagaatatgggaagatgttctgattgcgtcgtttagaacatccagggtctagagttgcagtttttctgggttaaggcactcagaacattttatctatcaaagccacttgggactggtaggtcctgatagcatagatgcaggattccttaatgccctttgcaactccatccctgtaaattcaacgagcctccttctggcttggagatgaaaggaagatgaataagatgattcttactagatctgggatcccaaagctctggctttcggaaaagtgaaatattatttgttccagagggcacataacatgttcctggcacattggagggctattcctcataagctggagctcagcgcttgcccttaaaatgcacttcacccagctcaccgtctcatgtaggccaaagctggaagaaccttagatatcaccacattccagaagcccactgctaaatgttgagtatgtgggcaatcttcttggaagaagagttgaagctgttaccaagtcattggaggtatgcctggccccaagaagggcaaaggatcactgcctagtcccaaggcatcattcagatgtgcatgtgaggagtctctaccaagtgtctctatgttcagtaatacatactcctaccttacccatcactaaggaatttataatctactaaatttgtttttaaaa

SEQ ID NO: 423580 - DNA, 1848 bp, Homo sapiens
agcgggggctggttggagagcgcatcccagaccgagaaggtcggaggcagaagccgggaaggagacttctgaatgaacagtgaatctattactgaggaaaaccagaggaagcctgtgtagataggtatcaattagataccagctactggaagagctttctcagagactgattaaaaaattctccactagatatggctgcaaattgcacatcctcatggagtctaggagaatcctgcaacagacctgggttggagctgccacggtctatggcatcctcagaaactcaacttggaaatcacgacgtggaccctgagatttctcacgtgaacttcaggatgttcagctgcccgaaggagtcggaccccatccaggctctgaggaaactcactgagctgtgccatctgtggctgaggcccgacctccacaccaaagagcagatcctggacatgctggtgatggagcagttcatgatctccatgccccaggagctccaggtcttagtcatgatgaacggtgtgcagagctgcaaagacctggaggacctgctacgaaataacagaagacccaagaaatggtctgtggtcaccttccacggaaaggaatatattgtgcaggactcagatatcgagatggctgaagccccctccagtgtcagagatgatctgaaagacgtgtccagccaacgggcctcctcggtgaaccagatgcgtccaggggaaggccaggcccaccgagagctgcagatcctgcccagggtccctgcattgtccaggaggcagggagaggactttctgctacacaagagtattgacgtaacaggtgacccaaagtctctgagacccaagcagaccttggagaaggatctgaaggaaaacagggaagagaacccaggactgacatccccagagcctcagcttccaaagagtcccacagatctggtgagagcaaaggaggggaaggaccccccaaaaatagcctctgtggaaaatgtggatgctgacacaccttctgcctgcgttgtggagagagaagcttcgactcacagcgggaacagaggagacgctctgaatctgagcagtcccaaaagaagcaaaccagatgcctcctccatttcccaagaagagcctcaaggagaagccacacctgtgggcaacagagaatccccgggacaagctgggatgaattcaattcattccccaggccctgcgagcccagtcagtcacccggatggccaagaagccaaggcactgccgccctttgcatgtgacgtgtgcgagaagaggtttacgtgtaattccaagctagtcatccacaagagatcacacacaggcgagagactctttcaatgtaatctctgtgggaagcgcttcatgcagcttattagcctccaatttcaccagcgaacccacactggcgagaggccctacacgtgtgacgtctgccagaagcagttcacccagaagtcctacttgaagtgtcacaagagaagccacacaggggagaagcccttcgaatgtaaagactgcaagaaagttttcacctacagggggagcctgaaggagcaccagcgcatccactccggagagaaaccctacaaatgttccaagtgtccaagagccttcagtcggctgaaattgttaagacgccaccagaaaacacatccagaagctacttctcagtgattgcataatccggtctatgccttctgcaccaagaagaagtgaatgatatttttcatcaatgttatcagatgacatttgacacatgcaagggcgtctgacacacagagggagtgccctagatatgaattgccaggatgtttgagtaaatatgtgtcctccccactga

SEQ ID NO: 423581 - DNA, 2154 bp, Homo sapiens
gccaatgtgaatgcgacaagttcccgatccaggcgtcccgctctccccggccccactcgccaggtcctaccacgatgcctgactcgtttgcggctttgggaccggttgtaggtggcttgaccgtcactagtagacgtttctgagtgtgtcgcggtcaccatggggaggttccctgctcaagctctcttctcttgtctgctgccatgtgagacgtgcctttgaccttctgccatgattgtgaggcctccccagccacgtgaaactacttctgaatgaacagtgaatctattactgaggaaaaccagaggaagcctgtgtagataggtatcaattagataccagctactggaagagctttctcagagactgattaaaaaattctccactagatatggctgcaaattgcacatcctcatggagtctaggagaatcctgcaacagacctgggttggagctgccacggtctatggcatcctcagaaactcaacttggaaatcacgacgtggaccctgagatttctcacgtgaacttcaggatgttcagctgcccgaaggagtcggaccccatccaggctctgaggaaactcactgagctgtgccatctgtggctgaggcccgacctccacaccaaagagcagatcctggacatgctggtgatggagcagttcatgatctccatgccccaggagctccaggtcttagtcatgatgaacggtgtgcagagctgcaaagacctggaggacctgctacgaaataacagaagacccaagaaatggtctgtggtcaccttccacggaaaggaatatattgtgcaggactcagatatcgagatggctgaagccccctccagtgtcagagatgatctgaaagacgtgtccagccaacgggcctcctcggtgaaccagatgcgtccaggggaaggccaggcccaccgagagctgcagatcctgcccagggtccctgcattgtccaggaggcagggagaggactttctgctacacaagagtattgacgtaacaggtgacccaaagtctctgagacccaagcagaccttggagaaggatctgaaggaaaacagggaagagaacccaggactgacatccccagagcctcagcttccaaagagtcccacagatctggtgagagcaaaggaggggaaggaccccccaaaaatagcctctgtggaaaatgtggatgctgacacaccttctgcctgcgttgtggagagagaagcttcgactcacagcgggaacagaggagacgctctgaatctgagcagtcccaaaagaagcaaaccagatgcctcctccatttcccaagaagagcctcaaggagaagccacacctgtgggcaacagagaatccccgggacaagctgggatgaattcaattcattccccaggccctgcgagcccagtcagtcacccggatggccaagaagccaaggcactgccgccctttgcatgtgacgtgtgcgagaagaggtttacgtgtaattccaagctagtcatccacaagagatcacacacaggcgagagactctttcaatgtaatctctgtgggaagcgcttcatgcagcttattagcctccaatttcaccagcgaacccacactggcgagaggccctacacgtgtgacgtctgccagaagcagttcacccagaagtcctacttgaagtgtcacaagagaagccacacaggggagaagcccttcgaatgtaaagactgcaagaaagttttcacctacagggggagcctgaaggagcaccagcgcatccactccggagagaaaccctacaaatgttccaagtgtccaagagccttcagtcggctgaaattgttaagacgccaccagaaaacacatccagaagctacttctcagtgattgcataatccggtctatgccttctgcaccaagaagaagtgaatgatatttttcatcaatgttatcagatgacatttgacacatgcaagggcgtctgacacacagagggagtgccctagatatgaattgccaggatgtttgagtaaatatgtgtcctccccactgagctttgttttctgtttcattatgtccattgttttcttataggtttattttggtttgtgttgctgttcttccaataaacgatcatcttattagttttcaatattgta

SEQ ID NO: 423582 - DNA, 1604 bp, Homo sapiens
gccaatgtgaatgcgacaagttcccgatccaggcgtcccgctctccccggccccactcgccaggtcctaccacgatgcctgactcgtttgcggctttgggaccggttgtaggtggcttgaccgtcactagtagacgtttctgagtgtgtcgcggtcaccatggggaggttccctgctcaagctctcttctcttgtctgctgccatgtgagacgtgcctttgaccttctgccatgattgtgaggcctccccagccacgtgaaactgactcagatatcgagatggctgaagccccctccagtgtcagagatgatctgaaagacgtgtccagccaacgggcctcctcggtgaaccagatgcgtccaggggaaggccaggcccaccgagagctgcagatcctgcccagggtccctgcattgtccaggaggcagggagaggactttctgctacacaagagtattgacgtaacaggtgacccaaagtctctgagacccaagcagaccttggagaaggatctgaaggaaaacagggaagagaacccaggactgacatccccagagcctcagcttccaaagagtcccacagatctggtgagagcaaaggaggggaaggaccccccaaaaatagcctctgtggaaaatgtggatgctgacacaccttctgcctgcgttgtggagagagaagcttcgactcacagcgggaacagaggagacgctctgaatctgagcagtcccaaaagaagcaaaccagatgcctcctccatttcccaagaagagcctcaaggagaagccacacctgtgggcaacagagaatccccgggacaagctgggatgaattcaattcattccccaggccctgcgagcccagtcagtcacccggatggccaagaagccaaggcactgccgccctttgcatgtgacgtgtgcgagaagaggtttacgtgtaattccaagctagtcatccacaagagatcacacacaggcgagagactctttcaatgtaatctctgtgggaagcgcttcatgcagcttattagcctccaatttcaccagcgaacccacactggcgagaggccctacacgtgtgacgtctgccagaagcagttcacccagaagtcctacttgaagtgtcacaagagaagccacacaggggagaagcccttcgaatgtaaagactgcaagaaagttttcacctacagggggagcctgaaggagcaccagcgcatccactccggagagaaaccctacaaatgttccaagtgtccaagagccttcagtcggctgaaattgttaagacgccaccagaaaacacatccagaagctacttctcagtgattgcataatccggtctatgccttctgcaccaagaagaagtgaatgatatttttcatcaatgttatcagatgacatttgacacatgcaagggcgtctgacacacagagggagtgccctagatatgaattgccaggatgtttgagtaaatatgtgtcctccccactgagctttgttttctgtttcattatgtccattgttttcttataggtttattttggtttgtgttgctgttcttccaataaacgatcatcttattagttttcaatattgta

SEQ ID NO: 423583 - DNA, 946 bp, Homo sapiens
agcgggggctggttggagagcgcatcccagaccgagaaggtcggaggcagaagccgggaaggagacttctgaatgaacagtgaatctattactgaggaaaaccagaggaagcctgtgtagataggtatcaattagataccagctactggaagagctttctcagagactgattaaaaaattctccactagatatggctgcaaattgcacatcctcatggagtctaggagaatcctgcaacagacctgggttggagctgccacggtctatggcatcctcagaaactcaacttggaaatcacgacgtggaccctgagatttctcacgtgaacttcaggatgttcagctgcccgaaggagtcggaccccatccaggctctgaggaaactcactgagctgtgccatctgtggctgaggcccgacctccacaccaaagagcagatcctggacatgctggtgatggagcagttcatgatctccatgccccaggagctccaggtcttagtcatgatgaacggtgtgcagagctgcaaagacctggaggacctgctacgaaataacagaagacccaagaaatggtctgtggtcaccttccacggaaaggaatatattgtgcaggactcagatatcgagatggctgaagccccctccagtgtcagagatgatctgaaagacgtgtccagccaacgggcctcctcggtgaaccagatgcgtccaggggaaggccaggcccaccgagagctgcagatcctgcccagggtccctgcattgtccaggaggcagagggagtgccctagatatgaattgccaggatgtttgagtaaatatgtgtcctccccactgagctttgttttctgtttcattatgtccattgttttcttataggtttattttggtttgtgttgctgttcttccaataaacgatcatcttattagttttcaatattgta

SEQ ID NO: 423584 - DNA, 827 bp, Homo sapiens
cattccagcttcccgtgcccactgtacatgccccagtgaacaagcgagaggatcttatcgttgctgaggtctgcttgtctcattttatcacaggtcagacagcagttctcgtgcccactgaccggcaccatgcatccaagggagctggaattgagtacctaaataaacaaaaatgtgccctatgtaagcttctacatcttgatttattgtaaagatttaaaagaaatatatatattttgtctgaaatttaatagtgtctttcataaatttaactgggaaacgtgagacagtacatgttaattatacaaatggccatttgctgttaataatttgttctcaactctaggatgtggcttggtttttttttttctcttttcttttttaaacaagaccaagatcttgcttattcttccatgtgcctgtgtaattttcttacagtgtggagtttctaaatgtatactgaccatcttttagtgtcttacccacattctggctataggataactctggttttagctttcatctaagaaggagatctggaatttatgtgtaccaggtcagatatgattgatcaatttctggagttgacctagcaaaggtcattttgatccaggtgttccggaataccttttccaatgtgtatacctccacccaaaaaagaaaaaaaaaccaactaaacaactgtttttttgttcaagtcagtcactgtctccttttactgttgattaattggccagtttattttgtcctaagccaaattaagtattttggctccccaattagccaaaccttactgtacaacacacttaattttaaaccttgtgctt

SEQ ID NO: 423585 - DNA, 719 bp, Homo sapiens
  misc_feature (544)..(544): n is a, c, g, or t
ctgcctgatctatagacttgtgacagccacgactttgtatgtctgctattgattttgttgttaatgtaattagagacaccagagggagaagcctggctggatgcaaagatgcatcttgattgagtggcttttatgtctgagcattagatgtctgtctacataataggttttgcctgttttttcaacattttgaagacattaaaaggccattacatctcagtaatgacagtctgtaaacaaatgcgtttgtaagcttcttcagatagttttgcaatgttttctaaatatcgttgatttaattgtaagcttctttttaatggaattcttggttaaaatgaattgatgattatgaatatccctaggaggagttagcatggagtttgatcattttctttgtactcctttagattttatatttttacacaatcatattttagtatggggtctgtttatgtaactctgacttgctggaaaagttgaaactccaaataatctgaaactagaaaagaaatagcacataattactacccttccccttgggggntctcctccccaacccccaccccacaattttatgacttccatttggcaattgttgaattataactgcgactgaaacaaacaggttcatagagatgaattttctgagaaacatatatctacatgttgtataattggattttttttccatgtaagtgaacataaaaacatcttttccg

SEQ ID NO: 423586 - DNA, 2119 bp, Homo sapiens
cggagagacctgggctggcgcgggcgggagctgcggcggatacccttgcgtgctgtggagaccctactctcttcgctgagaacggccgctagcggggactgaaggccgggagcccactcccgacccggggctagcgtgcgtccctagagtcgagcggggcaagggagccagtggccgccgacgggggaccgggaaacttttctgggctcctgggcgcgccctgtagccgcgctccatgctccggcagcggcccgaaacccagccccgccgctgacggcgcccgccgctccgggcagggcccatgccctgcgcgctccgggggtcgtaggctgccgccgagccggggctccggaagccggcgggggcgccgcggccgtgcggggcgtcaatggatcgccactccagctacatcttcatctggctgcagctggagctctgcgccatggccgtgctgctcaccaaaggtgaaattcgatgctactgtgatgctgcccactgtgtagccactggttatatgtgtaaatctgagctcagcgcctgcttctctagacttcttgatcctcagaactcaaattccccactcacccatggctgcctggactctcttgcaagcacgacagacatctgccaagccaaacaggcccgaaaccactctggcaccaccatacccacattggaatgctgtcatgaagacatgtgcaattacagagggctgcacgatgttctctctcctcccaggggtgaggcctcaggacaaggaaacaggtatcagcatgatggtagcagaaaccttatcaccaaggtgcaggagctgacttcttccaaagagttgtggttccgggcagcggtcattgccgtgcccattgctggagggctgattttagtgttgcttattatgttggccctgaggatgcttcgaagtgaaaataagaggctgcaggatcagcggcaacagatgctctcccgtttgcactacagctttcacggacaccattccaaaaaggggcaggttgcaaagttagacttggaatgcatggtgccggtcagtgggcacgagaactgctgtctgacctgtgataaaatgagacaagcagacctcagcaacgataagatcctctcgcttgttcactggggcatgtacagtgggcacgggaagctggaattcgtatgacggagtcttatctgaactacacttactgaacagcttgaaggccttttgagttctgctggacaggagcactttatctgaagacaaactcatttaatcatctttgagagacaaaatgacctctgcaaacagaatcttggatatttcttctgaaggattatttgcacagacttaaatacagttaaatgtgttatttgctttaaaattataaaaagcaaagagaagactttgtacacactgtcaccagggttatttgcatccaagggagctggaattgagtacctaaataaacaaaaatgtgccctatgtaagcttctacatcttgatttattgtaaagatttaaaagaaatatatatattttgtctgaaatttaatagtgtctttcataaatttaactgggaaacgtgagacagtacatgttaattatacaaatggccatttgctgttaataatttgttctcaactctaggatgtggcttggtttttttttttctcttttcttttttaaacaagaccaagatcttgcttattcttccatgtgcctgtgtaattttcttacagtgtggagtttctaaatgtatactgaccatcttttagtgtcttacccacattctggctataggataactctggttttagctttcatctaagaaggagatctggaatttatgtgtaccaggtcagatatgattgatcaatttctggagttgacctagcaaaggtcattttgatccaggtgttccggaataccttttccaatgtgtatacctccacccaaaaaagaaaaaaaaaccaactaaacaactgtttttttgttcaagtcagtcactgtctccttttactgttgattaattggccagtttattttgtcctaagccaaattaagtattttggctccccaattagccaaaccttactgtacaacacacttaattttaaaccttgtgctt

SEQ ID NO: 423587 - DNA, 2065 bp, Homo sapiens
cggagagacctgggctggcgcgggcgggagctgcggcggatacccttgcgtgctgtggagaccctactctcttcgctgagaacggccgctagcggggactgaaggccgggagcccactcccgacccggggctagcgtgcgtccctagagtcgagcggggcaagggagccagtggccgccgacgggggaccgggaaacttttctgggctcctgggcgcgccctgtagccgcgctccatgctccggcagcggcccgaaacccagccccgccgctgacggcgcccgccgctccgggcagggcccatgccctgcgcgctccgggggtcgtaggctgccgccgagccggggctccggaagccggcgggggcgccgcggccgtgcggggcgtcaatggatcgccactccagctacatcttcatctggctgcagctggagctctgcgccatggccgtgctgctcaccaaaggtgaaattcgatgctactgtgatgctgcccactgtgtagccactggttatatgtgtaaatctgagctcagcgcctgcttctctagacttcttgatcctcagaactcaaattccccactcacccatggctgcctggactctcttgcaagcacgacagacatctgccaagccaaacaggcccgaaaccactctggcaccaccatacccacattggaatgctgtcatgaagacatgtgcaattacagagggctgcacgatgttctctctcctcccaggggtgaggcctcaggacaaggaaacaggtatcagcatgatggtagcagaaaccttatcaccaaggtgcaggagctgacttcttccaaagagttgtggttccgggcagcggtcattgccgtgcccattgctggagggctgattttagtgttgcttattatgttggccctgaggatgcttcgaagtgaaaataagaggctgcaggatcagcggcaacagatgctctcccgtttgcactacagctttcacggacaccattccaaaaaggggcaggttgcaaagttagacttggaatgcatggtgccggtcagtgggcacgagaactgctgtctgacctgtgatggcatgtacagtgggcacgggaagctggaattcgtatgacggagtcttatctgaactacacttactgaacagcttgaaggccttttgagttctgctggacaggagcactttatctgaagacaaactcatttaatcatctttgagagacaaaatgacctctgcaaacagaatcttggatatttcttctgaaggattatttgcacagacttaaatacagttaaatgtgttatttgctttaaaattataaaaagcaaagagaagactttgtacacactgtcaccagggttatttgcatccaagggagctggaattgagtacctaaataaacaaaaatgtgccctatgtaagcttctacatcttgatttattgtaaagatttaaaagaaatatatatattttgtctgaaatttaatagtgtctttcataaatttaactgggaaacgtgagacagtacatgttaattatacaaatggccatttgctgttaataatttgttctcaactctaggatgtggcttggtttttttttttctcttttcttttttaaacaagaccaagatcttgcttattcttccatgtgcctgtgtaattttcttacagtgtggagtttctaaatgtatactgaccatcttttagtgtcttacccacattctggctataggataactctggttttagctttcatctaagaaggagatctggaatttatgtgtaccaggtcagatatgattgatcaatttctggagttgacctagcaaaggtcattttgatccaggtgttccggaataccttttccaatgtgtatacctccacccaaaaaagaaaaaaaaaccaactaaacaactgtttttttgttcaagtcagtcactgtctccttttactgttgattaattggccagtttattttgtcctaagccaaattaagtattttggctccccaattagccaaaccttactgtacaacacacttaattttaaaccttgtgctt

SEQ ID NO: 423588 - DNA, 1418 bp, Homo sapiens
cggagagacctgggctggcgcgggcgggagctgcggcggatacccttgcgtgctgtggagaccctactctcttcgctgagaacggccgctagcggggactgaaggccgggagcccactcccgacccggggctagcgtgcgtccctagagtcgagcggggcaagggagccagtggccgccgacgggggaccgggaaacttttctgggctcctgggcgcgccctgtagccgcgtccgggcagggcccatgccctgcgcgctccgggggtcgtaggctgccgccgagccggggctccggaagccggcgggggcgccgcggccgtgcggggcgtcaatggatcgccactccagctacatcttcatctggctgcagctggagctctgcgccatggccgtgctgctcaccaaaggtgaaattcgatgctactgtgatgctgcccactgtgtagccactggttatatgtgtaaatctgagctcagcgcctgcttctctagacttcttgatcctcagaactcaaattccccactcacccatggctgcctggactctcttgcaagcacgacagacatctgccaagccaaacaggcccgaaaccactctggcaccaccatacccacattggaatgctgtcatgaagacatgtgcaattacagagggctgcacgatgttctctctcctcccaggggtgaggcctcaggacaaggaaacaggtatcagcatgatggtagcagaaaccttatcaccaaggtgcaggagctgacttcttccaaagagttgtggttccgggcagcggtcattgccgtgcccattgctggagggctgattttagtgttgcttattatgttggccctgaggatgcttcgaagtgaaaataagaggctgcaggatcagcggcaacagatgctctcccgtttgcactacagctttcacggacaccattccaaaaaggggcaggttgcaaagttagacttggaatgcatggtgccggtcagtgggcacgagaactgctgtctgacctgtgataaaatgagacaagcagacctcagcaacgataagatcctctcgcttgttcactggggcatgtacagtgggcacgggaagctggaattcgtatgacggagtcttatctgaactacacttactgaacagcttgaaggccttttgagttctgctggacaggagcactttatctgaagacaaactcatttaatcatctttgagagacaaaatgacctctgcaaacagaatcttggatatttcttctgaaggattatttgcacagacttaaatacagttaaatgtgttatttgctttaaaattataaaaagcaaagagaagactttgtacacactgtcaccagggttatttgcatccaagggagctggaattgagtacctaaataaacaaaaatgtgcccta

SEQ ID NO: 423589 - DNA, 1129 bp, Homo sapiens
ctgcctgatctatagacttgtgacagccacgactttgtatgtctgctattgattttgttgttaatgtaattagagacaccagagggagaagcctggctggatgcaaagatgcatcttgattgagtggcttttatgtctgagcattagatgtctgtctacataataggttttgcctgttttttcaacattttgaagacattaaaaggccattacatctcagtaatgacagtctgtaaacaaatgcgtttgtaagcttcttcagatagttttgcaatgttttctaaatatcgttgatttaattgtaagcttctttttaatggaattcttggttaaaatgaattgatgattatgaatatccctaggaggagttagcatggagtttgatcattttctttgtactcctttaggacaaggaaacaggtatcagcatgatggtagcagaaaccttatcaccaaggtgcaggagctgacttcttccaaagagttgtggttccgggcagcggtcattgccgtgcccattgctggagggctgattttagtgttgcttattatgttggccctgaggatgcttcgaagtgaaaataagaggctgcaggatcagcggcaacagatgctctcccgtttgcactacagctttcacggacaccattccaaaaaggggcaggttgcaaagttagacttggaatgcatggtgccggtcagtgggcacgagaactgctgtctgacctgtgataaaatgagacaagcagacctcagcaacgataagatcctctcgcttgttcactggggcatgtacagtgggcacgggaagctggaattcgtatgacggagtcttatctgaactacacttactgaacagcttgaaggccttttgagttctgctggacaggagcactttatctgaagacaaactcatttaatcatctttgagagacaaaatgacctctgcaaacagaatcttggatatttcttctgaaggattatttgcacagacttaaatacagttaaatgtgttatttgctttaaaattataaaaagcaaagagaagactttgtacacactgtcaccagggttatttgcatccaagggagctggaattgagtacctaaataaacaaaaatgtgcccta

SEQ ID NO: 423590 - DNA, 716 bp, Homo sapiens
tctagaggatccttacctaaatggctgtaaaccttatcaccaaggtgcaggagctgacttcttccaaagagttgtggttccgggcagcggtcattgccgtgcccattgctggagggctgattttagtgttgcttattatgttggccctgaggatgcttcgaagtgaaaataagaggctgcaggatcagcggcaacagatgctctcccgtttgcactacagctttcacggacaccattccaaaaaggggcaggttgcaaagttagacttggaatgcatggtgccggtcagtgggcacgagaactgctgtctgacctgtgataaaatgagacaagcagacctcagcaacgataagatcctctcgcttgttcactggggcatgtacagtgggcacgggaagctggaattcgtatgacggagtcttatctgaactacacttactgaacagcttgaaggccttttgagttctgctggacaggagcactttatctgaagacaaactcatttaatcatctttgagagacaaaatgacctctgcaaacagaatcttggatatttcttctgaaggattatttgcacagacttaaatacagttaaatgtgttatttgctttaaaattataaaaagcaaagagaagactttgtacacactgtcaccagggttatttgcatccaagggagctggaattgagtacctaaataaacaaaaatgtgcccta

SEQ ID NO: 423591 - DNA, 1536 bp, Homo sapiens
cggagagacctgggctggcgcgggcgggagctgcggcggatacccttgcgtgctgtggagaccctactctcttcgctgagaacggccgctagcggggactgaaggccgggagcccactcccgacccggggctagcgtgcgtccctagagtcgagcggggcaagggagccagtggccgccgacgggggaccgggaaacttttctgggctcctgggcgcgccctgtagccgcgctccatgctccggcagcggcccgaaacccagccccgccgctgacggcgcccgccgctccgggcagggcccatgccctgcgcgctccgggggtcgtaggctgccgccgagccggggctccggaagccggcgggggcgccgcggccgtgcggggcgtcaatggatcgccactccagctacatcttcatctggctgcagctggagctctgcgccatggccgtgctgctcaccaaaggtgaaattcgatgctactgtgatgctgcccactgtgtagccactggttatatgtgtaaatctgagctcagcgcctgcttctctagacttcttgatcctcagaactcaaattccccactcacccatggctgcctggactctcttgcaagcacgacagacatctgccaagccaaacaggcccgaaaccactctggcaccaccatacccacattggaatgctgtcatgaagacatgtgcaattacagagggctgcacgatgttctctctcctcccaggggtgaggcctcaggacaaggaaacaggtatcagcatgatggtagcagaaaccttatcaccaaggtgcaggagctgacttcttccaaagagttgtggttccgggcagcggtcattgccgtgcccattgctggagggctgattttagtgttgcttattatgttggccctgaggatgcttcgaagtgaaaataagaggctgcaggatcagcggcaacagatgctctcccgtttgcactacagctttcacggacaccattccaaaaaggggcaggttgcaaagttagacttggaatgcatggtgccggtcagtgggcacgagaactgctgtctgacctgtgataaaatgagacaagcagacctcagcaacgataagatcctctcgcttgttcactggggcatgtacagtgggcacgggaagctggaattcgtatgacggagtcttatctgaactacacttactgaacagcttgaaggccttttgagttctgctggacaggagcactttatctgaagacaaactcatttaatcatctttgagagacaaaatgacctctgcaaacagaatcttggatatttcttctgaaggattatttgcacagacttaaatacagttaaatgtgttatttgctttaaaattataaaaagcaaagagaagactttgtacacactgtcaccagggttatttgcatccaagggagctggaattgagtacctaaataaacaaaaatgtgccctatgtaagcttctacatcttgatttattgtaaagatttaaaagaaatatatatattttgtctga

SEQ ID NO: 423592 - DNA, 1474 bp, Homo sapiens
cggagagacctgggctggcgcgggcgggagctgcggcggatacccttgcgtgctgtggagaccctactctcttcgctgagaacggccgctagcggggactgaaggccgggagcccactcccgacccggggctagcgtgcgtccctagagtcgagcggggcaagggagccagtggccgccgacgggggaccgggaaacttttctgggctcctgggcgcgccctgtagccgcgctccatgctccggcagcggcccgaaacccagccccgccgctgacggcgcccgccgctccgggcagggcccatgccctgcgcgctccgggggtcgtaggctgccgccgagccggggctccggaagccggcgggggcgccgcggccgtgcggggcgtcaatggatcgccactccagctacatcttcatctggctgcagctggagctctgcgccatggccgtgctgctcaccaaaggtgaaattcgatgctactgtgatgctgcccactgtgtagccactggttatatgtgtaaatctgagctcagcgcctgcttctctagacttcttgatcctcagaactcaaattccccactcacccatggctgcctggactctcttgcaagcacgacagacatctgccaagccaaacaggcccgaaaccactctggcaccaccatacccacattggaatgctgtcatgaagacatgtgcaattacagagggctgcacgatgttctctctcctcccaggggtgaggcctcaggacaaggaaacaggtatcagcatgatggtagcagaaaccttatcaccaaggtgcaggagctgacttcttccaaagagttgtggttccgggcagcggtcattgccgtgcccattgctggagggctgattttagtgttgcttattatgttggccctgaggatgcttcgaagtgaaaataagaggctgcaggatcagcggcaacagatgctctcccgtttgcactacagctttcacggacaccattccaaaaaggggcaggttgcaaagttagacttggaatgcatggtgccggtcagtgggcacgagaactgctgtctgacctgtgataaaatgagacaagcagacctcagcaacgataagatcctctcgcttgttcactggggcatgtacagtgggcacgggaagctggaattcgtatgacggagtcttatctgaactacacttactgaacagcttgaaggccttttgagttctgctggacaggagcactttatctgaagacaaactcatttaatcatctttgagagacaaaatgacctctgcaaacagaatcttggatatttcttctgaaggattatttgcacagacttaaatacagttaaatgtgttatttgctttaaaattataaaaagcaaagagaagactttgtacacactgtcaccagggttatttgcatccaagggagctggaattgagtacctaaataaacaaaaatgtgcccta

SEQ ID NO: 423593 - DNA, 1373 bp, Homo sapiens
cggagagacctgggctggcgcgggcgggagctgcggcggatacccttgcgtgctgtggagaccctactctcttcgctgagaacggccgctagcggggactgaaggccgggagcccactcccgacccggggctagcgtgcgtccctagagtcgagcggggcaagggagccagtggccgccgacgggggaccgggaaacttttctgggctcctgggcgcgccctgtagccgcgctccatgctccggcagcggcccgaaacccagccccgccgggccgtgcggggcgtcaatggatcgccactccagctacatcttcatctggctgcagctggagctctgcgccatggccgtgctgctcaccaaaggtgaaattcgatgctactgtgatgctgcccactgtgtagccactggttatatgtgtaaatctgagctcagcgcctgcttctctagacttcttgatcctcagaactcaaattccccactcacccatggctgcctggactctcttgcaagcacgacagacatctgccaagccaaacaggcccgaaaccactctggcaccaccatacccacattggaatgctgtcatgaagacatgtgcaattacagagggctgcacgatgttctctctcctcccaggggtgaggcctcaggacaaggaaacaggtatcagcatgatggtagcagaaaccttatcaccaaggtgcaggagctgacttcttccaaagagttgtggttccgggcagcggtcattgccgtgcccattgctggagggctgattttagtgttgcttattatgttggccctgaggatgcttcgaagtgaaaataagaggctgcaggatcagcggcaacagatgctctcccgtttgcactacagctttcacggacaccattccaaaaaggggcaggttgcaaagttagacttggaatgcatggtgccggtcagtgggcacgagaactgctgtctgacctgtgataaaatgagacaagcagacctcagcaacgataagatcctctcgcttgttcactggggcatgtacagtgggcacgggaagctggaattcgtatgacggagtcttatctgaactacacttactgaacagcttgaaggccttttgagttctgctggacaggagcactttatctgaagacaaactcatttaatcatctttgagagacaaaatgacctctgcaaacagaatcttggatatttcttctgaaggattatttgcacagacttaaatacagttaaatgtgttatttgctttaaaattataaaaagcaaagagaagactttgtacacactgtcaccagggttatttgcatccaagggagctggaattgagtacctaaataaacaaaaatgtgcccta

SEQ ID NO: 423594 - DNA, 1413 bp, Homo sapiens
cggagagacctgggctggcgcgggcgggagctgcggcggatacccttgcgtgctgtggagaccctactctcttcgctgagaacggccgctagcggggactgaaggccgggagcccactcccgacccggggctagcgtgcgtccctagagtcgagcggggcaagggagccagtggccgccgacgggggaccgggaaacttttctgggctcctgggcgcgccctgtagccgcgctccatgctccggcagcggcccgaaacccagccccgccgctgacggcgcccgccgctccgggcagggcccatgccctgcgcgctccgggggtcgtaggctgccgccgagccggggctccggaagccggcgggggcgccgcggccgtgcggggcgtcaatggatcgccactccagctacatcttcatctggctgcagctggagctctgcgccatggccgtgctgctcaccaaaggtgaaattcgatgctactgtgatgctgcccactgtgtagccactggttatatgtgtaaatctgagctcagcgcctgcttctctagacttcttgatcctcagaactcaaattccccactcacccatggctgcctggactctcttgcaagcacgacagacatctgccaagccaaacaggcccgaaaccactctggcaccaccatacccacattggaatgctgtcatgaagacaaggaaacaggtatcagcatgatggtagcagaaaccttatcaccaaggtgcaggagctgacttcttccaaagagttgtggttccgggcagcggtcattgccgtgcccattgctggagggctgattttagtgttgcttattatgttggccctgaggatgcttcgaagtgaaaataagaggctgcaggatcagcggcaacagatgctctcccgtttgcactacagctttcacggacaccattccaaaaaggggcaggttgcaaagttagacttggaatgcatggtgccggtcagtgggcacgagaactgctgtctgacctgtgataaaatgagacaagcagacctcagcaacgataagatcctctcgcttgttcactggggcatgtacagtgggcacgggaagctggaattcgtatgacggagtcttatctgaactacacttactgaacagcttgaaggccttttgagttctgctggacaggagcactttatctgaagacaaactcatttaatcatctttgagagacaaaatgacctctgcaaacagaatcttggatatttcttctgaaggattatttgcacagacttaaatacagttaaatgtgttatttgctttaaaattataaaaagcaaagagaagactttgtacacactgtcaccagggttatttgcatccaagggagctggaattgagtacctaaataaacaaaaatgtgcccta

SEQ ID NO: 423595 - DNA, 1043 bp, Homo sapiens
ttttttttttttttaatcagaatgacaaaggtaaagcagtgtttaggaacataaatctgacaggtggctcgccaggtcacttggagccaggataggcaggagtagctggccagagacgagcagccctgaaaactgttcctgccctggcctcacctcgtcaccacgtctgctgtggaaagggctgcgacctggaggctgtgctgttgaacaggcacatcgaggaggtccaacacagcgtcagaactcccacgccctcttctcagctctgccccttggtcagctgtcaggtgactcccaggcagagtccgttttgaggctcctgggactggaatacgggaccagcctgagttgctgtcagtcacgtcgcaggagaaaggactggcaaaggctcatggcccttgaaattctgttccttctaggcctttcctaagaagcttgtggccttctcaacttggattgaccggacccgctgggccaggaacacctgggccatgctcgccatcttcatcctggtgatggcaaatgtcgtggacatggtgagctcctgctgtccttgttgaagggacgcccctgttctcagtggagaagggcttctgtttgggtcacacaagcagtttctcagtccatccctccaccgtcatgtagctttggagtggctcttaggttcccaaacacatcatccccacctagtggaaggagtcttgtccctgtcatccagggagcctctgggatggacttgtttccttgaagctcctctcccagagtccgagagcacagttccatgtgcccaggcctgtgctaggtaccttatgtatgttgattcatttaatctgtgaaaaagtcctgagcagttgtaccagtatctgcagtttcatagggagaaactaactctcaaaaagggtaattggttgggcgcggtacgtcacgcctgtaatcccagcactttgggaggccaaggtgggcggatcacgaggtcaggagttcgaaaccagcctggccaacatggtgaaaccccatctgtactaaaaatacaaaaattagcc

SEQ ID NO: 423596 - DNA, 442 bp, Homo sapiens
gtcttttgtttttttttttcctttttctggagaacagggtttcaccatgttggtcaggctggtctcgaactcctgacctcaggtgatccgcctgcctcggcctcccaaagtgctgggattacaggcatgaaccgccacgcctggccattcctgtttttcatccttctatccagtggccagcttagagcacatgcctcgccttgtctgtgtctgtaggtagaaaaactggcacggacacttttcttgtggaagattgaggtccacgaccagaaggaacgtgtctatgagatgcgacgctggaacgaggccttggtcaccaacatgttgcctgagcacgtggcacgccatttcctggggtccaagaagagagatgaggtgaggggtgtggtctcagcccggaaccatgaggccatttgtctccatctgttctttctttcaggca

SEQ ID NO: 423597 - DNA, 235 bp, Homo sapiens
aattgtggactcagcgcaaatatgtggccgtgctgtccctcatcgccaccatcatgctggtgcaggtcagccacatggtgaagctcacgctcatgctgctcgtcgcaggcgccgtggccaccatcaacctctatgcctggcgtcccgtctttgatgaatacgaccacaagcgttttcgggagcacgagtaagatgaagcgtgactggggatctgtattgtctccttcctcccgcc

SEQ ID NO: 423598 - DNA, 4504 bp, Homo sapiens
cgggcctgacggcgggagatcgcgctccggccgggccccgaggcgctgccggggcggcgcggctctgcggggagcagccctcgggcgcgccgagctctcccgccccagcccgcgcggtgaccgtcccggagcacgcggtggccgagttcccgcacagttctagctgatcagtgctacctgtgctctggaaacccgctctgcgttcctgctggaggtggcctcccctccgccccagacaagaagaggccctcagccctcccccggtctcagagagccctgagaggaggcccagtccagagctcttcctccgttcccagtccacttctctagggccagtagcagacaccagccagtatgccgaggaaccagggcttctccgagcccgaatactcggccgagtactcagccgagtactccgtcagcctgccctccgaccctgaccgcggggtgggccggacccatgaaatctcggtccggaactcgggctcctgcctgtgcctgcctcgcttcatgcggctgactttcgtgccggagtccttggagaacctctaccagacctacttcaaaaggcagcgccacgagaccctgctggtgctggtggtcttctccagcgacaagctggctcccctcgccgtggctggaattggactggtgttggacatcatcctcttcgtgctctgcaaaaaggggctgctcccggaccgggtcacccgcagagtgctgccctacgtgctgtggctgctcataaccgcccagatcttctcctacctgggcctgaacttcgcgcgtgcccacgcggctagtgacacggtgggctggcaggtcttctttgtcttctccttcttcatcacgctgcccctcagcctcagccccatcgtgatcatctccgtggtctcctgtgtggtgcacacgttggtcctgggggtcaccgtggcccagcagcagcaggaggagctcaaggggatgcagctgctgcgggagatcctggccaacgtcttcctctacctgtgcgccatcgctgtgggcatcatgtcctactacatggctgaccgcaagcaccgcaaggccttcctggaggcccgccagtcgctggaggtgaagatgaacctggaagagcagagccagcagcaggagaacctcatgctttccatcctgcccaagcacgtggctgacgagatgctgaaagacatgaagaaagacgagagccagaaggaccagcagcagttcaacaccatgtacatgtaccgtcacgagaacgtcagcatcctctttgccgacatcgtgggctttacccagctgtcttctgcctgcagtgcccaggagcttgtgaagctgctcaacgagctctttgcccgctttgacaagctggcagctaaataccaccagctgcggattaagatcctgggcgactgctactactgcatctgcggcttgcctgactaccgggaggaccacgccgtctgctccatcctcatggggctggccatggtggaggccatctcgtatgtgcgggagaagaccaagactggggtggacatgcgtgtgggggtgcacacgggcaccgtgctggggggcgtcctgggccagaagcgctggcagtacgacgtgtggtcgactgatgtcactgtagccaacaagatggaggccggcggcatccctgggcgcgtgcacatctcccagagcaccatggactgcctgaaaggggagtttgatgtggagccaggcgatgggggcagccgctgtgattacctagaagagaagggtattgaaacctacctcatcattgcctccaagccagaggtgaagaaaacagccacccagaatggcctcaatggctcggccctgcccaatggagcaccagcttcctcaaagtccagctcccctgccctcattgagaccaaggagcccaacgggagtgcccacagcagtgggtccacgtcggagaagcccgaggagcaggatgcccaggccgacaacccctcattccccaacccacgccggaggctgcgcctgcaggacctggctgaccgagtggtggatgcctctgaagatgagcacgagctcaaccagctgctcaacgaggccctgcttgagcgagagtccgcccaagtagtaaagaagagaaacaccttcctcttgtccatgcggttcatggaccccgagatggaaacccgctactcggtggagaaggagaagcagagtggggctgccttcagctgctcctgcgtcgtcctgctctgcacggccctggtcgagatactcatcgacccctggctaatgacaaactatgtgaccttcatggtgggggagattctgctcctcatcctgaccatctgctccctggctgccatctttccccgggcctttcctaagaagcttgtggccttctcaacttggattgaccggacccgctgggccaggaacacctgggccatgctcgccatcttcatcctggtgatggcaaatgtcgtggacatgctcagctgtctccagtactacacgggacccagcaatgcaacggcagggatggagacggagggcagctgcctggagaaccccaagtattacaactatgtggccgtgctgtccctcatcgccaccatcatgctggtgcaggtcagccacatggtgaagctcacgctcatgctgctcgtcgcaggcgccgtggccaccatcaacctctatgcctggcgtcccgtctttgatgaatacgaccacaagcgttttcgggagcacgacttacctatggtggccttagagcagatgcaaggattcaaccctgggctcaatggcactgacaggctgcccctggtgccttccaagtactctatgacggtgatggtgttcctcatgatgctcagcttctactacttctcccgccacgtagaaaaactggcacggacacttttcttgtggaagattgaggtccacgaccagaaggaacgtgtctatgagatgcgacgctggaacgaggccttggtcaccaacatgttgcctgagcacgtggcacgccatttcctggggtccaagaagagagatgaggagctgtatagccagacgtatgatgagattggagtcatgtttgcctccctgcccaactttgctgacttctacacagaggagagcatcaacaatggtggtattgagtgtctgcgtttcctcaatgaaatcatctcagattttgactctctcctggacaatcccaagttccgggtgatcaccaagatcaaaaccattggcagcacgtatatggcggcttcaggagtcacccccgatgtcaacaccaatggctttgccagctccaacaaggaagacaagtccgagagagagcgctggcagcacctggctgacctggccgacttcgcgctggccatgaaggatacgctcaccaacatcaacaaccagtccttcaataacttcatgctgcgcataggcatgaacaaaggcggggttctggctggggtcatcggagcccggaaaccacactacgacatctggggcaatacagtcaatgtagccagcaggatggagtccacgggggtcatgggcaacattcaggtggtagaagaaacccaagtcatcctccgagagtacggcttccgctttgtgaggcgaggccccatctttgtgaaggggaagggggagctgctgaccttcttcttgaaggggcgggataagctagccaccttccccaatggcccctctgtcacactgccccaccaggtggtggacaactcctgaatggcctcgagcctgcaacagtccaaaccggaagggagaatttattttttgaaactgaaggaagtcccgaccttcctggattgaagtgcacactcatggactttaggtttagaaacctcctcagccttcatttgttcgtggatgtgtgagctctgagggtggccctgctattcctctgtgtgcctgtagtgtccccagcataggggtcttaggcatagggctgaacagtccttccagagccctcgttccaatccctgccgtccttgcccctgaggggccctgaccactgtgagcaggagggtggcagagctgggacaaagctgcctttgccgctgggctttccgggactgtggagggagcacaggcggggaagctccacttcagacagggcttggtggggcaggacatggctcccattttgaagggaggtctccatgtggtccgagtgaggtgagacggccctcgtcctggtgttcctgatcatcttgaaaggttcttctggaactcctgtccccttagtcatgagaacagaaagtgcaatatttcctttcacctggcaggggaggggggatttatttctgaaagaaaaatatataaacagatcttctacatttatatttttaatcttctgttaaatacactttccgatattgccttgccttttgagctcttgctacagtcgcctttgctactgctttaagagaatttacaggtattgataaagaacaagactgttttattaaaagctttattcaacttgaaa

SEQ ID NO: 423599 - DNA, 5113 bp, Homo sapiens
cgggcctgacggcgggagatcgcgctccggccgggccccgaggcgctgccggggcggcgcggctctgcggggagcagccctcgggcgcgccgagctctcccgccccagcccgcgcggtgaccgtcccggagcacgcggtggccgagttcccgcacagttctagctgatcagtgctacctgtgctctggaaacccgctctgcgttcctgctggaggtggcctcccctccgccccagacaagaagaggccctcagccctcccccggtctcagagagccctgagaggaggcccagtccagagctcttcctccgttcccagtccacttctctagggccagtagcagacaccagccagtatgccgaggaaccagggcttctccgagcccgaatactcggccgagtactcagccgagtactccgtcagcctgccctccgaccctgaccgcggggtgggccggacccatgaaatctcggtccggaactcgggctcctgcctgtgcctgcctcgcttcatgcggctgactttcgtgccggagtccttggagaacctctaccagacctacttcaaaaggcagcgccacgagaccctgctggtgctggtggtcttctccagcgacaagctggctcccctcgccgtggctggaattggactggtgttggacatcatcctcttcgtgctctgcaaaaaggggctgctcccggaccgggtcacccgcagagtgctgccctacgtgctgtggctgctcataaccgcccagatcttctcctacctgggcctgaacttcgcgcgtgcccacgcggctagtgacacggtgggctggcaggtcttctttgtcttctccttcttcatcacgctgcccctcagcctcagccccatcgtgatcatctccgtggtctcctgtgtggtgcacacgttggtcctgggggtcaccgtggcccagcagcagcaggaggagctcaaggggatgcagctgctgcgggagatcctggccaacgtcttcctctacctgtgcgccatcgctgtgggcatcatgtcctactacatggctgaccgcaagcaccgcaaggccttcctggaggcccgccagtcgctggaggtgaagatgaacctggaagagcagagccagcagcaggagaacctcatgctttccatcctgcccaagcacgtggctgacgagatgctgaaagacatgaagaaagacgagagccagaaggaccagcagcagttcaacaccatgtacatgtaccgtcacgagaacgtcagcatcctctttgccgacatcgtgggctttacccagctgtcttctgcctgcagtgcccaggagcttgtgaagctgctcaacgagctctttgcccgctttgacaagctggcagctaaataccaccagctgcggattaagatcctgggcgactgctactactgcatctgcggcttgcctgactaccgggaggaccacgccgtctgctccatcctcatggggctggccatggtggaggccatctcgtatgtgcgggagaagaccaagactggggtggacatgcgtgtgggggtgcacacgggcaccgtgctggggggcgtcctgggccagaagcgctggcagtacgacgtgtggtcgactgatgtcactgtagccaacaagatggaggccggcggcatccctgggcgcgtgcacatctcccagagcaccatggactgcctgaaaggggagtttgatgtggagccaggcgatgggggcagccgctgtgattacctagaagagaagggtattgaaacctacctcatcattgcctccaagccagaggtgaagaaaacagccacccagaatggcctcaatggctcggccctgcccaatggagcaccagcttcctcaaagtccagctcccctgccctcattgagaccaaggagcccaacgggagtgcccacagcagtgggtccacgtcggagaagcccgaggagcaggatgcccaggccgacaacccctcattccccaacccacgccggaggctgcgcctgcaggacctggctgaccgagtggtggatgcctctgaagatgagcacgagctcaaccagctgctcaacgaggccctgcttgagcgagagtccgcccaagtagtaaagaagagaaacaccttcctcttgtccatgcggttcatggaccccgagatggaaacccgctactcggtggagaaggagaagcagagtggggctgccttcagctgctcctgcgtcgtcctgctctgcacggccctggtcgagatactcatcgacccctggctaatgacaaactatgtgaccttcatggtgggggagattctgctcctcatcctgaccatctgctccctggctgccatctttccccgggcctttcctaagaagcttgtggccttctcaacttggattgaccggacccgctgggccaggaacacctgggccatgctcgccatcttcatcctggtgatggcaaatgtcgtggacatgctcagctgtctccagtactacacgggacccagcaatgcaacggcagggatggagacggagggcagctgcctggagaaccccaagtattacaactatgtggccgtgctgtccctcatcgccaccatcatgctggtgcaggtcagccacatggtgaagctcacgctcatgctgctcgtcgcaggcgccgtggccaccatcaacctctatgcctggcgtcccgtctttgatgaatacgaccacaagcgttttcgggagcacgacttacctatggtggccttagagcagatgcaaggattcaaccctgggctcaatggcactgacaggctgcccctggtgccttccaagtactctatgacggtgatggtgttcctcatgatgctcagcttctactacttctcccgccacgtagaaaaactggcacggacacttttcttgtggaagattgaggtccacgaccagaaggaacgtgtctatgagatgcgacgctggaacgaggccttggtcaccaacatgttgcctgagcacgtggcacgccatttcctggggtccaagaagagagatgaggagctgtatagccagacgtatgatgagattggagtcatgtttgcctccctgcccaactttgctgacttctacacagaggagagcatcaacaatggtggtattgagtgtctgcgtttcctcaatgaaatcatctcagattttgactctctcctggacaatcccaagttccgggtgatcaccaagatcaaaaccattggcagcacgtatatggcggcttcaggagtcacccccgatgtcaacaccaatggctttgccagctccaacaaggaagacaagtccgagagagagcgctggcagcacctggctgacctggccgacttcgcgctggccatgaaggatacgctcaccaacatcaacaaccagtccttcaataacttcatgctgcgcataggcatgaacaaaggcggggttctggctggggtcatcggagcccggaaaccacactacgacatctggggcaatacagtcaatgtagccagcaggatggagtccacgggggtcatgggcaacattcaggtatgtccagtggcacagctggcacgtgctcagactcggcatgagaacaaaaccggaacagtgctttcccacgtgcccctgcctcccaccctggccctgaacagtaagtccagaggcagagacgtggggcaagtggaaaagaatctctgcaatagctagcctcagcacaggaagaaacacttccacccatccacaaaatctgggctgaagttctagatgcatatggcctacctttgggtatgaaccttctaataccttgtgatctgtctcagtggcgtctggcagaaaagctccacgaaaggggcaaagggacagaagagcaggcagtggcagtttccaggtaacagtgctgccacccaggtgaccatggccatcctaggagagaagtctctggatgagaggaggcccccagccagtcactccagggttctccttcccacccgctgctcgccacgggtggaagggcttggccctgggaggtttggggagtgtcccgtactgcttgggacccatggatcagtgctcggctccaaccacccaaagcccccacccgccctcagtctaggctccccccgtaacgccacgttcttgctccccctccctctccaggtggtagaagaaacccaagtcatcctccgagagtacggcttccgctttgtgaggcgaggccccatctttgtgaaggggaagggggagctgctgaccttcttcttgaaggggcgggataagctagccaccttccccaatggcccctctgtcacactgccccaccaggtggtggacaactcctgaatggcctcgagcctgcaacagtccaaaccggaagggagaatttattttttgaaactgaaggaagtcccgaccttcctggattgaagtgcacactcatggactttaggtttagaaacctcctcagccttcatttgttcgtggatgtgtgagctctgagggtggccctgctattcctctgtgtgcctgtagtgtccccagcataggggtcttaggcatagggctgaacagtccttccagagccctcgttccaatccctgccgtccttgcccctgaggggccctgaccactgtgagcaggagggtggcagagctgggacaaagctgcctttgccgctgggctttccgggactgtggagggagcacaggcggggaagctccacttcagacagggcttggtggggcaggacatggctcccattttgaagggaggtctccatgtggtccgagtgaggtgagacggccctcgtcctggtgttcctgatcatcttgaaaggttcttctggaactcctgtccccttagtcatgagaacagaaagtgcaatatttcctttcacctggcaggggaggggggatttatttctgaaagaaaaatatataaacagatcttctacatttatatttttaatcttctgttaaatacactttccgatattgccttgccttttgagctcttgctacagtcgcctttgctactgctttaagagaatttacaggtattgataaagaacaagactgttttattaaaagctttattcaacttgaaa

SEQ ID NO: 423600 - DNA, 2562 bp, Homo sapiens
ttttttttttttttaatcagaatgacaaaggtaaagcagtgtttaggaacataaatctgacaggtggctcgccaggtcacttggagccaggataggcaggagtagctggccagagacgagcagccctgaaaactgttcctgccctggcctcacctcgtcaccacgtctgctgtggaaagggctgcgacctggaggctgtgctgttgaacaggcacatcgaggaggtccaacacagcgtcagaactcccacgccctcttctcagctctgccccttggtcagctgtcaggtgactcccaggcagagtccgttttgaggctcctgggactggaatacgggaccagcctgagttgctgtcagtcacgtcgcaggagaaaggactggcaaaggctcatggcccttgaaattctgttccttctaggcctttcctaagaagcttgtggccttctcaacttggattgaccggacccgctgggccaggaacacctgggccatgctcgccatcttcatcctggtgatggcaaatgtcgtggacatgctcagctgtctccagtactacacgggacccagcaatgcaacggcagggatggagacggagggcagctgcctggagaaccccaagtattacaactatgtggccgtgctgtccctcatcgccaccatcatgctggtgcaggtcagccacatggtgaagctcacgctcatgctgctcgtcgcaggcgccgtggccaccatcaacctctatgcctggcgtcccgtctttgatgaatacgaccacaagcgttttcgggagcacgacttacctatggtggccttagagcagatgcaaggattcaaccctgggctcaatggcactgacaggctgcccctggtgccttccaagtactctatgacggtgatggtgttcctcatgatgctcagcttctactacttctcccgccacgtagaaaaactggcacggacacttttcttgtggaagattgaggtccacgaccagaaggaacgtgtctatgagatgcgacgctggaacgaggccttggtcaccaacatgttgcctgagcacgtggcacgccatttcctggggtccaagaagagagatgaggagctgtatagccagacgtatgatgagattggagtcatgtttgcctccctgcccaactttgctgacttctacacagaggagagcatcaacaatggtggtattgagtgtctgcgtttcctcaatgaaatcatctcagattttgactctctcctggacaatcccaagttccgggtgatcaccaagatcaaaaccattggcagcacgtatatggcggcttcaggagtcacccccgatgtcaacaccaatggctttgccagctccaacaaggaagacaagtccgagagagagcgctggcagcacctggctgacctggccgacttcgcgctggccatgaaggatacgctcaccaacatcaacaaccagtccttcaataacttcatgctgcgcataggcatgaacaaaggcggggttctggctggggtcatcggagcccggaaaccacactacgacatctggggcaatacagtcaatgtagccagcaggatggagtccacgggggtcatgggcaacattcaggtggtagaagaaacccaagtcatcctccgagagtacggcttccgctttgtgaggcgaggccccatctttgtgaaggggaagggggagctgctgaccttcttcttgaaggggcgggataagctagccaccttccccaatggcccctctgtcacactgccccaccaggtggtggacaactcctgaatggcctcgagcctgcaacagtccaaaccggaagggagaatttattttttgaaactgaaggaagtcccgaccttcctggattgaagtgcacactcatggactttaggtttagaaacctcctcagccttcatttgttcgtggatgtgtgagctctgagggtggccctgctattcctctgtgtgcctgtagtgtccccagcataggggtcttaggcatagggctgaacagtccttccagagccctcgttccaatccctgccgtccttgcccctgaggggccctgaccactgtgagcaggagggtggcagagctgggacaaagctgcctttgccgctgggctttccgggactgtggagggagcacaggcggggaagctccacttcagacagggcttggtggggcaggacatggctcccattttgaagggaggtctccatgtggtccgagtgaggtgagacggccctcgtcctggtgttcctgatcatcttgaaaggttcttctggaactcctgtccccttagtcatgagaacagaaagtgcaatatttcctttcacctggcaggggaggggggatttatttctgaaagaaaaatatataaacagatcttctacatttatatttttaatcttctgttaaatacactttccgatattgccttgccttttgagctcttgctacagtcgcctttgctactgctttaagagaatttacaggtattgataaagaacaagactgttttattaaaagctttattcaacttgaaa

SEQ ID NO: 423601 - DNA, 4511 bp, Homo sapiens
cgggcctgacggcgggagatcgcgctccggccgggccccgaggcgctgccggggcggcgcggctctgcggggagcagccctcgggcgcgccgagctctcccgccccagcccgcgcggtgaccgtcccggagcacgcggtggccgagttcccgcacagttctagctgatcagtgctacctgtgctctggaaacccgctctgcgttcctgctggaggtggcctcccctccgccccagacaagaagaggccctcagccctcccccggtctcagagagccctgagaggaggcccagtccagagctcttcctccgttcccagtccacttctctagggccagtagcagacaccagccagtatgccgaggaaccagggcttctccgagcccgaatactcggccgagtactcagccgagtactccgtcagcctgccctccgaccctgaccgcggggtgggccggacccatgaaatctcggtccggaactcgggctcctgcctgtgcctgcctcgcttcatgcggctgactttcgtgccggagtccttggagaacctctaccagacctacttcaaaaggcagcgccacgagaccctgctggtgctggtggtctttgcagccctctttgactgctacgtggtggtcatgtgtgctgtggtcttctccagcgacaagctggctcccctcgccgtggctggaattggactggtgttggacatcatcctcttcgtgctctgcaaaaaggggctgctcccggaccgggtcacccgcagagtgctgccctacgtgctgtggctgctcataaccgcccagatcttctcctacctgggcctgaacttcgcgcgtgcccacgcggctagtgacacggtgggctggcaggtcttctttgtcttctccttcttcatcacgctgcccctcagcctcagccccatcgtgatcatctccgtggtctcctgtgtggtgcacacgttggtcctgggggtcaccgtggcccagcagcagcaggaggagctcaaggggatgcagctgctgcgggagatcctggccaacgtcttcctctacctgtgcgccatcgctgtgggcatcatgtcctactacatggctgaccgcaagcaccgcaaggccttcctggaggcccgccagtcgctggaggtgaagatgaacctggaagagcagagccagcagcaggagaacctcatgctttccatcctgcccaagcacgtggctgacgagatgctgaaagacatgaagaaagacgagagccagaaggaccagcagcagttcaacaccatgtacatgtaccgtcacgagaacgtcagcatcctctttgccgacatcgtgggctttacccagctgtcttctgcctgcagtgcccaggagcttgtgaagctgctcaacgagctctttgcccgctttgacaagctggcagctaaataccaccagctgcggattaagatcctgggcgactgctactactgcatctgcggcttgcctgactaccgggaggaccacgccgtctgctccatcctcatggggctggccatggtggaggccatctcgtatgtgcgggagaagaccaagactggggtggacatgcgtgtgggggtgcacacgggcaccgtgctggggggcgtcctgggccagaagcgctggcagtacgacgtgtggtcgactgatgtcactgtagccaacaagatggaggccggcggcatccctgggcgcgtgcacatctcccagagcaccatggactgcctgaaaggggagtttgatgtggagccaggcgatgggggcagccgctgtgattacctagaagagaagggtattgaaacctacctcatcattgcctccaagccagaggtgaagaaaacagccacccagaatggcctcaatggctcggccctgcccaatggagcaccagcttcctcaaagtccagctcccctgccctcattgagaccaaggagcccaacgggagtgcccacagcagtgggtccacgtcggagaagcccgaggagcaggatgcccaggccgacaacccctcattccccaacccacgccggaggctgcgcctgcaggacctggctgaccgagtggtggatgcctctgaagatgagcacgagctcaaccagctgctcaacgaggccctgcttgagcgagagtccgcccaagtagtaaagaagagaaacaccttcctcttgtccatgcggttcatggaccccgagatggaaacccgctactcggtggagaaggagaagcagagtggggctgccttcagctgctcctgcgtcgtcctgctctgcacggccctggtcgagatactcatcgacccctggctaatgacaaactatgtgaccttcatggtgggggagattctgctcctcatcctgaccatctgctccctggctgccatctttccccgggcctttcctaagaagcttgtggccttctcaacttggattgaccggacccgctgggccaggaacacctgggccatgctcgccatcttcatcctggtgatggcaaatgtcgtggacatgctcagctgtctccagtactacacgggacccagcaatgcaacggcagggatggagacggagggcagctgcctggagaaccccaagtattacaactatgtggccgtgctgtccctcatcgccaccatcatgctggtgcaggtcagccacatggtgaagctcacgctcatgctgctcgtcgcaggcgccgtggccaccatcaacctctatgcctggcgtcccgtctttgatgaatacgaccacaagcgttttcgggagcacgacttacctatggtggccttagagcagatgcaaggattcaaccctgggctcaatggcactgacaggctgcccctggtgccttccaagtactctatgacggtgatggtgttcctcatgatgctcagcttctactacttctcccgccacgtagaaaaactggcacggacacttttcttgtggaagattgaggtccacgaccagaaggaacgtgtctatgagatgcgacgctggaacgaggccttggtcaccaacatgttgcctgagcacgtggcacgccatttcctggggtccaagaagagagatgaggagctgtatagccagacgtatgatgagattggagtcatgtttgcctccctgcccaactttgctgacttctacacagaggagagcatcaacaatggtggtattgagtgtctgcgtttcctcaatgaaatcatctcagattttgactctctcctggacaatcccaagttccgggtgatcaccaagatcaaaaccattggcagcacgtatatggcggcttcaggagtcacccccgatgtcaacaccaatggctttgccagctccaacaaggaagacaagtccgagagagagcgctggcagcacctggctgacctggccgacttcgcgctggccatgaaggatacgctcaccaacatcaacaaccagtccttcaataacttcatgctgcgcataggcatgaacaaaggcggggttctggctggggtcatcggagcccggaaaccacactacgacatctggggcaatacagtcaatgtagccagcaggatggagtccacgggggtcatgggcaacattcaggtggtagaagaaacccaagtcatcctccgagagtacggcttccgctttgtgaggcgaggccccatctttgtgaaggggaagggggagctgctgaccttcttcttgaaggggcgggataagctagccaccttccccaatggcccctctgtcacactgccccaccaggtggtggacaactcctgaatggcctcgagcctgcaacagtccaaaccggaagggagaatttattttttgaaactgaaggaagtcccgaccttcctggattgaagtgcacactcatggactttaggtttagaaacctcctcagccttcatttgttcgtggatgtgtgagctctgagggtggccctgctattcctctgtgtgcctgtagtgtccccagcataggggtcttaggcatagggctgaacagtccttccagagccctcgttccaatccctgccgtccttgcccctgaggggccctgaccactgtgagcaggagggtggcagagctgggacaaagctgcctttgccgctgggctttccgggactgtggagggagcacaggcggggaagctccacttcagacagggcttggtggggcaggacatggctcccattttgaagggaggtctccatgtggtccgagtgaggtgagacggccctcgtcctggtgttcctgatcatcttgaaaggttcttctggaactcctgtccccttagtcatgagaacagaaagtgcaatatttcctttcacctggcaggggaggggggatttatttctctgatgtgctcccagtgcagtgaaaacaatctattaggagaccagactcatatccaacttttctccttttcttgtaaatgaggcaaacacttgatgcaagggcttcgtacagaacagagtttcatgagatgctcgttgctcc

SEQ ID NO: 423602 - DNA, 2912 bp, Homo sapiens
  misc_feature (20)..(20): n is a, c, g, or t
  misc_feature (29)..(29): n is a, c, g, or t
  misc_feature (124)..(124): n is a, c, g, or t
  misc_feature (255)..(255): n is a, c, g, or t
gttggaatcaacatatttcncagtgtccncagttaccagcatgcagatagtaaaatataatggtttcctgaagttatctcttaaaaaagattttagtccttcagctattcaaatagatatatancaattgcatatagaacgtagagaaaattttattaaaaaattaaaactatttaaaacctgatatatgaaaataggcaacagtgagaaaaaagcacttttgtgacaaatatttagctggtttgaaagacagancaaggaggaatcatttactcataaagaaggctcaaataagttaaaacatggatgtatttttaaaatgaccactctagtagtgaatttaaaagtcttttaagggttagagtaatctttttcattagtcttggctatttcctctagttctgacaagtacaggcaagaaaatggctactctcaagtaaggattattctgaaacacggtctggatttagaaaataaatgaacattagggaaatttccttaattaagactctccaaaccaggtatggtggctcatgcctgtaatcccagaactttggcaggctgaggcgggcggatcacctgaggtcaggagttcaagaccagcctggccaacatggcgaaaccgcatctctactaaaaatacaaaaataataatacaaaaattagctgggcatggtggcatgagcctgtaattttttttttttttttttttttttttttttttttttggatacataactggtatattcatgcagtgaaataccatacggtaatggaaactaaccacagctccacataaaaatatgtatgaacaaggtaaaaagccatggtgagattgtaccccagtcccatggctatgaaatcccatcactgatgtctcttgcttctccaaattcctgcatggttgtagctacctctgtgatcagtcaggcaatgcagtgtttcttaaatacctggggagcagccctgatgtgaataccaggtgcagccaggaggggccaggggttgcctggctgttggagaggagcccagtgagttaagaaaactttactgcccgggggagcccgacttgatgtgaaagggcctaaggagccggggtgagctctagggctggggtggcaggaagcagcaccatctagttggagggaatcaggccccctccaggaggcagatgacagccctttcagttgcacacgctctgcccagcaggctgcccctggtgccttccaagtactctatgacggtgatggtgttcctcatgatgctcagcttctactacttctcccgccacgtagaaaaactggcacggacacttttcttgtggaagattgaggtccacgaccagaaggaacgtgtctatgagatgcgacgctggaacgaggccttggtcaccaacatgttgcctgagcacgtggcacgccatttcctggggtccaagaagagagatgaggagctgtatagccagacgtatgatgagattggagtcatgtttgcctccctgcccaactttgctgacttctacacagaggagagcatcaacaatggtggtattgagtgtctgcgtttcctcaatgaaatcatctcagattttgactctctcctggacaatcccaagttccgggtgatcaccaagatcaaaaccattggcagcacgtatatggcggcttcaggagtcacccccgatgtcaacaccaatggctttgccagctccaacaaggaagacaagtccgagagagagcgctggcagcacctggctgacctggccgacttcgcgctggccatgaaggatacgctcaccaacatcaacaaccagtccttcaataacttcatgctgcgcataggcatgaacaaaggcggggttctggctggggtcatcggagcccggaaaccacactacgacatctggggcaatacagtcaatgtagccagcaggatggagtccacgggggtcatgggcaacattcaggtggtagaagaaacccaagtcatcctccgagagtacggcttccgctttgtgaggcgaggccccatctttgtgaaggggaagggggagctgctgaccttcttcttgaaggggcgggataagctagccaccttccccaatggcccctctgtcacactgccccaccaggtggtggacaactcctgaatggcctcgagcctgcaacagtccaaaccggaagggagaatttattttttgaaactgaaggaagtcccgaccttcctggattgaagtgcacactcatggactttaggtttagaaacctcctcagccttcatttgttcgtggatgtgtgagctctgagggtggccctgctattcctctgtgtgcctgtagtgtccccagcataggggtcttaggcatagggctgaacagtccttccagagccctcgttccaatccctgccgtccttgcccctgaggggccctgaccactgtgagcaggagggtggcagagctgggacaaagctgcctttgccgctgggctttccgggactgtggagggagcacaggcggggaagctccacttcagacagggcttggtggggcaggacatggctcccattttgaagggaggtctccatgtggtccgagtgaggtgagacggccctcgtcctggtgttcctgatcatcttgaaaggttcttctggaactcctgtccccttagtcatgagaacagaaagtgcaatatttcctttcacctggcaggggaggggggatttatttctgaaagaaaaatatataaacagatcttctacatttatatttttaatcttctgttaaatacactttccgatattgccttgccttttgagctcttgctacagtcgcctttgctactgctttaagagaatttacaggtattgataaagaacaagactgttttattaaaagctttattcaacttgaaa

SEQ ID NO: 423603 - DNA, 1928 bp, Homo sapiens
tggagctcggtacctggtttgcttccgggtgatcaccaagatcaaaaccattggcagcacgtatatggcggcttcaggagtcacccccgatgtcaacaccaatggctttgccagctccaacaaggaagacaagtccgagagagagcgctggcagcacctggctgacctggccgacttcgcgctggccatgaaggatacgctcaccaacatcaacaaccagtccttcaataacttcatgctgcgcataggcatgaacaaaggcggggttctggctggggtcatcggagcccggaaaccacactacgacatctggggcaatacagtcaatgtagccagcaggatggagtccacgggggtcatgggcaacattcaggtatgtccagtggcacagctggcacgtgctcagactcggcatgagaacaaaaccggaacagtgctttcccacgtgcccctgcctcccaccctggccctgaacagtaagtccagaggcagagacgtggggcaagtggaaaagaatctctgcaatagctagcctcagcacaggaagaaacacttccacccatccacaaaatctgggctgaagttctagatgcatatggcctacctttgggtatgaaccttctaataccttgtgatctgtctcagtggcgtctggcagaaaagctccacgaaaggggcaaagggacagaagagcaggcagtggcagtttccaggtaacagtgctgccacccaggtgaccatggccatcctaggagagaagtctctggatgagaggaggcccccagccagtcactccagggttctccttcccacccgctgctcgccacgggtggaagggcttggccctgggaggtttggggagtgtcccgtactgcttgggacccatggatcagtgctcggctccaaccacccaaagcccccacccgccctcagtctaggctccccccgtaacgccacgttcttgctccccctccctctccaggtggtagaagaaacccaagtcatcctccgagagtacggcttccgctttgtgaggcgaggccccatctttgtgaaggggaagggggagctgctgaccttcttcttgaaggggcgggataagctagccaccttccccaatggcccctctgtcacactgccccaccaggtggtggacaactcctgaatggcctcgagcctgcaacagtccaaaccggaagggagaatttattttttgaaactgaaggaagtcccgaccttcctggattgaagtgcacactcatggactttaggtttagaaacctcctcagccttcatttgttcgtggatgtgtgagctctgagggtggccctgctattcctctgtgtgcctgtagtgtccccagcataggggtcttaggcatagggctgaacagtccttccagagccctcgttccaatccctgccgtccttgcccctgaggggccctgaccactgtgagcaggagggtggcagagctgggacaaagctgcctttgccgctgggctttccgggactgtggagggagcacaggcggggaagctccacttcagacagggcttggtggggcaggacatggctcccattttgaagggaggtctccatgtggtccgagtgaggtgagacggccctcgtcctggtgttcctgatcatcttgaaaggttcttctggaactcctgtccccttagtcatgagaacagaaagtgcaatatttcctttcacctggcaggggaggggggatttatttctgaaagaaaaatatataaacagatcttctacatttatatttttaatcttctgttaaatacactttccgatattgccttgccttttgagctcttgctacagtcgcctttgctactgctttaagagaatttacaggtattgataaagaacaagactgttttattaaaagctttattcaacttgaaa

SEQ ID NO: 423604 - DNA, 3789 bp, Homo sapiens
cgggcctgacggcgggagatcgcgctccggccgggccccgaggcgctgccggggcggcgcggctctgcggggagcagccctcgggcgcgccgagctctcccgccccagcccgcgcggtgaccgtcccggagcacgcggtggccgagttcccgcacagttctagctgatcagtgctacctgtgctctggaaacccgctctgcgttcctgctggaggtggcctcccctccgccccagacaagaagaggccctcagccctcccccggtctcagagagccctgagaggaggcccagtccagagctcttcctccgttcccagtccacttctctagggccagtagcagacaccagccagtatgccgaggaaccagggcttctccgagcccgaatactcggccgagtactcagccgagtactccgtcagcctgccctccgaccctgaccgcggggtgggccggacccatgaaatctcggtccggaactcgggctcctgcctgtgcctgcctcgcttcatgcggctgactttcgtgccggagtccttggagaacctctaccagacctacttcaaaaggcagcgccacgagaccctgctggtgctggtggtcttctccagcgacaagctggctcccctcgccgtggctggaattggactggtgttggacatcatcctcttcgtgctctgcaaaaaggggctgctcccggaccgggtcacccgcagagtgctgccctacgtgctgtggctgctcataaccgcccagatcttctcctacctgggcctgaacttcgcgcgtgcccacgcggctagtgacacggtgggctggcaggtcttctttgtcttctccttcttcatcacgctgcccctcagcctcagccccatcgtgatcatctccgtggtctcctgtgtggtgcacacgttggtcctgggggtcaccgtggcccagcagcagcaggaggagctcaaggggatgcagctgctgcgggagatcctggccaacgtcttcctctacctgtgcgccatcgctgtgggcatcatgtcctactacatggctgaccgcaagcaccgcaaggccttcctggaggcccgccagtcgctggaggtgaagatgaacctggaagagcagagccagcagcaggagaacctcatgctttccatcctgcccaagcacgtggctgacgagatgctgaaagacatgaagaaagacgagagccagaaggaccagcagcagttcaacaccatgtacatgtaccgtcacgagaacgtcagcatcctctttgccgacatcgtgggctttacccagctgtcttctgcctgcagtgcccaggagcttgtgaagctgctcaacgagctctttgcccgctttgacaagctggcagctaaataccaccagctgcggattaagatcctgggcgactgctactactgcatctgcggcttgcctgactaccgggaggaccacgccgtctgctccatcctcatggggctggccatggtggaggccatctcgtatgtgcgggagaagaccaagactggggtggacatgcgtgtgggggtgcacacgggcaccgtgctggggggcgtcctgggccagaagcgctggcagtacgacgtgtggtcgactgatgtcactgtagccaacaagatggaggccggcggcatccctgggcgcgtgcacatctcccagagcaccatggactgcctgaaaggggagtttgatgtggagccaggcgatgggggcagccgctgtgattacctagaagagaagggtattgaaacctacctcatcattgcctccaagccagaggtgaagaaaacagccacccagaatggcctcaatggctcggccctgcccaatggagcaccagcttcctcaaagtccagctcccctgccctcattgagaccaaggagcccaacgggagtgcccacagcagtgggtccacgtcggagaagcccgaggagcaggatgcccaggccgacaacccctcattccccaacccacgccggaggctgcgcctgcaggacctggctgaccgagtggtggatgcctctgaagatgagcacgagctcaaccagctgctcaacgaggccctgcttgagcgagagtccgcccaagtagtaaagaagagaaacaccttcctcttgtccatgcggttcatggaccccgagatggaaacccgctactcggtggagaaggagaagcagagtggggctgccttcagctgctcctgcgtcgtcctgctctgcacggccctggtcgagatactcatcgacccctggctaatgacaaactatgtgaccttcatggtgggggagattctgctcctcatcctgaccatctgctccctggctgccatctttccccgggcctttcctaagaagcttgtggccttctcaacttggattgaccggacccgctgggccaggaacacctgggccatgctcgccatcttcatcctggtgatggcaaatgtcgtggacatgctcagctgtctccagtactacacgggacccagcaatgcaacggcagggatggagacggagggcagctgcctggagaaccccaagtattacaactatgtggccgtgctgtccctcatcgccaccatcatgctggtgcaggtcagccacatggtgaagctcacgctcatgctgctcgtcgcaggcgccgtggccaccatcaacctctatgcctggcgtcccgtctttgatgaatacgaccacaagcgttttcgggagcacgacttacctatggtggccttagagcagatgcaaggattcaaccctgggctcaatggcactgacaggctgcccctggtgccttccaagtactctatgacggtgatggtgttcctcatgatgctcagcttctactacttctcccgccacgtagaaaaactggcacggacacttttcttgtggaagattgaggtccacgaccagaaggaacgtgtctatgagatgcgacgctggaacgaggccttggtcaccaacatgttgcctgagcacgtggcacgccatttcctggggtccaagaagagagatgaggagctgtatagccagacgtatgatgagattggagtcatgtttgcctccctgcccaactttgctgacttctacacagaggagagcatcaacaatggtggtattgagtgtctgcgtttcctcaatgaaatcatctcagattttgactctctcctggacaatcccaagttccgggtgatcaccaagatcaaaaccattggcagcacgtatatggcggcttcaggagtcacccccgatgtcaacaccaatggctttgccagctccaacaaggtagctaaccccagtagccagagagatgaggctctgcccccaaggcaagagattggcagcccagacctagcatgggggaaataagaactgctgtgcaaagtggtcccagacacacaccaccagcaccacgtaaatataaataagaaatagggtttattgagaaagttcggcaagcagagaaacagaacagacacacaaccccctgctgttcacagctcaggcctaagatggttgtgttctgtggccaggccccctaaggctctgtgctttcataggaactggagagcaattgtcaacaagggaaactgaaagcatggccttcagaactctggctgacggcagcctgttcttttgttaagctaatttagacctttgttcagctaccaggagagaaaattaggtgtaggagccctggtcccaagctctggtcttaaaacaccatcatcctgctttacctctacaaccatcccacggccctat

SEQ ID NO: 423605 - DNA, 3818 bp, Homo sapiens
cgggcctgacggcgggagatcgcgctccggccgggccccgaggcgctgccggggcggcgcggctctgcggggagcagccctcgggcgcgccgagctctcccgccccagcccgcgcggtgaccgtcccggagcacgcggtggccgagttcccgcacagttctagctgatcagtgctacctgtgctctggaaacccgctctgcgttcctgctggaggtggcctcccctccgccccagacaagaagaggccctcagccctcccccggtctcagagagccctgagaggaggcccagtccagagctcttcctccgttcccagtccacttctctagggccagtagcagacaccagccagtatgccgaggaaccagggcttctccgagcccgaatactcggccgagtactcagccgagtactccgtcagcctgccctccgaccctgaccgcggggtgggccggacccatgaaatctcggtccggaactcgggctcctgcctgtgcctgcctcgcttcatgcggctgactttcgtgccggagtccttggagaacctctaccagacctacttcaaaaggcagcgccacgagaccctgctggtgctggtggtcttctccagcgacaagctggctcccctcgccgtggctggaattggactggtgttggacatcatcctcttcgtgctctgcaaaaaggggctgctcccggaccgggtcacccgcagagtgctgccctacgtgctgtggctgctcataaccgcccagatcttctcctacctgggcctgaacttcgcgcgtgcccacgcggctagtgacacggtgggctggcaggtcttctttgtcttctccttcttcatcacgctgcccctcagcctcagccccatcgtgatcatctccgtggtctcctgtgtggtgcacacgttggtcctgggggtcaccgtggcccagcagcagcaggaggagctcaaggggatgcagctgctgcgggagatcctggccaacgtcttcctctacctgtgcgccatcgctgtgggcatcatgtcctactacatggctgaccgcaagcaccgcaaggccttcctggaggcccgccagtcgctggaggtgaagatgaacctggaagagcagagccagcagcaggagaacctcatgctttccatcctgcccaagcacgtggctgacgagatgctgaaagacatgaagaaagacgagagccagaaggaccagcagcagttcaacaccatgtacatgtaccgtcacgagaacgtcagcatcctctttgccgacatcgtgggctttacccagctgtcttctgcctgcagtgcccaggagcttgtgaagctgctcaacgagctctttgcccgctttgacaagctggcagctaaataccaccagctgcggattaagatcctgggcgactgctactactgcatctgcggcttgcctgactaccgggaggaccacgccgtctgctccatcctcatggggctggccatggtggaggccatctcgtatgtgcgggagaagaccaagactggggtggacatgcgtgtgggggtgcacacgggcaccgtgctggggggcgtcctgggccagaagcgctggcagtacgacgtgtggtcgactgatgtcactgtagccaacaagatggaggccggcggcatccctgggcgcgtgcacatctcccagagcaccatggactgcctgaaaggggagtttgatgtggagccaggcgatgggggcagccgctgtgattacctagaagagaagggtattgaaacctacctcatcattgcctccaagccagaggtgaagaaaacagccacccagaatggcctcaatggctcggccctgcccaatggagcaccagcttcctcaaagtccagctcccctgccctcattgagaccaaggagcccaacgggagtgcccacagcagtgggtccacgtcggagaagcccgaggagcaggatgcccaggccgacaacccctcattccccaacccacgccggaggctgcgcctgcaggacctggctgaccgagtggtggatgcctctgaagatgagcacgagctcaaccagctgctcaacgaggccctgcttgagcgagagtccgcccaagtagtaaagaagagaaacaccttcctcttgtccatgcggttcatggaccccgagatggaaacccgctactcggtggagaaggagaagcagagtggggctgccttcagctgctcctgcgtcgtcctgctctgcacggccctggtcgagatactcatcgacccctggctaatgacaaactatgtgaccttcatggtgggggagattctgctcctcatcctgaccatctgctccctggctgccatctttccccgggcctttcctaagaagcttgtggccttctcaacttggattgaccggacccgctgggccaggaacacctgggccatgctcgccatcttcatcctggtgatggcaaatgtcgtggacatgctcagctgtctccagtactacacgggacccagcaatgcaacggcagggatggagacggagggcagctgcctggagaaccccaagtattacaactatgtggccgtgctgtccctcatcgccaccatcatgctggtgcaggtcagccacatggtgaagctcacgctcatgctgctcgtcgcaggcgccgtggccaccatcaacctctatgcctggcgtcccgtctttgatgaatacgaccacaagcgttttcgggagcacgacttacctatggtggccttagagcagatgcaaggattcaaccctgggctcaatggcactgacaggctgcccctggtgccttccaagtactctatgacggtgatggtgttcctcatgatgctcagcttctactacttctcccgccacgtagaaaaactggcacggacacttttcttgtggaagattgaggtccacgaccagaaggaacgtgtctatgagatgcgacgctggaacgaggccttggtcaccaacatgttgcctgagcacgtggcacgccatttcctggggtccaagaagagagatgaggagctgtatagccagacgtatgatgagattggagtcatgtttgcctccctgcccaactttgctgacttctacacagaggagagcatcaacaatggtggtattgagtgtctgcgtttcctcaatgaaatcatctcagattttgactctctcctggacaatcccaagttccgggtgatcaccaagatcaaaaccattggcagcacgtatatggcggcttcaggagtcacccccgatgtcaacaccaatggctttgccagctccaacaaggaagacaagtccgagagagagcgctggcagcacctggctgacctggccgacttcgcgctggccatgaaggatacgctcaccaacatcaacaaccagtccttcaataacttcatgctgcgcataggtgagcacaccccagctggcctgccccgcagcaggctcccttcccatgcaggggcctggcccaccaccaggagagacatgaggctcaggacaactgaggcaattcgggtggggaggttcacgcactcacagggcaaggagacctgaaagacctttagtccagacgactctagatgactaaaccaaaaacccagctgatgtgatgatccgactatactgtgcctactgttacaatagaagcttggcctgcctggctgagaagtgagtttgtgatccatttccagaggggttgctgtgcctgctgaggacatggcttcccagacaggcctgctctttgaaaggagttaagatcacctgctgcttctactgagggggtatcattcctg

SEQ ID NO: 423606 - DNA, 2985 bp, Homo sapiens
cgggcctgacggcgggagatcgcgctccggccgggccccgaggcgctgccggggcggcgcggctctgcggggagcagccctcgggcgcgccgagctctcccgccccagcccgcgcggtgaccgtcccggagcacgcggtggccgagttcccgcacagttctagctgatcagtgctacctgtgctctggaaacccgctctgcgttcctgctggaggtggcctcccctccgccccagacaagaagaggccctcagccctcccccggtctcagagagccctgagaggaggcccagtccagagctcttcctccgttcccagtccacttctctagggccagtagcagacaccagccagtatgccgaggaaccagggcttctccgagcccgaatactcggccgagtactcagccgagtactccgtcagcctgccctccgaccctgaccgcggggtgggccggacccatgaaatctcggtccggaactcgggctcctgcctgtgcctgcctcgcttcatgcggctgactttcgtgccggagtccttggagaacctctaccagacctacttcaaaaggcagcgccacgagaccctgctggtgctggtggtcttctccagcgacaagctggctcccctcgccgtggctggaattggactggtgttggacatcatcctcttcgtgctctgcaaaaaggggctgctcccggaccgggtcacccgcagagtgctgccctacgtgctgtggctgctcataaccgcccagatcttctcctacctgggcctgaacttcgcgcgtgcccacgcggctagtgacacggtgggctggcaggtcttctttgtcttctccttcttcatcacgctgcccctcagcctcagccccatcgtgatcatctccgtggtctcctgtgtggtgcacacgttggtcctgggggtcaccgtggcccagcagcagcaggaggagctcaaggggatgcagctgctgcgggagatcctggccaacgtcttcctctacctgtgcgccatcgctgtgggcatcatgtcctactacatggctgaccgcaagcaccgcaaggccttcctggaggcccgccagtcgctggaggtgaagatgaacctggaagagcagagccagcagcaggagaacctcatgctttccatcctgcccaagcacgtggctgacgagatgctgaaagacatgaagaaagacgagagccagaaggaccagcagcagttcaacaccatgtacatgtaccgtcacgagaacgtcagcatcctctttgccgacatcgtgggctttacccagctgtcttctgcctgcagtgcccaggagcttgtgaagctgctcaacgagctctttgcccgctttgacaagctggcagctaaataccaccagctgcggattaagatcctgggcgactgctactactgcatctgcggcttgcctgactaccgggaggaccacgccgtctgctccatcctcatggggctggccatggtggaggccatctcgtatgtgcgggagaagaccaagactggggtggacatgcgtgtgggggtgcacacgggcaccgtgctggggggcgtcctgggccagaagcgctggcagtacgacgtgtggtcgactgatgtcactgtagccaacaagatggaggccggcggcatccctgggcgcgtgcacatctcccagagcaccatggactgcctgaaaggggagtttgatgtggagccaggcgatgggggcagccgctgtgattacctagaagagaagggtattgaaacctacctcatcattgcctccaagccagaggtgaagaaaacagccacccagaatggcctcaatggctcggccctgcccaatggagcaccagcttcctcaaagtccagctcccctgccctcattgagaccaaggagcccaacgggagtgcccacagcagtgggtccacgtcggagaagcccgaggagcaggatgcccaggccgacaacccctcattccccaacccacgccggaggctgcgcctgcaggacctggctgaccgagtggtggatgcctctgaagatgagcacgagctcaaccagctgctcaacgaggccctgcttgagcgagagtccgcccaagtagtaaagaagagaaacaccttcctcttgtccatgcggttcatggaccccgagatggaaacccgctactcggtggagaaggagaagcagagtggggctgccttcagctgctcctgcgtcgtcctgctctgcacggccctggtcgagatactcatcgacccctggctaatgacaaactatgtgaccttcatggtgggggagattctgctcctcatcctgaccatctgctccctggctgccatctttccccgggcctttcctaagaagcttgtggccttctcaacttggattgaccggacccgctgggccaggaacacctgggccatgctcgccatcttcatcctggtgatggcaaatgtcgtggacatggtgagctcctgctgtccttgttgaagggacgcccctgttctcagtggagaagggcttctgtttgggtcacacaagcagtttctcagtccatccctccaccgtcatgtagctttggagtggctcttaggttcccaaacacatcatccccacctagtggaaggagtcttgtccctgtcatccagggagcctctgggatggacttgtttccttgaagctcctctcccagagtccgagagcacagttccatgtgcccaggcctgtgctaggtaccttatgtatgttgattcatttaatctgtgaaaaagtcctgagcagttgtaccagtatctgcagtttcatagggagaaactaactctcaaaaagggtaattggttgggcgcggtacgtcacgcctgtaatcccagcactttgggaggccaaggtgggcggatcacgaggtcaggagttcgaaaccagcctggccaacatggtgaaaccccatctgtactaaaaatacaaaaattagcc

SEQ ID NO: 423607 - DNA, 1781 bp, Homo sapiens
  misc_feature (20)..(20): n is a, c, g, or t
  misc_feature (29)..(29): n is a, c, g, or t
  misc_feature (124)..(124): n is a, c, g, or t
  misc_feature (255)..(255): n is a, c, g, or t
gttggaatcaacatatttcncagtgtccncagttaccagcatgcagatagtaaaatataatggtttcctgaagttatctcttaaaaaagattttagtccttcagctattcaaatagatatatancaattgcatatagaacgtagagaaaattttattaaaaaattaaaactatttaaaacctgatatatgaaaataggcaacagtgagaaaaaagcacttttgtgacaaatatttagctggtttgaaagacagancaaggaggaatcatttactcataaagaaggctcaaataagttaaaacatggatgtatttttaaaatgaccactctagtagtgaatttaaaagtcttttaagggttagagtaatctttttcattagtcttggctatttcctctagttctgacaagtacaggcaagaaaatggctactctcaagtaaggattattctgaaacacggtctggatttagaaaataaatgaacattagggaaatttccttaattaagactctccaaaccaggtatggtggctcatgcctgtaatcccagaactttggcaggctgaggcgggcggatcacctgaggtcaggagttcaagaccagcctggccaacatggcgaaaccgcatctctactaaaaatacaaaaataataatacaaaaattagctgggcatggtggcatgagcctgtaattttttttttttttttttttttttttttttttttttggatacataactggtatattcatgcagtgaaataccatacggtaatggaaactaaccacagctccacataaaaatatgtatgaacaaggtaaaaagccatggtgagattgtaccccagtcccatggctatgaaatcccatcactgatgtctcttgcttctccaaattcctgcatggttgtagctacctctgtgatcagtcaggcaatgcagtgtttcttaaatacctggggagcagccctgatgtgaataccaggtgcagccaggaggggccaggggttgcctggctgttggagaggagcccagtgagttaagaaaactttactgcccgggggagcccgacttgatgtgaaagggcctaaggagccggggtgagctctagggctggggtggcaggaagcagcaccatctagttggagggaatcaggccccctccaggaggcagatgacagccctttcagttgcacacgctctgcccagcaggctgcccctggtgccttccaagtactctatgacggtgatggtgttcctcatgatgctcagcttctactacttctcccgccacgtgagtgccgcctgcacgatccccgctctgtgcccacagcccacagggcctcctgagaagcagccctgggacctaagagcccaagctcctaaggaatggggcttcccttcacccagccccacacgtgagcctggtcaggccaccgccttctctattcaggctccttcctcagtcacacaggaagacagttcctcacctcttccgtccgaccccctccaggatggtgaaggaagcatgggagtgaaggtgggaggggatagagtgaaggcacaaacatcttgaatcaaatcaatatcccctaggccaggggctcatggcccccgcactccccgtggcgctgagggacattaacacaactgaccacagagccagaagagaaagagaagggagctgatggactttctgttgggttaaaaggaaaagagaaggccggtgcagtggctcattttgggaggctgagggtggaggatcacttgagtccaggagtctg

SEQ ID NO: 423608 - DNA, 805 bp, Homo sapiens
tgttgaggttgtggaaacaggcccagaaagttaggaagttctcccaggatcatgtggcagataagcggtagactaagtaacaactttgataggaaagtgtctcttgggtttagtggggtccttgtaaacaggtacatctgtcactgggttgggtcattcctctcccttgactgctgacaattctttcctgaatcctggcctcagctcctggacaatcccaagttccgggtgatcaccaagatcaaaaccattggcagcacgtatatggcggcttcaggagtcacccccgatgtcaacaccaatggctttgccagctccaacaaggtagctaaccccagtagccagagagatgaggctctgcccccaaggcaagagattggcagcccagacctagcatgggggaaataagaactgctgtgcaaagtggtcccagacacacaccaccagcaccacgtaaatataaataagaaatagggtttattgagaaagttcggcaagcagagaaacagaacagacacacaaccccctgctgttcacagctcaggcctaagatggttgtgttctgtggccaggccccctaaggctctgtgctttcataggaactggagagcaattgtcaacaagggaaactgaaagcatggccttcagaactctggctgacggcagcctgttcttttgttaagctaatttagacctttgttcagctaccaggagagaaaattaggtgtaggagccctggtcccaagctctggtcttaaaacaccatcatcctgctttacctctacaaccatcccacggccctatt

SEQ ID NO: 423609 - DNA, 4552 bp, Homo sapiens
cgggcctgacggcgggagatcgcgctccggccgggccccgaggcgctgccggggcggcgcggctctgcggggagcagccctcgggcgcgccgagctctcccgccccagcccgcgcggtgaccgtcccggagcacgcggtggccgagttcccgcacagttctagctgatcagtgctacctgtgctctggaaacccgctctgcgttcctgctggaggtggcctcccctccgccccagacaagaagaggccctcagccctcccccggtctcagagagccctgagaggaggcccagtccagagctcttcctccgttcccagtccacttctctagggccagtagcagacaccagccagtatgccgaggaaccagggcttctccgagcccgaatactcggccgagtactcagccgagtactccgtcagcctgccctccgaccctgaccgcggggtgggccggacccatgaaatctcggtccggaactcgggctcctgcctgtgcctgcctcgcttcatgcggctgactttcgtgccggagtccttggagaacctctaccagacctacttcaaaaggcagcgccacgagaccctgctggtgctggtggtctttgcagccctctttgactgctacgtggtggtcatgtgtgctgtggtcttctccagcgacaagctggctcccctcgccgtggctggaattggactggtgttggacatcatcctcttcgtgctctgcaaaaaggggctgctcccggaccgggtcacccgcagagtgctgccctacgtgctgtggctgctcataaccgcccagatcttctcctacctgggcctgaacttcgcgcgtgcccacgcggctagtgacacggtgggctggcaggtcttctttgtcttctccttcttcatcacgctgcccctcagcctcagccccatcgtgatcatctccgtggtctcctgtgtggtgcacacgttggtcctgggggtcaccgtggcccagcagcagcaggaggagctcaaggggatgcagctgctgcgggagatcctggccaacgtcttcctctacctgtgcgccatcgctgtgggcatcatgtcctactacatggctgaccgcaagcaccgcaaggccttcctggaggcccgccagtcgctggaggtgaagatgaacctggaagagcagagccagcagcaggagaacctcatgctttccatcctgcccaagcacgtggctgacgagatgctgaaagacatgaagaaagacgagagccagaaggaccagcagcagttcaacaccatgtacatgtaccgtcacgagaacgtcagcatcctctttgccgacatcgtgggctttacccagctgtcttctgcctgcagtgcccaggagcttgtgaagctgctcaacgagctctttgcccgctttgacaagctggcagctaaataccaccagctgcggattaagatcctgggcgactgctactactgcatctgcggcttgcctgactaccgggaggaccacgccgtctgctccatcctcatggggctggccatggtggaggccatctcgtatgtgcgggagaagaccaagactggggtggacatgcgtgtgggggtgcacacgggcaccgtgctggggggcgtcctgggccagaagcgctggcagtacgacgtgtggtcgactgatgtcactgtagccaacaagatggaggccggcggcatccctgggcgcgtgcacatctcccagagcaccatggactgcctgaaaggggagtttgatgtggagccaggcgatgggggcagccgctgtgattacctagaagagaagggtattgaaacctacctcatcattgcctccaagccagaggtgaagaaaacagccacccagaatggcctcaatggctcggccctgcccaatggagcaccagcttcctcaaagtccagctcccctgccctcattgagaccaaggagcccaacgggagtgcccacagcagtgggtccacgtcggagaagcccgaggagcaggatgcccaggccgacaacccctcattccccaacccacgccggaggctgcgcctgcaggacctggctgaccgagtggtggatgcctctgaagatgagcacgagctcaaccagctgctcaacgaggccctgcttgagcgagagtccgcccaagtagtaaagaagagaaacaccttcctcttgtccatgcggttcatggaccccgagatggaaacccgctactcggtggagaaggagaagcagagtggggctgccttcagctgctcctgcgtcgtcctgctctgcacggccctggtcgagatactcatcgacccctggctaatgacaaactatgtgaccttcatggtgggggagattctgctcctcatcctgaccatctgctccctggctgccatctttccccgggcctttcctaagaagcttgtggccttctcaacttggattgaccggacccgctgggccaggaacacctgggccatgctcgccatcttcatcctggtgatggcaaatgtcgtggacatgctcagctgtctccagtactacacgggacccagcaatgcaacggcagggatggagacggagggcagctgcctggagaaccccaagtattacaactatgtggccgtgctgtccctcatcgccaccatcatgctggtgcaggtcagccacatggtgaagctcacgctcatgctgctcgtcgcaggcgccgtggccaccatcaacctctatgcctggcgtcccgtctttgatgaatacgaccacaagcgttttcgggagcacgacttacctatggtggccttagagcagatgcaaggattcaaccctgggctcaatggcactgacaggctgcccctggtgccttccaagtactctatgacggtgatggtgttcctcatgatgctcagcttctactacttctcccgccacgtagaaaaactggcacggacacttttcttgtggaagattgaggtccacgaccagaaggaacgtgtctatgagatgcgacgctggaacgaggccttggtcaccaacatgttgcctgagcacgtggcacgccatttcctggggtccaagaagagagatgaggagctgtatagccagacgtatgatgagattggagtcatgtttgcctccctgcccaactttgctgacttctacacagaggagagcatcaacaatggtggtattgagtgtctgcgtttcctcaatgaaatcatctcagattttgactctctcctggacaatcccaagttccgggtgatcaccaagatcaaaaccattggcagcacgtatatggcggcttcaggagtcacccccgatgtcaacaccaatggctttgccagctccaacaaggaagacaagtccgagagagagcgctggcagcacctggctgacctggccgacttcgcgctggccatgaaggatacgctcaccaacatcaacaaccagtccttcaataacttcatgctgcgcataggcatgaacaaaggcggggttctggctggggtcatcggagcccggaaaccacactacgacatctggggcaatacagtcaatgtagccagcaggatggagtccacgggggtcatgggcaacattcaggtggtagaagaaacccaagtcatcctccgagagtacggcttccgctttgtgaggcgaggccccatctttgtgaaggggaagggggagctgctgaccttcttcttgaaggggcgggataagctagccaccttccccaatggcccctctgtcacactgccccaccaggtggtggacaactcctgaatggcctcgagcctgcaacagtccaaaccggaagggagaatttattttttgaaactgaaggaagtcccgaccttcctggattgaagtgcacactcatggactttaggtttagaaacctcctcagccttcatttgttcgtggatgtgtgagctctgagggtggccctgctattcctctgtgtgcctgtagtgtccccagcataggggtcttaggcatagggctgaacagtccttccagagccctcgttccaatccctgccgtccttgcccctgaggggccctgaccactgtgagcaggagggtggcagagctgggacaaagctgcctttgccgctgggctttccgggactgtggagggagcacaggcggggaagctccacttcagacagggcttggtggggcaggacatggctcccattttgaagggaggtctccatgtggtccgagtgaggtgagacggccctcgtcctggtgttcctgatcatcttgaaaggttcttctggaactcctgtccccttagtcatgagaacagaaagtgcaatatttcctttcacctggcaggggaggggggatttatttctgaaagaaaaatatataaacagatcttctacatttatatttttaatcttctgttaaatacactttccgatattgccttgccttttgagctcttgctacagtcgcctttgctactgctttaagagaatttacaggtattgataaagaacaagactgttttattaaaagctttattcaacttgaaa

SEQ ID NO: 423610 - DNA, 4391 bp, Homo sapiens
cgggcctgacggcgggagatcgcgctccggccgggccccgaggcgctgccggggcggcgcggctctgcggggagcagccctcgggcgcgccgagctctcccgccccagcccgcgcggtgaccgtcccggagcacgcggtggccgagttcccgcacagttctagctgatcagtgctacctgtgctctggaaacccgctctgcgttcctgctggaggtggcctcccctccgccccagacaagaagaggccctcagccctcccccggtctcagagagccctgagaggaggcccagtccagagctcttcctccgttcccagtccacttctctagggccagtagcagacaccagccagtatgccgaggaaccagggcttctccgagcccgaatactcggccgagtactcagccgagtactccgtcagcctgccctccgaccctgaccgcggggtgggccggacccatgaaatctcggtccggaactcgggctcctgcctgtgcctgcctcgcttcatgcggctgactttcgtgccggagtccttggagaacctctaccagacctacttcaaaaggcagcgccacgagaccctgctggtgctggtggtctttgcagccctctttgactgctacgtggtggtcatgtgtgctgtggtcttctccagcgacaagctggctcccctcgccgtggctggaattggactggtgttggacatcatcctcttcgtgctctgcaaaaaggggctgctcccggaccgggtcacccgcagagtgctgccctacgtgctgtggctgctcataaccgcccagatcttctcctacctgggcctgaacttcgcgcgtgcccacgcggctagtgacacggtgggctggcaggtcttctttgtcttctccttcttcatcacgctgcccctcagcctcagccccatcgtgatcatctccgtggtctcctgtgtggtgcacacgttggtcctgggggtcaccgtggcccagcagcagcaggaggagctcaaggggatgcagctgctgcgggagatcctggccaacgtcttcctctacctgtgcgccatcgctgtgggcatcatgtcctactacatggctgaccgcaagcaccgcaaggccttcctggaggcccgccagtcgctggaggtgaagatgaacctggaagagcagagccagcagcaggagaacctcatgctttccatcctgcccaagcacgtggctgacgagatgctgaaagacatgaagaaagacgagagccagaaggaccagcagcagttcaacaccatgtacatgtaccgtcacgagaacgtcagcatcctctttgccgacatcgtgggctttacccagctgtcttctgcctgcagtgcccaggagcttgtgaagctgctcaacgagctctttgcccgctttgacaagctggcagctaaataccaccagctgcggattaagatcctgggcgactgctactactgcatctgcggcttgcctgactaccgggaggaccacgccgtctgctccatcctcatggggctggccatggtggaggccatctcgtatgtgcgggagaagaccaagactggggtggacatgcgtgtgggggtgcacacgggcaccgtgctggggggcgtcctgggccagaagcgctggcagtacgacgtgtggtcgactgatgtcactgtagccaacaagatggaggccggcggcatccctgggcgcgtgcacatctcccagagcaccatggactgcctgaaaggggagtttgatgtggagccaggcgatgggggcagccgctgtgattacctagaagagaagggtattgaaacctacctcatcattgcctccaagccagaggtgaagaaaacagccacccagaatggcctcaatggctcggccctgcccaatggagcaccagcttcctcaaagtccagctcccctgccctcattgagaccaaggagcccaacgggagtgcccacagcagtgggtccacgtcggagaagcccgaggagcaggatgcccaggccgacaacccctcattccccaacccacgccggaggctgcgcctgcaggacctggctgaccgagtggtggatgcctctgaagatgagcacgagctcaaccagctgctcaacgaggccctgcttgagcgagagtccgcccaagtagtaaagaagagaaacaccttcctcttgtccatgcggttcatggaccccgagatggaaacccgctactcggtggagaaggagaagcagagtggggctgccttcagctgctcctgcgtcgtcctgctctgcacggccctggtcgagatactcatcgacccctggctaatgacaaactatgtgaccttcatggtgggggagattctgctcctcatcctgaccatctgctccctggctgccatctttccccgggcctttcctaagaagcttgtggccttctcaacttggattgaccggacccgctgggccaggaacacctgggccatgctcgccatcttcatcctggtgatggcaaatgtcgtggacatggctcatgctgctcgtcgcaggcgccgtggccaccatcaacctctatgcctggcgtcccgtctttgatgaatacgaccacaagcgttttcgggagcacgacttacctatggtggccttagagcagatgcaaggattcaaccctgggctcaatggcactgacaggctgcccctggtgccttccaagtactctatgacggtgatggtgttcctcatgatgctcagcttctactacttctcccgccacgtagaaaaactggcacggacacttttcttgtggaagattgaggtccacgaccagaaggaacgtgtctatgagatgcgacgctggaacgaggccttggtcaccaacatgttgcctgagcacgtggcacgccatttcctggggtccaagaagagagatgaggagctgtatagccagacgtatgatgagattggagtcatgtttgcctccctgcccaactttgctgacttctacacagaggagagcatcaacaatggtggtattgagtgtctgcgtttcctcaatgaaatcatctcagattttgactctctcctggacaatcccaagttccgggtgatcaccaagatcaaaaccattggcagcacgtatatggcggcttcaggagtcacccccgatgtcaacaccaatggctttgccagctccaacaaggaagacaagtccgagagagagcgctggcagcacctggctgacctggccgacttcgcgctggccatgaaggatacgctcaccaacatcaacaaccagtccttcaataacttcatgctgcgcataggcatgaacaaaggcggggttctggctggggtcatcggagcccggaaaccacactacgacatctggggcaatacagtcaatgtagccagcaggatggagtccacgggggtcatgggcaacattcaggtggtagaagaaacccaagtcatcctccgagagtacggcttccgctttgtgaggcgaggccccatctttgtgaaggggaagggggagctgctgaccttcttcttgaaggggcgggataagctagccaccttccccaatggcccctctgtcacactgccccaccaggtggtggacaactcctgaatggcctcgagcctgcaacagtccaaaccggaagggagaatttattttttgaaactgaaggaagtcccgaccttcctggattgaagtgcacactcatggactttaggtttagaaacctcctcagccttcatttgttcgtggatgtgtgagctctgagggtggccctgctattcctctgtgtgcctgtagtgtccccagcataggggtcttaggcatagggctgaacagtccttccagagccctcgttccaatccctgccgtccttgcccctgaggggccctgaccactgtgagcaggagggtggcagagctgggacaaagctgcctttgccgctgggctttccgggactgtggagggagcacaggcggggaagctccacttcagacagggcttggtggggcaggacatggctcccattttgaagggaggtctccatgtggtccgagtgaggtgagacggccctcgtcctggtgttcctgatcatcttgaaaggttcttctggaactcctgtccccttagtcatgagaacagaaagtgcaatatttcctttcacctggcaggggaggggggatttatttctgaaagaaaaatatataaacagatcttctacatttatatttttaatcttctgttaaatacactttccgatattgccttgccttttgagctcttgctacagtcgcctttgctactgctttaagagaatttacaggtattgataaagaacaagactgttttattaaaagctttattcaacttgaaa

SEQ ID NO: 423611 - DNA, 4572 bp, Homo sapiens
cgggcctgacggcgggagatcgcgctccggccgggccccgaggcgctgccggggcggcgcggctctgcggggagcagccctcgggcgcgccgagctctcccgccccagcccgcgcggtgaccgtcccggagcacgcggtggccgagttcccgcacagttctagctgatcagtgctacctgtgctctggaaacccgctctgcgttcctgctggaggtggcctcccctccgccccagacaagaagaggccctcagccctcccccggtctcagagagccctgagaggaggcccagtccagagctcttcctccgttcccagtccacttctctagggccagtagcagacaccagccagtatgccgaggaaccagggcttctccgagcccgaatactcggccgagtactcagccgagtactccgtcagcctgccctccgaccctgaccgcggggtgggccggacccatgaaatctcggtccggaactcgggctcctgcctgtgcctgcctcgcttcatgcggctgactttcgtgccggagtccttggagaacctctaccagacctacttcaaaaggcagcgccacgagaccctgctggtgctggtggtcttctccagcgacaagctggctcccctcgccgtggctggaattggactggtgttggacatcatcctcttcgtgctctgcaaaaaggggctgctcccggaccgggtcacccgcagagtgctgccctacgtgctgtggctgctcataaccgcccagatcttctcctacctgggcctgaacttcgcgcgtgcccacgcggctagtgacacggtgggctggcaggtcttctttgtcttctccttcttcatcacgctgcccctcagcctcagccccatcgtgatcatctccgtggtctcctgtgtggtgcacacgttggtcctgggggtcaccgtggcccagcagcagcaggaggagctcaaggggatgcagctgctgcgggagatcctggccaacgtcttcctctacctgtgcgccatcgctgtgggcatcatgtcctactacatggctgaccgcaagcaccgcaaggccttcctggaggcccgccagtcgctggaggtgaagatgaacctggaagagcagagccagcagcaggagaacctcatgctttccatcctgcccaagcacgtggctgacgagatgctgaaagacatgaagaaagacgagagccagaaggaccagcagcagttcaacaccatgtacatgtaccgtcacgagaacgtcagcatcctctttgccgacatcgtgggctttacccagctgtcttctgcctgcagtgcccaggagcttgtgaagctgctcaacgagctctttgcccgctttgacaagctggcagctaaataccaccagctgcggattaagatcctgggcgactgctactactgcatctgcggcttgcctgactaccgggaggaccacgccgtctgctccatcctcatggggctggccatggtggaggccatctcgtatgtgcgggagaagaccaagactggggtggacatgcgtgtgggggtgcacacgggcaccgtgctggggggcgtcctgggccagaagcgctggcagtacgacgtgtggtcgactgatgtcactgtagccaacaagatggaggccggcggcatccctgggcgcgtgcacatctcccagagcaccatggactgcctgaaaggggagtttgatgtggagccaggcgatgggggcagccgctgtgattacctagaagagaagggtattgaaacctacctcatcattgcctccaagccagaggtgaagaaaacagccacccagaatggcctcaatggctcggccctgcccaatggagcaccagcttcctcaaagtccagctcccctgccctcattgagaccaaggagcccaacgggagtgcccacagcagtgggtccacgtcggagaagcccgaggagcaggatgcccaggccgacaacccctcattccccaacccacgccggaggctgcgcctgcaggacctggctgaccgagtggtggatgcctctgaagatgagcacgagctcaaccagctgctcaacgaggccctgcttgagcgagagtccgcccaagtagtaaagaagagaaacaccttcctcttgtccatgcggttcatggaccccgagatggaaacccgctactcggtggagaaggagaagcagagtggggctgccttcagctgctcctgcgtcgtcctgctctgcacggccctggtcgagatactcatcgacccctggctaatgacaaactatgtgaccttcatggtgggggagattctgctcctcatcctgaccatctgctccctggctgccatctttccccgggcctttcctaagaagcttgtggccttctcaacttggattgaccggacccgctgggccaggaacacctgggccatgctcgccatcttcatcctggtgatggcaaatgtcgtggacatgctcagctgtctccagtactacacgggacccagcaatgcaacggcagggatggagacggagggcagctgcctggagaaccccaagtattacaactatgtggccgtgctgtccctcatcgccaccatcatgctggtgcaggtcagccacatggtgaagctcacgctcatgctgctcgtcgcaggcgccgtggccaccatcaacctctatgcctggcgtcccgtctttgatgaatacgaccacaagcgttttcgggagcacgacttacctatggtggccttagagcagatgcaaggattcaaccctgggctcaatggcactgacaggctgcccctggtgccttccaagtactctatgacggtgatggtgttcctcatgatgctcagcttctactacttctcccgccacgtagaaaaactggcacggacacttttcttgtggaagattgaggtccacgaccagaaggaacgtgtctatgagatgcgacgctggaacgaggccttggtcaccaacatgttgcctgagcacgtggcacgccatttcctggggtccaagaagagagatgaggagctgtatagccagacgtatgatgagattggagtcatgtttgcctccctgcccaactttgctgacttctacacagaggagagcatcaacaatggtggtattgagtgtctgcgtttcctcaatgaaatcatctcagattttgactctctcctggacaatcccaagttccgggtgatcaccaagatcaaaaccattggcagcacgtatatggcggcttcaggagtcacccccgatgtcaacaccaatggctttgccagctccaacaaggaagacaagtccgagagagagcgctggcagcacctggctgacctggccgacttcgcgctggccatgaaggatacgctcaccaacatcaacaaccagtccttcaataacttcatgctgcgcataggcatgaacaaaggcggggttctggctggggtcatcggagcccggaaaccacactacgacatctggggcaatacagtcaatgtagccagcaggatggagtccacgggggtcatgggcaacattcagtggcgtctggcagaaaagctccacgaaaggggcaaagggacagaagagcaggcagtggcagtttccaggtggtagaagaaacccaagtcatcctccgagagtacggcttccgctttgtgaggcgaggccccatctttgtgaaggggaagggggagctgctgaccttcttcttgaaggggcgggataagctagccaccttccccaatggcccctctgtcacactgccccaccaggtggtggacaactcctgaatggcctcgagcctgcaacagtccaaaccggaagggagaatttattttttgaaactgaaggaagtcccgaccttcctggattgaagtgcacactcatggactttaggtttagaaacctcctcagccttcatttgttcgtggatgtgtgagctctgagggtggccctgctattcctctgtgtgcctgtagtgtccccagcataggggtcttaggcatagggctgaacagtccttccagagccctcgttccaatccctgccgtccttgcccctgaggggccctgaccactgtgagcaggagggtggcagagctgggacaaagctgcctttgccgctgggctttccgggactgtggagggagcacaggcggggaagctccacttcagacagggcttggtggggcaggacatggctcccattttgaagggaggtctccatgtggtccgagtgaggtgagacggccctcgtcctggtgttcctgatcatcttgaaaggttcttctggaactcctgtccccttagtcatgagaacagaaagtgcaatatttcctttcacctggcaggggaggggggatttatttctgaaagaaaaatatataaacagatcttctacatttatatttttaatcttctgttaaatacactttccgatattgccttgccttttgagctcttgctacagtcgcctttgctactgctttaagagaatttacaggtattgataaagaacaagactgttttattaaaagctttattcaacttgaaa

SEQ ID NO: 423612 - DNA, 2238 bp, Homo sapiens
tttgagacagagtctggctcttttgcccaggctggactgcagttactaactttcatatgattagtccctggtaaatttccccatctttcccggtatttctgggggagccgcgggaggtggcagctgagcgtgcactaccatgcacagccctctgtgaccagcacctgctgttctcttgaacgtgtgtccctgcccgccgtcctggcctccagctcagctgtctccagtactacacgggacccagcaatgcaacggcagggatggagacggagggcagctgcctggagaaccccaagtattacaactatgtggccgtgctgtccctcatcgccaccatcatgctggtgcaggtcagccacatggtgaagctcacgctcatgctgctcgtcgcaggcgccgtggccaccatcaacctctatgcctggcgtcccgtctttgatgaatacgaccacaagcgttttcgggagcacgacttacctatggtggccttagagcagatgcaaggattcaaccctgggctcaatggcactgacaggctgcccctggtgccttccaagtactctatgacggtgatggtgttcctcatgatgctcagcttctactacttctcccgccacgtagaaaaactggcacggacacttttcttgtggaagattgaggtccacgaccagaaggaacgtgtctatgagatgcgacgctggaacgaggccttggtcaccaacatgttgcctgagcacgtggcacgccatttcctggggtccaagaagagagatgaggagctgtatagccagacgtatgatgagattggagtcatgtttgcctccctgcccaactttgctgacttctacacagaggagagcatcaacaatggtggtattgagtgtctgcgtttcctcaatgaaatcatctcagattttgactctctcctggacaatcccaagttccgggtgatcaccaagatcaaaaccattggcagcacgtatatggcggcttcaggagtcacccccgatgtcaacaccaatggctttgccagctccaacaaggaagacaagtccgagagagagcgctggcagcacctggctgacctggccgacttcgcgctggccatgaaggatacgctcaccaacatcaacaaccagtccttcaataacttcatgctgcgcataggcatgaacaaaggcggggttctggctggggtcatcggagcccggaaaccacactacgacatctggggcaatacagtcaatgtagccagcaggatggagtccacgggggtcatgggcaacattcaggtggtagaagaaacccaagtcatcctccgagagtacggcttccgctttgtgaggcgaggccccatctttgtgaaggggaagggggagctgctgaccttcttcttgaaggggcgggataagctagccaccttccccaatggcccctctgtcacactgccccaccaggtggtggacaactcctgaatggcctcgagcctgcaacagtccaaaccggaagggagaatttattttttgaaactgaaggaagtcccgaccttcctggattgaagtgcacactcatggactttaggtttagaaacctcctcagccttcatttgttcgtggatgtgtgagctctgagggtggccctgctattcctctgtgtgcctgtagtgtccccagcataggggtcttaggcatagggctgaacagtccttccagagccctcgttccaatccctgccgtccttgcccctgaggggccctgaccactgtgagcaggagggtggcagagctgggacaaagctgcctttgccgctgggctttccgggactgtggagggagcacaggcggggaagctccacttcagacagggcttggtggggcaggacatggctcccattttgaagggaggtctccatgtggtccgagtgaggtgagacggccctcgtcctggtgttcctgatcatcttgaaaggttcttctggaactcctgtccccttagtcatgagaacagaaagtgcaatatttcctttcacctggcaggggaggggggatttatttctgaaagaaaaatatataaacagatcttctacatttatatttttaatcttctgttaaatacactttccgatattgccttgccttttgagctcttgctacagtcgcctttgctactgctttaagagaatttacaggtattgataaagaacaagactgttttattaaaagctttattcaacttgaaa

SEQ ID NO: 423613 - DNA, 1684 bp, Homo sapiens
tgaggatcccctagctattacagtgtcctcattatgctcagcttctactacttctcccgccacgtagaaaaactggcacggacacttttcttgtggaagattgaggtccacgaccagaaggaacgtgtctatgagatgcgacgctggaacgaggccttggtcaccaacatgttgcctgagcacgtggcacgccatttcctggggtccaagaagagagatgaggagctgtatagccagacgtatgatgagattggagtcatgtttgcctccctgcccaactttgctgacttctacacagaggagagcatcaacaatggtggtattgagtgtctgcgtttcctcaatgaaatcatctcagattttgactctctcctggacaatcccaagttccgggtgatcaccaagatcaaaaccattggcagcacgtatatggcggcttcaggagtcacccccgatgtcaacaccaatggctttgccagctccaacaaggaagacaagtccgagagagagcgctggcagcacctggctgacctggccgacttcgcgctggccatgaaggatacgctcaccaacatcaacaaccagtccttcaataacttcatgctgcgcataggcatgaacaaaggcggggttctggctggggtcatcggagcccggaaaccacactacgacatctggggcaatacagtcaatgtagccagcaggatggagtccacgggggtcatgggcaacattcaggtggtagaagaaacccaagtcatcctccgagagtacggcttccgctttgtgaggcgaggccccatctttgtgaaggggaagggggagctgctgaccttcttcttgaaggggcgggataagctagccaccttccccaatggcccctctgtcacactgccccaccaggtggtggacaactcctgaatggcctcgagcctgcaacagtccaaaccggaagggagaatttattttttgaaactgaaggaagtcccgaccttcctggattgaagtgcacactcatggactttaggtttagaaacctcctcagccttcatttgttcgtggatgtgtgagctctgagggtggccctgctattcctctgtgtgcctgtagtgtccccagcataggggtcttaggcatagggctgaacagtccttccagagccctcgttccaatccctgccgtccttgcccctgaggggccctgaccactgtgagcaggagggtggcagagctgggacaaagctgcctttgccgctgggctttccgggactgtggagggagcacaggcggggaagctccacttcagacagggcttggtggggcaggacatggctcccattttgaagggaggtctccatgtggtccgagtgaggtgagacggccctcgtcctggtgttcctgatcatcttgaaaggttcttctggaactcctgtccccttagtcatgagaacagaaagtgcaatatttcctttcacctggcaggggaggggggatttatttctgaaagaaaaatatataaacagatcttctacatttatatttttaatcttctgttaaatacactttccgatattgccttgccttttgagctcttgctacagtcgcctttgctactgctttaagagaatttacaggtattgataaagaacaagactgttttattaaaagctttattcaacttgaaa

SEQ ID NO: 423614 - DNA, 638 bp, Homo sapiens
cagcgctgggcggcgagtcgggtagtatcgactgtgatgacggagacatatgaccggcgtacagcgacgtcgacataacgcaagcaagccgcgcagcccgctacgcattccgtttaccacctccaatccctgccgtccttgcccctgaggggccctgaccactgtgagcaggagggtggcagagctgggacaaagctgcctttgccgctgggctttccgggactgtggagggagcacaggcggggaagctccacttcagacagggcttggtggggcaggacatggctcccattttgaagggaggtctccatgtggtccgagtgaggtgagacggccctcgtcctggtgttcctgatcatcttgaaaggttcttctggaactcctgtccccttagtcatgagaacagaaagtgcaatatttcctttcacctggcaggggaggggggatttatttctgaaagaaaaatatataaacagatcttctacatttatatttttaatcttctgttaaatacactttccgatattgccttgccttttgagctcttgctacagtcgcctttgctactgctttaagagaatttacaggtattgataaagaacaagactgttttattaaaagctttattcaacttgaaa

SEQ ID NO: 423615 - DNA, 3373 bp, Homo sapiens
cgggcctgacggcgggagatcgcgctccggccgggccccgaggcgctgccggggcggcgcggctctgcggggagcagccctcgggcgcgccgagctctcccgccccagcccgcgcggtgaccgtcccggagcacgcggtggccgagttcccgcacagttctagctgatcagtgctacctgtgctctggaaacccgctctgcgttcctgctggaggtggcctcccctccgccccagacaagaagaggccctcagccctcccccggtctcagagagccctgagaggaggcccagtccagagctcttcctccgttcccagtccacttctctagggccagtagcagacaccagccagtatgccgaggaaccagggcttctccgagcccgaatactcggccgagtactcagccgagtactccgtcagcctgccctccgaccctgaccgcggggtgggccggacccatgaaatctcggtccggaactcgggctcctgcctgtgcctgcctcgcttcatgcggctgactttcgtgccggagtccttggagaacctctaccagacctacttcaaaaggcagcgccacgagaccctgctggtgctggtggtcttctccagcgacaagctggctcccctcgccgtggctggaattggactggtgttggacatcatcctcttcgtgctctgcaaaaaggggctgctcccggaccgggtcacccgcagagtgctgccctacgtgctgtggctgctcataaccgcccagatcttctcctacctgggcctgaacttcgcgcgtgcccacgcggctagtgacacggtgggctggcaggtcttctttgtcttctccttcttcatcacgctgcccctcagcctcagccccatcgtgatcatctccgtggtctcctgtgtggtgcacacgttggtcctgggggtcaccgtggcccagcagcagcaggaggagctcaaggggatgcagctgctgcgggagatcctggccaacgtcttcctctacctgtgcgccatcgctgtgggcatcatgtcctactacatggctgaccgcaagcaccgcaaggccttcctggaggcccgccagtcgctggaggtgaagatgaacctggaagagcagagccagcagcaggagaacctcatgctttccatcctgcccaagcacgtggctgacgagatgctgaaagacatgaagaaagacgagagccagaaggaccagcagcagttcaacaccatgtacatgtaccgtcacgagaacgtcagcatcctctttgccgacatcgtgggctttacccagctgtcttctgcctgcagtgcccaggagcttgtgaagctgctcaacgagctctttgcccgctttgacaagctggcagctaaataccaccagctgcggattaagatcctgggcgactgctactactgcatctgcggcttgcctgactaccgggaggaccacgccgtctgctccatcctcatggggctggccatggtggaggccatctcgtatgtgcgggagaagaccaagactggggtggacatgcgtgtgggggtgcacacgggcaccgtgctggggggcgtcctgggccagaagcgctggcagtacgacgtgtggtcgactgatgtcactgtagccaacaagatggaggccggcggcatccctgggcgcgtgcacatctcccagagcaccatggactgcctgaaaggggagtttgatgtggagccaggcgatgggggcagccgctgtgattacctagaagagaagggtattgaaacctacctcatcattgcctccaagccagaggtgaagaaaacagccacccagaatggcctcaatggctcggccctgcccaatggagcaccagcttcctcaaagtccagctcccctgccctcattgagaccaaggagcccaacgggagtgcccacagcagtgggtccacgtcggagaagcccgaggagcaggatgcccaggccgacaacccctcattccccaacccacgccggaggctgcgcctgcaggacctggctgaccgagtggtggatgcctctgaagatgagcacgagctcaaccagctgctcaacgaggccctgcttgagcgagagtccgcccaagtagtaaagaagagaaacaccttcctcttgtccatgcggttcatggaccccgagatggaaacccgctactcggtggagaaggagaagcagagtggggctgccttcagctgctcctgcgtcgtcctgctctgcacggccctggtcgagatactcatcgacccctggctaatgacaaactatgtgaccttcatggtgggggagattctgctcctcatcctgaccatctgctccctggctgccatctttccccgggcctttcctaagaagcttgtggccttctcaacttggattgaccggacccgctgggccaggaacacctgggccatgctcgccatcttcatcctggtgatggcaaatgtcgtggacatgctcagctgtctccagtactacacgggacccagcaatgcaacggcagggatggagacggagggcagctgcctggagaaccccaagtattacaactatgtggccgtgctgtccctcatcgccaccatcatgctggtgcaggtcagccacatggtgaagctcacgctcatgctgctcgtcgcaggcgccgtggccaccatcaacctctatgcctggcgtcccgtctttgatgaatacgaccacaagcgttttcgggagcacgacttacctatggtggccttagagcagatgcaaggattcaaccctgggctcaatggcactgacaggctgcccctggtgccttccaagtactctatgacggtgatggtgttcctcatgatgctcagcttctactacttctcccgccacgtgagtgccgcctgcacgatccccgctctgtgcccacagcccacagggcctcctgagaagcagccctgggacctaagagcccaagctcctaaggaatggggcttcccttcacccagccccacacgtgagcctggtcaggccaccgccttctctattcaggctccttcctcagtcacacaggaagacagttcctcacctcttccgtccgaccccctccaggatggtgaaggaagcatgggagtgaaggtgggaggggatagagtgaaggcacaaacatcttgaatcaaatcaatatcccctaggccaggggctcatggcccccgcactccccgtggcgctgagggacattaacacaactgaccacagagccagaagagaaagagaagggagctgatggactttctgttgggttaaaaggaaaagagaaggccggtgcagtggctcattttgggaggctgagggtggaggatcacttgagtccaggagtctg

SEQ ID NO: 423616 - DNA, 372 bp, Homo sapiens
ttattaaaagctttattcaacttgaaagtgattgtggaaattctgttaatatcacttatctgaggagtgctggtactttgctgactcatgccactggtccccaccacaggcctggaaggcaagagcttgaaggtctcatcatagctcactgtaccccggaacgcctgctgcctggccctgtctcttttattcttaaactttcttctaaagggtactccaagctggctttaatcccctgcactgttcctggagctctcccacacggaggttacttcgtggccattgcagggttaagtctgaacgtggccttgggccagtcatgactcctatctgtgcctgggcaagggagggctacaggagaacctggtcagc

SEQ ID NO: 423617 - DNA, 1362 bp, Homo sapiens
ccgcgggggcttccaagggacgcggcgaaaccaaaacagtcgccggtggttcacaaaaccacctcagaaaatgcttccaaaggcacgtctggcctccacaaggtgacggcttttcagcctccgactcgaacttgagtcgtccacagcactaggccgccgccagcccgggcgagctgcctagggaccgcggacgccgcagcaagcagctccctgctcccgccacacccgccgagccagccgcgcggaacccactcccccaccgtgggcccgcctcccgccgccagcctgcccacgattggtcgactgggctgcccgtcgcgagagaaggcggtgcctccggcaggccggcgctcccattggccgggatggcggcggcggcgcgcgcggccccggcgagcaggggaagccggtggccgcggctgcggaacgggcggaggctgccggtttcgtaaccgtcgctcctcctcgctgactcgcgggctgtgaggcctgggtcggctcgggccgcaccgcgcggggccgctcggagtggaggccgcctgggggcaggcgggctagaggagcaggtacatgtgaagattttttggcagcttagcgtggaaaccattgatcaccctgctctcatttctacctgttctgtgttggcaagggagagtgcccaaatgagcaagatatcgcagcaaaacagcactccaggggtgaacggaattagtgttatccatacccaggcacatgccagcggcttacagcaggttcctcagctggtgcctgctggccctgggggaggaggcaaagctgtggctcccagcaagcagagcaaaaagagttcgcccatggatcgaaacagtgacgagtatcggcaacgccgagagaggaacaacatggctgtgaaaaagagccggttgaaaagcaagcagaaagcacaagacacactgcagagagtcaatcagctcaaagaagagaatgaacggttggaagcaaaaatcaaattgctgaccaaggaattaagtgtactcaaagatttgtttcttgagcatgcacacaaccttgcagacaacgtacagtccattagcactgaaaatacgacagcagatggcgacaatgcaggacagtagacctcaccctttccagactttagagcttgtggcttgaatgttaaaggtgtgaccaccgacaccactcatgtcaatggctgaaagttgtccatttccatgactcaaagacccattggaggctattttctgggatcagcactgaagagttgattagctaaaaatgttagccttgtaattcgaatatctggttttaaatgatagaggtttttgtgggaatcaaaatcccccaaatgttaaggtatatggt

SEQ ID NO: 423618 - DNA, 4278 bp, Homo sapiens
cacgcaacacctacgggtcgaatagagaagaaatgaagcacttcgcaggcatagttggagggagcggagcagggccgacagccagcggaggtacatgtgaagattttttggcagcttagcgtggaaaccattgatcaccctgctctcatttctacctgttctgtgttggcaagggagagtgcccaaatgagcaagatatcgcagcaaaacagcactccaggggtgaacggaattagtgttatccatacccaggcacatgccagcggcttacagcaggttcctcagctggtgcctgctggccctgggggaggaggcaaagctgtggctcccagcaagcagagcaaaaagagttcgcccatggatcgaaacagtgacgagtatcggcaacgccgagagaggaacaacatggctgtgaaaaagagccggttgaaaagcaagcagaaagcacaagacacactgcagagagtcaatcagctcaaagaagagaatgaacggttggaagcaaaaatcaaattgctgaccaaggaattaagtgtactcaaagatttgtttcttgagcatgcacacaaccttgcagacaacgtacagtccattagcactgaaaatacgacagcagatggcgacaatgcaggacagtagacctcaccctttccagactttagagcttgtggcttgaatgttaaaggtgtgaccaccgacaccactcatgtcaatggctgaaagttgtccatttccatgactcaaagacccattggaggctattttctgggatcagcactgaagagttgattagctaaaaatgttagccttgtaattcgaatatctggttttaaatgatagaggtttttgtgggaatcaaaatcccccaaatgttaaggtatatggtaaaaaaagaaatatctgggatcccgatgttcttaataaatcctgacttcccaagaaatgcttcttttttaagttgacaaaaggaatggggaactggcaggccgcgcagaaggttcttggttttaatggataggctgaattggattaagaaaagttgaatgccacctatggtaatctatttgtgattttcttctaaattatgtattataaattcgtagagctatagaaagcaatgagtgtgtaatttggagtgattttatatatggcataaactttgttttaacataattagtactgttttcccccaaaagtacaagtttttgagtagcaatgtcaggttaagtaaagaaacttcatcacatcttataggtagtgtgtggccaattgacttaaaaaatacaaataacatttaggaagcaaatagattaaacacaaaaataaaactaaagcataggaattatgtttttgagatacctttgggcttagattggcattgttttattctaaaaacccaactcagtggtgtagagaaacttgtgtaccaaaattttagtttctgcagatgctagtgtttttttggatacaattttgacaaccaagttagtaaacaaaatatcttaacagtttgatgacacaagctactgatgagggtttggaatattaattcagaaggtagtttctcttgtgttcaaaatagctgccatggggctgttacttttaaagtcaaaattttcttctgaaggctcattttggtatttgatcttaaccaagtgattattagagaaatgtatcaactccatgccatctcccaaaataattgtctaagaaaacttgaaagtgtaaggttttaacctttaatttatttctcttaaatacatcttttgatattgttgttgtgacatttctttttctggttagtgggctttccagactttgtaccactgcttctgtttattcatttatatgcttttgtgtcccataaattatttcagaaaatgctgataaaactcaggatattgacatttttgttgagactaaaaaatggcagtcgctaaagtagggactctagagtctggcttacgtcagtgttggtagtttagattgtctttgtcaacgttttttcttctctcttttgctttcttttctttctctttttttcttagcacagttctagctcaaatttgtgtattttttgtgtgcctgggctggagatgagagactgagtcataactgatttaaaagtttgtgttatcaggtatcttatttgaacatggtcatttttggccacattgctgtttcatactaggacttgggatgatgtagccagaataaaactcaagttgcaccctccggttggtggaagattgctgaccgtgccgtttctgggcaggagaagacatcatggtgtccagcaactcagcaaagccattcttaagagtcgtgaggtccttctgaatgtaaaactggagcccaggagaagctgtcccaggagggctgttaactccctatagagccaggagacaggataggggtttctagggtccaacaccagcttaccttggagtatgaatctacccatgaaggatgagagatgttttgaaaaactagccaggacacacccacaggatcctactggctccttagcagctgattggtgttacataattaacttaattggagatgcattaggtcacttgaatgtataagcaagcacctatggtaggcgctacagacatttaaatctcttgggaattcgatgctcccatggaatttataccagttatatgaattgacttaagtatcttgaaaaagaaactttagagaaagcatcaggggtgtgtactcagtatttcaaatcagaacacaagattggaacttttggaaaaatgggttcaagctttcctattagccatggaaatgcaaagtttagcagaagcaagcaattaggcagagaacaaaaatgttaagcatggtgttgtctatcttattgaagtggttggaaatgaaagcttttaatttgatagatttatcagtataaaattagggaaaccacgtgtggggaatgaatcaatttagagcttcgggaattgtgaggtgacttttgtaacttttgttctgtgtgtgacctgtgaaccactaggatgtgatctgcccttgtgggcaggtccagcatagttaggagttaggctttagcataaatttctagctgcatctgagtctcctgggatgggtgctctttggctggttttggctgcggatggtgagatcagagcagctcttcctgctgctggcccctgcaatcagttgttgggatgccagtgcagatcactaagtagtaagattttaatcaaacacgaccaggtccgaaatgcaggtcatgagtgtgaaattctcaaatttacataaaaagtagaagtatagacagtttaacatttggtattaaaggagaggaaattgtagcagcttttcacgtttcccagtccccattagagggcttgagaccttgtacctgaacaacccattttgcactcagtgctttctgatgccttaggagaattgttttgtttcacaaaagctgggaaggaagaagtccattctgcagctgttagatctgcctctcaggaaaaagtactaacttgttctttttgttcctggctttcatcagtttgtgagatttctctattttttttaaatataattttatttctttcaacaaatataaaataaaaaacaactttggaacaaacgaaagagcaacgcagacagagacgagaacaaagagcaggagacaaaaacgtgtgtgggcggcgaacagcggcacccatcgcgagaggcgttgcggagagagcgcacaagggaagggggcagccgcgggaccacaggagaggccacaagaaacacacagatgggaaacaaaaaagaatgaacccaaagagagaacccgggaaacaaaacaaaacggcaaagagaaacaagccaccatataaaaaatacccgctggaggaacaacgagaggagaacggaacacctctcaacaattgaaaagctccccaggagagcacaactacgggggaacattaaagacaaacgaggggaggactacccaaggcgacgcgccgaaggtacaacattaaggcccggaaagcgggggaaccgcgcgacacagcgacgcaacaaggaacagcaagccacaggcaggagcgggacaggaggagaagtgatcaagggagcgaaggaggaggcaaagggacaggggtagggagaagataaacgacacgaccatagccgagacccgcaaggaagggtgagagaggggcgggcggaacgaggagtgaggtattggcggtgtgatgtgtgctagaggagtcgtagtgggagctcggcgctcgggga

SEQ ID NO: 423619 - DNA, 1032 bp, Homo sapiens
ccgcgggggcttccaagggacgcggcgaaaccaaaacagtcgccggtggttcacaaaaccacctcagaaaatgcttccaaaggcacgtctggcctccacaaggtgacggcttttcagcctccgactcgaacttgagtcgtccacagcactaggccgccgccagcccgggcgagctgcctagggaccgcggacgccgcagcaagcagctccctgctcccgccacacccgccgagccagccgcgcggaacccactcccccaccgtgggcccgcctcccgccgccagcctgcccacgattggtcgactgggctgcccgtcgcgagagaaggcggtgcctccggcaggccggcgctcccattggccgggatggcggcggcggcgcgcgcggccccggcgagcaggggaagccggtggccgcggctgcggaacgggcggaggctgccggtttcgtaaccgtcgctcctcctcgctgactcgcgggctgtgaggcctgggtcggctcgggccgcaccgcgcggggccgctcggagtggaggccgcctgggggcaggcgggctagaggagcaggtacatgtgaagattttttggcagcttagcgtggaaaccattgatcaccctgctctcatttctacctgttctgtgttggcaagggagagtgcccaaatgagcaagatatcgcagcaaaacagcactccaggggtgaacggaattagtgttatccatacccaggcacatgccagcggcttacagcaggttcctcagctggtgcctgctggccctgggggaggaggcaaagctgtggctcccagcaagcagagcaaaaagagttcgcccatggatcgaaacagtgacgagtatcggcaacgccgagagaggaacaacatggctgtgaaaaagagccggttgaaaagcaagcagaaagcacaagacacactgcagagagtcaatcagctcaaagaagagaattgaatataatagaacagaacagaatagaatagagtagaatagaatagtacagagcagaagagagaat

SEQ ID NO: 423620 - DNA, 4754 bp, Homo sapiens
ccgcgggggcttccaagggacgcggcgaaaccaaaacagtcgccggtggttcacaaaaccacctcagaaaatgcttccaaaggcacgtctggcctccacaaggtgacggcttttcagcctccgactcgaacttgagtcgtccacagcactaggccgccgccagcccgggcgagctgcctagggaccgcggacgccgcagcaagcagctccctgctcccgccacacccgccgagccagccgcgcggaacccactcccccaccgtgggcccgcctcccgccgccagcctgcccacgattggtcgactgggctgcccgtcgcgagagaaggcggtgcctccggcaggccggcgctcccattggccgggatggcggcggcggcgcgcgcggccccggcgagcaggggaagccggtggccgcggctgcggaacgggcggaggctgccggtttcgtaaccgtcgctcctcctcgctgactcgcgggctgtgaggcctgggtcggctcgggccgcaccgcgcggggccgctcggagtggaggccgcctgggggcaggcgggctagaggagcaggtacatgtgaagattttttggcagcttagcgtggaaaccattgatcaccctgctctcatttctacctgttctgtgttggcaagggagagtgcccaaatgagcaagatatcgcagcaaaacagcactccaggggtgaacggaattagtgttatccatacccaggcacatgccagcggcttacagcaggttcctcagctggtgcctgctggccctgggggaggaggcaaagctgtggctcccagcaagcagagcaaaaagagttcgcccatggatcgaaacagtgacgagtatcggcaacgccgagagaggaacaacatggctgtgaaaaagagccggttgaaaagcaagcagaaagcacaagacacactgcagagagtcaatcagctcaaagaagagaatgaacggttggaagcaaaaatcaaattgctgaccaaggaattaagtgtactcaaagatttgtttcttgagcatgcacacaaccttgcagacaacgtacagtccattagcactgaaaatacgacagcagatggcgacaatgcaggacagtagacctcaccctttccagactttagagcttgtggcttgaatgttaaaggtgtgaccaccgacaccactcatgtcaatggctgaaagttgtccatttccatgactcaaagacccattggaggctattttctgggatcagcactgaagagttgattagctaaaaatgttagccttgtaattcgaatatctggttttaaatgatagaggtttttgtgggaatcaaaatcccccaaatgttaaggtatatggtaaaaaaagaaatatctgggatcccgatgttcttaataaatcctgacttcccaagaaatgcttcttttttaagttgacaaaaggaatggggaactggcaggccgcgcagaaggttcttggttttaatggataggctgaattggattaagaaaagttgaatgccacctatggtaatctatttgtgattttcttctaaattatgtattataaattcgtagagctatagaaagcaatgagtgtgtaatttggagtgattttatatatggcataaactttgttttaacataattagtactgttttcccccaaaagtacaagtttttgagtagcaatgtcaggttaagtaaagaaacttcatcacatcttataggtagtgtgtggccaattgacttaaaaaatacaaataacatttaggaagcaaatagattaaacacaaaaataaaactaaagcataggaattatgtttttgagatacctttgggcttagattggcattgttttattctaaaaacccaactcagtggtgtagagaaacttgtgtaccaaaattttagtttctgcagatgctagtgtttttttggatacaattttgacaaccaagttagtaaacaaaatatcttaacagtttgatgacacaagctactgatgagggtttggaatattaattcagaaggtagtttctcttgtgttcaaaatagctgccatggggctgttacttttaaagtcaaaattttcttctgaaggctcattttggtatttgatcttaaccaagtgattattagagaaatgtatcaactccatgccatctcccaaaataattgtctaagaaaacttgaaagtgtaaggttttaacctttaatttatttctcttaaatacatcttttgatattgttgttgtgacatttctttttctggttagtgggctttccagactttgtaccactgcttctgtttattcatttatatgcttttgtgtcccataaattatttcagaaaatgctgataaaactcaggatattgacatttttgttgagactaaaaaatggcagtcgctaaagtagggactctagagtctggcttacgtcagtgttggtagtttagattgtctttgtcaacgttttttcttctctcttttgctttcttttctttctctttttttcttagcacagttctagctcaaatttgtgtattttttgtgtgcctgggctggagatgagagactgagtcataactgatttaaaagtttgtgttatcaggtatcttatttgaacatggtcatttttggccacattgctgtttcatactaggacttgggatgatgtagccagaataaaactcaagttgcaccctccggttggtggaagattgctgaccgtgccgtttctgggcaggagaagacatcatggtgtccagcaactcagcaaagccattcttaagagtcgtgaggtccttctgaatgtaaaactggagcccaggagaagctgtcccaggagggctgttaactccctatagagccaggagacaggataggggtttctagggtccaacaccagcttaccttggagtatgaatctacccatgaaggatgagagatgttttgaaaaactagccaggacacacccacaggatcctactggctccttagcagctgattggtgttacataattaacttaattggagatgcattaggtcacttgaatgtataagcaagcacctatggtaggcgctacagacatttaaatctcttgggaattcgatgctcccatggaatttataccagttatatgaattgacttaagtatcttgaaaaagaaactttagagaaagcatcaggggtgtgtactcagtatttcaaatcagaacacaagattggaacttttggaaaaatgggttcaagctttcctattagccatggaaatgcaaagtttagcagaagcaagcaattaggcagagaacaaaaatgttaagcatggtgttgtctatcttattgaagtggttggaaatgaaagcttttaatttgatagatttatcagtataaaattagggaaaccacgtgtggggaatgaatcaatttagagcttcgggaattgtgaggtgacttttgtaacttttgttctgtgtgtgacctgtgaaccactaggatgtgatctgcccttgtgggcaggtccagcatagttaggagttaggctttagcataaatttctagctgcatctgagtctcctgggatgggtgctctttggctggttttggctgcggatggtgagatcagagcagctcttcctgctgctggcccctgcaatcagttgttgggatgccagtgcagatcactaagtagtaagattttaatcaaacacgaccaggtccgaaatgcaggtcatgagtgtgaaattctcaaatttacataaaaagtagaagtatagacagtttaacatttggtattaaaggagaggaaattgtagcagcttttcacgtttcccagtccccattagagggcttgagaccttgtacctgaacaacccattttgcactcagtgctttctgatgccttaggagaattgttttgtttcacaaaagctgggaaggaagaagtccattctgcagctgttagatctgcctctcaggaaaaagtactaacttgttctttttgttcctggctttcatcagtttgtgagatttctctattttttttaaatataattttatttctttcaacaaatataaaataaaaaacaactttggaacaaacgaaagagcaacgcagacagagacgagaacaaagagcaggagacaaaaacgtgtgtgggcggcgaacagcggcacccatcgcgagaggcgttgcggagagagcgcacaagggaagggggcagccgcgggaccacaggagaggccacaagaaacacacagatgggaaacaaaaaagaatgaacccaaagagagaacccgggaaacaaaacaaaacggcaaagagaaacaagccaccatataaaaaatacccgctggaggaacaacgagaggagaacggaacacctctcaacaattgaaaagctccccaggagagcacaactacgggggaacattaaagacaaacgaggggaggactacccaaggcgacgcgccgaaggtacaacattaaggcccggaaagcgggggaaccgcgcgacacagcgacgcaacaaggaacagcaagccacaggcaggagcgggacaggaggagaagtgatcaagggagcgaaggaggaggcaaagggacaggggtagggagaagataaacgacacgaccatagccgagacccgcaaggaagggtgagagaggggcgggcggaacgaggagtgaggtattggcggtgtgatgtgtgctagaggagtcgtagtgggagctcggcgctcgggga

SEQ ID NO: 423621 - DNA, 331 bp, Homo sapiens
gactgctctgggtacaggggacatagccatggacagaacagacttctccaaaggcccttaaggccagggcactggggctgcttactccatctgcagagtttgtggttagactgaccaggcgctcaggtctggacgggaagccccgcactgcaataaggaactgtggctgctctttcttctcacatccaggtctgggactagcttctcagccccagagacaaaagggtacttcccaaacccaccccactcagtgacactgggccatctctgagaacacagcaagtccctgtggccccagcccactgccatagcgctgtctgccagaatccac

SEQ ID NO: 423622 - DNA, 255 bp, Homo sapiens
aactaagcaaaggcacttcattatatttgtgtttgagattactgttacaaatctaactctaacagtagaaatggttaagtatgccaggaagttcctaaactaatcctaattgggctttcctctgaaaatatttggatagtgttaaaattgtagtcatagtgtatttgcttctctctttttgagaatagcgttttatgagctgatgaaattttttagtgacgttattgggcatgtattaaagatgcatagattata

SEQ ID NO: 423623 - DNA, 509 bp, Homo sapiens
  misc_feature (3)..(3): n is a, c, g, or t
  misc_feature (17)..(17): n is a, c, g, or t
ggntgcatggaatttgnacgagaagtggaagcactgttctatgcatggttcaccccaggcatctgtgtgcttcgaggatgtggctatggcattcacacaggaggagtgggaacagctggacctggcccagaggacactgtaccgagaggtgacactggagacctgggagcatattgtctccctggggcttttcctttccaaatctgatgtgatctctcagctggagcaagaagaggacctgtgcagggcagagcaggaggccccccgagaaatttggagacagacaacttgtcacgcatacagggaaaatgacatttgaagacaaagtcagacatctacaagccaaggaatgccagagattgccagcaaaccaccaaaaactaaggaaagggatggaacatatactttcttgtagccctcagaaggaaccaactatgccaacactttgatctcagacttctggcttccacaactgtaacaataaatttatgtcgtttaagccacaaaat

SEQ ID NO: 423624 - DNA, 3548 bp, Homo sapiens
  misc_feature (29)..(29): n is a, c, g, or t
gacatcaaaaatggttaggtacgaggctnggttttggagagttcactgttagccgggtgcggctggagcgcaggaccaggccagagccgccccaagtgatctgggcgtgccggagaaacgagcagggcctgcgtggggtccctcatgcggcgaggccgagcaagggcaggggcctgatgggatcgggatctctccggcctcagggacggggaaggccggtccagtcaggtttcccctgcaggagcgcccggctgggtctgagcttgtcgggaggctctcctgctgcagagctgggacggaacttatagtacctcgcagggtggcagccaagagcctcctggcacagcggcaccaggcaggtgacgcctattggaccccagaggtcatcccagctccagacgtggacacattttcttccaatgatgtctacggatgaggaaactgaggcctggagaggttaaagagacccgttcagagtcctacagtggcagactggtcttctgaggacctctgccctctacacagcggcctcttcaggtgcagggaggaaatggaagcacgttctatgctggttccaccccaggcatctgtgtgcttcgaggatgtggctatggcattcacacaggaggagtgggaacagctggacctggcccagaggacactgtaccgagaggtgacactggagacctgggagcatattgtctccctggctggagcaagaagaggacctgtgcagggcagagcaggaggccccccgagactggaaagctacccttgaggagaataggttgaattctgaaaaagatcgagctagggaagaactatcccaccacgtggaagtgtacaggagtggaccggaggagccaccctctttggtattaggaaaagtgcaagatcagagcaaccagttaagggaacaccaggagaactccttgaggttcatggtactcacctcagagagactgtttgctcaaagggaacattgtgagcttgaacttgggggaggttattctctaccttctactttaagccttctacctacaacattacctacaagtacaggtttccctaagcccaactcacaagttaaagagttgaaacaaaattcagctttcattaatcatgagaaaaatggagcagatgggaagcactgtgagagtcatcagtgtgctagagctttctgtcagagtatttacttgagtaaacttggaaacgttgaaacaggaaagaaaaacccttatgaatatattgtcagtggtgactctctcaactatggttcctccctttgttttcatggtagaactttttcagtgaagaaaagtgatgactgtaaggattatggaaacctcttcagtcacagtgtgtctctgaatgaacagaagccagtgcattttgggaaaagtcagtatgagtgtgatgagtgcagggaaacctgttctgagagtctgtgccttgtacaaacagaaagaagtggccctggagagacccccttcagatgtgaggaacgctgtgctgccttccccatggcctcatctttttctgactgtaacatcattcagactacagagaagccatctgtgtgtaatcagtgtggaaaatctttcagctgttgtaagctcatacaccagagaacacacactggagaaaagcccttcgaatgtactcagtgtgggaaatcttttagccagagctatgaccttgtcatacatcagaggacacacactggagagaagccctatgagtgtgacctgtgtgggaaatccttcacccagagatccaaacttattacacatcagcgaattcacactggagaaaaaccgtatcagtgtattgaatgcagaaaatccttcaggtggaactctaacctcattgtacatcagagaattcatactggagagaaaccgtatgagtgcactcactgtggaaagtccttcagccaaagctatgagttagttacacataaaagaacgcacactggagaaaaacccttcaaatgtactcagtgtgggaaatctttcagccagaagtatgaccttgttgtacatcagaggacacacactggagagaagccctatgagtgcaacctgtgtgggaaatccttctcccagagttccaaacttattacgcatcagcgaattcacactggagaaaaaccgtatcagtgtattgaatgtgggaaatccttcagatggaactctaacctcgtcatacatcagagaattcatactggagagaaaccgtacgattgcactcactgtggaaagtccttcagccaaagctatcagttagttgcacataaaagaactcacactggagaaaagccctatgaatgtaacgagtgtggaaaagccttcaatcgaagcactcagctcatcaggcatctgcaaattcacactggggagaagccgtacaaatgcaatcagtgcaataaagcctttgcaaggagctcctaccttgtgatgcatcagagaactcacactggtgagaaaccttttgagtgtagtcagtgtgggaaagccttttcagggagctctaaccttctttcccatcacagaattcattctggagagaaaccctatgaatgtagtgactgtgggaaatccttccggcagcgatctcaacttgtagtgcatcggcggacacatactggagagaaaccttaggagtgcagtcattgtgggaaagctttcatccagaggtctcccctcatcatgcaccagaggacgcatgtcggtgggaagagctatcagtgtgacgtgtattaagccagcggttgtgactcattgaacatcagaggacatatcctggagaaaagccctacgaatgcattgattgtgggaaagccttcaatgatcgctcaacccttagtaaacacgagaggacacacactggaggcaaaccctatgaatgtgaccattgcgagaaagcctttagccaacggtgtcaacttactaggcagcagagaattcatactggagagaagccctgtgaatgttaacaaatgtggaaaagcttccagttatgatactttccttattcaacatgagaaagctcatgggcaagaaactctatgaataaccaagatggagccgggtgcagttgccaacacttgtaatcccagcactttgcgaggccgaggcaggtggatcacttgagcccaggagtttgaaaccagcctgggtaacatggcaaaatcctgtctacaaaaaatacaaaaattagcctagcatggtggcgcatacctgtagtcctagctactcaggaggctgaggtgggaggatcacttgagcttgggaggcggttgttgcagtgagctgtgatcatgccatcacaccgctgccttgtgagagattgagacactctaaataaataataaccaagatgggaaatttccctgccagaccttgtttactagaaatcaggtggccaaaacatgactctcagagtggggcttcatgaccatgtgcatcagaattgcctggagtgtgcactgaaactgtgtattaccaagctcactctagccaactaaataaaaatctctggcagta

SEQ ID NO: 423625 - DNA, 3267 bp, Homo sapiens
ggccaccggaagcaccgccattggccggtgcgtgcagggtggcagccaagagcctcctggcacagcggcaccaggcaggtgacgcctattggaccccagaggtcatcccagctccagacgtggacacattttcttccaatgatgtctacggatgaggaaactgaggcctggagaggttaaagagacccgttcagagtcctacagtggcagactggtcttctgaggacctctgccctctacacagcggcctcttcaggtgcagggaggaaatggaagcacgttctatgctggttccaccccaggcatctgtgtgcttcgaggatgtggctatggcattcacacaggaggagtgggaacagctggacctggcccagaggacactgtaccgagaggtgacactggagacctgggagcatattgtctccctggctggagcaagaagaggacctgtgcagggcagagcaggaggccccccgagactggaaagctacccttgaggagaataggttgaattctgaaaaagatcgagctagggaagaactatcccaccacgtggaagtgtacaggagtggaccggaggagccaccctctttggtattaggaaaagtgcaagatcagagcaaccagttaagggaacaccaggagaactccttgaggttcatggtactcacctcagagagactgtttgctcaaagggaacattgtgagcttgaacttgggggaggttattctctaccttctactttaagccttctacctacaacattacctacaagtacaggtttccctaagcccaactcacaagttaaagagttgaaacaaaattcagctttcattaatcatgagaaaaatggagcagatgggaagcactgtgagagtcatcagtgtgctagagctttctgtcagagtatttacttgagtaaacttggaaacgttgaaacaggaaagaaaaacccttatgaatatattgtcagtggtgactctctcaactatggttcctccctttgttttcatggtagaactttttcagtgaagaaaagtgatgactgtaaggattatggaaacctcttcagtcacagtgtgtctctgaatgaacagaagccagtgcattttgggaaaagtcagtatgagtgtgatgagtgcagggaaacctgttctgagagtctgtgccttgtacaaacagaaagaagtggccctggagagacccccttcagatgtgaggaacgctgtgctgccttccccatggcctcatctttttctgactgtaacatcattcagactacagagaagccatctgtgtgtaatcagtgtggaaaatctttcagctgttgtaagctcatacaccagagaacacacactggagaaaagcccttcgaatgtactcagtgtgggaaatcttttagccagagctatgaccttgtcatacatcagaggacacacactggagagaagccctatgagtgtgacctgtgtgggaaatccttcacccagagatccaaacttattacacatcagcgaattcacactggagaaaaaccgtatcagtgtattgaatgcagaaaatccttcaggtggaactctaacctcattgtacatcagagaattcatactggagagaaaccgtatgagtgcactcactgtggaaagtccttcagccaaagctatgagttagttacacataaaagaacgcacactggagaaaaacccttcaaatgtactcagtgtgggaaatctttcagccagaagtatgaccttgttgtacatcagaggacacacactggagagaagccctatgagtgcaacctgtgtgggaaatccttctcccagagttccaaacttattacgcatcagcgaattcacactggagaaaaaccgtatcagtgtattgaatgtgggaaatccttcagatggaactctaacctcgtcatacatcagagaattcatactggagagaaaccgtacgattgcactcactgtggaaagtccttcagccaaagctatcagttagttgcacataaaagaactcacactggagaaaagccctatgaatgtaacgagtgtggaaaagccttcaatcgaagcactcagctcatcaggcatctgcaaattcacactggggagaagccgtacaaatgcaatcagtgcaataaagcctttgcaaggagctcctaccttgtgatgcatcagagaactcacactggtgagaaaccttttgagtgtagtcagtgtgggaaagccttttcagggagctctaaccttctttcccatcacagaattcattctggagagaaaccctatgaatgtagtgactgtgggaaatccttccggcagcgatctcaacttgtagtgcatcggcggacacatactggagagaaaccttaggagtgcagtcattgtgggaaagctttcatccagaggtctcccctcatcatgcaccagaggacgcatgtcggtgggaagagctatcagtgtgacgtgtattaagccagcggttgtgactcattgaacatcagaggacatatcctggagaaaagccctacgaatgcattgattgtgggaaagccttcaatgatcgctcaacccttagtaaacacgagaggacacacactggaggcaaaccctatgaatgtgaccattgcgagaaagcctttagccaacggtgtcaacttactaggcagcagagaattcatactggagagaagccctgtgaatgttaacaaatgtggaaaagcttccagttatgatactttccttattcaacatgagaaagctcatgggcaagaaactctatgaataaccaagatggagccgggtgcagttgccaacacttgtaatcccagcactttgcgaggccgaggcaggtggatcacttgagcccaggagtttgaaaccagcctgggtaacatggcaaaatcctgtctacaaaaaatacaaaaattagcctagcatggtggcgcatacctgtagtcctagctactcaggaggctgaggtgggaggatcacttgagcttgggaggcggttgttgcagtgagctgtgatcatgccatcacaccgctgccttgtgagagattgagacactctaaataaataataaccaagatgggaaatttccctgccagaccttgtttactagaaatcaggtggccaaaacatgactctcagagtggggcttcatgaccatgtgcatcagaattgcctggagtgtgcactgaaactgtgtattaccaagctcactctagccaactaaataaaaatctctggcagta

SEQ ID NO: 423626 - DNA, 3518 bp, Homo sapiens
tattcgattagggacggcgctttcaggctagatcgctgggaccttgggctgtagagccgccccaagtgatctgggcgtgccggagaaacgagcagggcctgcgtggggtccctcatgcggcgaggccgagcaagggcaggggcctgatgggatcgggatctctccggcctcagggacggggaaggccggtccagtcaggtttcccctgcaggagcgcccggctgggtctgagcttgtcgggaggctctcctgctgcagagctgggacggaacttatagtacctcgcagggtggcagccaagagcctcctggcacagcggcaccaggcaggtgacgcctattggaccccagaggtcatcccagctccagacgtggacacattttcttccaatgatgtctacggatgaggaaactgaggcctggagaggttaaagagacccgttcagagtcctacagtggcagactggtcttctgaggacctctgccctctacacagcggcctcttcaggtgcagggaggaaatggaagcacgttctatgctggttccaccccaggcatctgtgtgcttcgaggatgtggctatggcattcacacaggaggagtgggaacagctggacctggcccagaggacactgtaccgagaggtgacactggagacctgggagcatattgtctccctggctggagcaagaagaggacctgtgcagggcagagcaggaggccccccgagactggaaagctacccttgaggagaataggttgaattctgaaaaagatcgagctagggaagaactatcccaccacgtggaagtgtacaggagtggaccggaggagccaccctctttggtattaggaaaagtgcaagatcagagcaaccagttaagggaacaccaggagaactccttgaggttcatggtactcacctcagagagactgtttgctcaaagggaacattgtgagcttgaacttgggggaggttattctctaccttctactttaagccttctacctacaacattacctacaagtacaggtttccctaagcccaactcacaagttaaagagttgaaacaaaattcagctttcattaatcatgagaaaaatggagcagatgggaagcactgtgagagtcatcagtgtgctagagctttctgtcagagtatttacttgagtaaacttggaaacgttgaaacaggaaagaaaaacccttatgaatatattgtcagtggtgactctctcaactatggttcctccctttgttttcatggtagaactttttcagtgaagaaaagtgatgactgtaaggattatggaaacctcttcagtcacagtgtgtctctgaatgaacagaagccagtgcattttgggaaaagtcagtatgagtgtgatgagtgcagggaaacctgttctgagagtctgtgccttgtacaaacagaaagaagtggccctggagagacccccttcagatgtgaggaacgctgtgctgccttccccatggcctcatctttttctgactgtaacatcattcagactacagagaagccatctgtgtgtaatcagtgtggaaaatctttcagctgttgtaagctcatacaccagagaacacacactggagaaaagcccttcgaatgtactcagtgtgggaaatcttttagccagagctatgaccttgtcatacatcagaggacacacactggagagaagccctatgagtgtgacctgtgtgggaaatccttcacccagagatccaaacttattacacatcagcgaattcacactggagaaaaaccgtatcagtgtattgaatgcagaaaatccttcaggtggaactctaacctcattgtacatcagagaattcatactggagagaaaccgtatgagtgcactcactgtggaaagtccttcagccaaagctatgagttagttacacataaaagaacgcacactggagaaaaacccttcaaatgtactcagtgtgggaaatctttcagccagaagtatgaccttgttgtacatcagaggacacacactggagagaagccctatgagtgcaacctgtgtgggaaatccttctcccagagttccaaacttattacgcatcagcgaattcacactggagaaaaaccgtatcagtgtattgaatgtgggaaatccttcagatggaactctaacctcgtcatacatcagagaattcatactggagagaaaccgtacgattgcactcactgtggaaagtccttcagccaaagctatcagttagttgcacataaaagaactcacactggagaaaagccctatgaatgtaacgagtgtggaaaagccttcaatcgaagcactcagctcatcaggcatctgcaaattcacactggggagaagccgtacaaatgcaatcagtgcaataaagcctttgcaaggagctcctaccttgtgatgcatcagagaactcacactggtgagaaaccttttgagtgtagtcagtgtgggaaagccttttcagggagctctaaccttctttcccatcacagaattcattctggagagaaaccctatgaatgtagtgactgtgggaaatccttccggcagcgatctcaacttgtagtgcatcggcggacacatactggagagaaaccttaggagtgcagtcattgtgggaaagctttcatccagaggtctcccctcatcatgcaccagaggacgcatgtcggtgggaagagctatcagtgtgacgtgtattaagccagcggttgtgactcattgaacatcagaggacatatcctggagaaaagccctacgaatgcattgattgtgggaaagccttcaatgatcgctcaacccttagtaaacacgagaggacacacactggaggcaaaccctatgaatgtgaccattgcgagaaagcctttagccaacggtgtcaacttactaggcagcagagaattcatactggagagaagccctgtgaatgttaacaaatgtggaaaagcttccagttatgatactttccttattcaacatgagaaagctcatgggcaagaaactctatgaataaccaagatggagccgggtgcagttgccaacacttgtaatcccagcactttgcgaggccgaggcaggtggatcacttgagcccaggagtttgaaaccagcctgggtaacatggcaaaatcctgtctacaaaaaatacaaaaattagcctagcatggtggcgcatacctgtagtcctagctactcaggaggctgaggtgggaggatcacttgagcttgggaggcggttgttgcagtgagctgtgatcatgccatcacaccgctgccttgtgagagattgagacactctaaataaataataaccaagatgggaaatttccctgccagaccttgtttactagaaatcaggtggccaaaacatgactctcagagtggggcttcatgaccatgtgcatcagaattgcctggagtgtgcactgaaactgtgtattaccaagctcactctagccaactaaataaaaatctctggcagta

SEQ ID NO: 423627 - DNA, 3157 bp, Homo sapiens
cagatccttctggccctgtaccgtctctgctttttgctgggcctcgttcctcggggggcctcctgactggtcttctgaggacctctgccctctacacagcggcctcttcaggtgcagggaggaaatggaagcacgttctatgctggttccaccccaggcatctgtgtgcttcgaggatgtggctatggcattcacacaggaggagtgggaacagctggacctggcccagaggacactgtaccgagaggtgacactggagacctgggagcatattgtctccctggggcttttcctttccaaatctgatgtgatctctcagctggagcaagaagaggacctgtgcagggcagagcaggaggccccccgagactggaaagctacccttgaggagaataggttgaattctgaaaaagatcgagctagggaagaactatcccaccacgtggaagtgtacaggagtggaccggaggagccaccctctttggtattaggaaaagtgcaagatcagagcaaccagttaagggaacaccaggagaactccttgaggttcatggtactcacctcagagagactgtttgctcaaagggaacattgtgagcttgaacttgggggaggttattctctaccttctactttaagccttctacctacaacattacctacaagtacaggtttccctaagcccaactcacaagttaaagagttgaaacaaaattcagctttcattaatcatgagaaaaatggagcagatgggaagcactgtgagagtcatcagtgtgctagagctttctgtcagagtatttacttgagtaaacttggaaacgttgaaacaggaaagaaaaacccttatgaatatattgtcagtggtgactctctcaactatggttcctccctttgttttcatggtagaactttttcagtgaagaaaagtgatgactgtaaggattatggaaacctcttcagtcacagtgtgtctctgaatgaacagaagccagtgcattttgggaaaagtcagtatgagtgtgatgagtgcagggaaacctgttctgagagtctgtgccttgtacaaacagaaagaagtggccctggagagacccccttcagatgtgaggaacgctgtgctgccttccccatggcctcatctttttctgactgtaacatcattcagactacagagaagccatctgtgtgtaatcagtgtggaaaatctttcagctgttgtaagctcatacaccagagaacacacactggagaaaagcccttcgaatgtactcagtgtgggaaatcttttagccagagctatgaccttgtcatacatcagaggacacacactggagagaagccctatgagtgtgacctgtgtgggaaatccttcacccagagatccaaacttattacacatcagcgaattcacactggagaaaaaccgtatcagtgtattgaatgcagaaaatccttcaggtggaactctaacctcattgtacatcagagaattcatactggagagaaaccgtatgagtgcactcactgtggaaagtccttcagccaaagctatgagttagttacacataaaagaacgcacactggagaaaaacccttcaaatgtactcagtgtgggaaatctttcagccagaagtatgaccttgttgtacatcagaggacacacactggagagaagccctatgagtgcaacctgtgtgggaaatccttctcccagagttccaaacttattacgcatcagcgaattcacactggagaaaaaccgtatcagtgtattgaatgtgggaaatccttcagatggaactctaacctcgtcatacatcagagaattcatactggagagaaaccgtacgattgcactcactgtggaaagtccttcagccaaagctatcagttagttgcacataaaagaactcacactggagaaaagccctatgaatgtaacgagtgtggaaaagccttcaatcgaagcactcagctcatcaggcatctgcaaattcacactggggagaagccgtacaaatgcaatcagtgcaataaagcctttgcaaggagctcctaccttgtgatgcatcagagaactcacactggtgagaaaccttttgagtgtagtcagtgtgggaaagccttttcagggagctctaaccttctttcccatcacagaattcattctggagagaaaccctatgaatgtagtgactgtgggaaatccttccggcagcgatctcaacttgtagtgcatcggcggacacatactggagagaaaccttaggagtgcagtcattgtgggaaagctttcatccagaggtctcccctcatcatgcaccagaggacgcatgtcggtgggaagagctatcagtgtgacgtgtattaagccagcggttgtgactcattgaacatcagaggacatatcctggagaaaagccctacgaatgcattgattgtgggaaagccttcaatgatcgctcaacccttagtaaacacgagaggacacacactggaggcaaaccctatgaatgtgaccattgcgagaaagcctttagccaacggtgtcaacttactaggcagcagagaattcatactggagagaagccctgtgaatgttaacaaatgtggaaaagcttccagttatgatactttccttattcaacatgagaaagctcatgggcaagaaactctatgaataaccaagatggagccgggtgcagttgccaacacttgtaatcccagcactttgcgaggccgaggcaggtggatcacttgagcccaggagtttgaaaccagcctgggtaacatggcaaaatcctgtctacaaaaaatacaaaaattagcctagcatggtggcgcatacctgtagtcctagctactcaggaggctgaggtgggaggatcacttgagcttgggaggcggttgttgcagtgagctgtgatcatgccatcacaccgctgccttgtgagagattgagacactctaaataaataataaccaagatgggaaatttccctgccagaccttgtttactagaaatcaggtggccaaaacatgactctcagagtggggcttcatgaccatgtgcatcagaattgcctggagtgtgcactgaaactgtgtattaccaagctcactctagccaactaaataaaaatctctggcagta

SEQ ID NO: 423628 - DNA, 3189 bp, Homo sapiens
tttatttttattagagatgaggttttaccatgttgaccaagctggtctctaactcctgacctcaggtgatccacctgcctcagcctcccaaagttctgggattacaggtgtgagccactgcacctggcccctccctgcttattcttattcttctgccctctatttggggactagtgttacttagtcacttctttattatgtttgcttgtattttgcactttaccactgataccatgtttgctgatccatccctccctttcacagcctgcatacggattacagtttgtagtttggaaacaaaccagagacacttccattaaacagttgtctccttcatctccccctccccctccccctctgatgcttctccagtaacttaggcattttggatttctttcagactggaaagctacccttgaggagaataggttgaattctgaaaaagatcgagctagggaagaactatcccaccacgtggaagtgtacaggagtggaccggaggagccaccctctttggtattaggaaaagtgcaagatcagagcaaccagttaagggaacaccaggagaactccttgaggttcatggtactcacctcagagagactgtttgctcaaagggaacattgtgagcttgaacttgggggaggttattctctaccttctactttaagccttctacctacaacattacctacaagtacaggtttccctaagcccaactcacaagttaaagagttgaaacaaaattcagctttcattaatcatgagaaaaatggagcagatgggaagcactgtgagagtcatcagtgtgctagagctttctgtcagagtatttacttgagtaaacttggaaacgttgaaacaggaaagaaaaacccttatgaatatattgtcagtggtgactctctcaactatggttcctccctttgttttcatggtagaactttttcagtgaagaaaagtgatgactgtaaggattatggaaacctcttcagtcacagtgtgtctctgaatgaacagaagccagtgcattttgggaaaagtcagtatgagtgtgatgagtgcagggaaacctgttctgagagtctgtgccttgtacaaacagaaagaagtggccctggagagacccccttcagatgtgaggaacgctgtgctgccttccccatggcctcatctttttctgactgtaacatcattcagactacagagaagccatctgtgtgtaatcagtgtggaaaatctttcagctgttgtaagctcatacaccagagaacacacactggagaaaagcccttcgaatgtactcagtgtgggaaatcttttagccagagctatgaccttgtcatacatcagaggacacacactggagagaagccctatgagtgtgacctgtgtgggaaatccttcacccagagatccaaacttattacacatcagcgaattcacactggagaaaaaccgtatcagtgtattgaatgcagaaaatccttcaggtggaactctaacctcattgtacatcagagaattcatactggagagaaaccgtatgagtgcactcactgtggaaagtccttcagccaaagctatgagttagttacacataaaagaacgcacactggagaaaaacccttcaaatgtactcagtgtgggaaatctttcagccagaagtatgaccttgttgtacatcagaggacacacactggagagaagccctatgagtgcaacctgtgtgggaaatccttctcccagagttccaaacttattacgcatcagcgaattcacactggagaaaaaccgtatcagtgtattgaatgtgggaaatccttcagatggaactctaacctcgtcatacatcagagaattcatactggagagaaaccgtacgattgcactcactgtggaaagtccttcagccaaagctatcagttagttgcacataaaagaactcacactggagaaaagccctatgaatgtaacgagtgtggaaaagccttcaatcgaagcactcagctcatcaggcatctgcaaattcacactggggagaagccgtacaaatgcaatcagtgcaataaagcctttgcaaggagctcctaccttgtgatgcatcagagaactcacactggtgagaaaccttttgagtgtagtcagtgtgggaaagccttttcagggagctctaaccttctttcccatcacagaattcattctggagagaaaccctatgaatgtagtgactgtgggaaatccttccggcagcgatctcaacttgtagtgcatcggcggacacatactggagagaaaccttaggagtgcagtcattgtgggaaagctttcatccagaggtctcccctcatcatgcaccagaggacgcatgtcggtgggaagagctatcagtgtgacgtgtattaagccagcggttgtgactcattgaacatcagaggacatatcctggagaaaagccctacgaatgcattgattgtgggaaagccttcaatgatcgctcaacccttagtaaacacgagaggacacacactggaggcaaaccctatgaatgtgaccattgcgagaaagcctttagccaacggtgtcaacttactaggcagcagagaattcatactggagagaagccctgtgaatgttaacaaatgtggaaaagcttccagttatgatactttccttattcaacatgagaaagctcatgggcaagaaactctatgaataaccaagatggagccgggtgcagttgccaacacttgtaatcccagcactttgcgaggccgaggcaggtggatcacttgagcccaggagtttgaaaccagcctgggtaacatggcaaaatcctgtctacaaaaaatacaaaaattagcctagcatggtggcgcatacctgtagtcctagctactcaggaggctgaggtgggaggatcacttgagcttgggaggcggttgttgcagtgagctgtgatcatgccatcacaccgctgccttgtgagagattgagacactctaaataaataataaccaagatgggaaatttccctgccagaccttgtttactagaaatcaggtggccaaaacatgactctcagagtggggcttcatgaccatgtgcatcagaattgcctggagtgtgcactgaaactgtgtattaccaagctcactctagccaactaaataaaaatctctggcagta

SEQ ID NO: 423629 - DNA, 965 bp, Homo sapiens
  misc_feature (29)..(29): n is a, c, g, or t
gacatcaaaaatggttaggtacgaggctnggttttggagagttcactgttagccgggtgcggctggagcgcaggaccaggccagagccgccccaagtgatctgggcgtgccggagaaacgagcagggcctgcgtggggtccctcatgcggcgaggccgagcaagggcaggggcctgatgggatcgggatctctccggcctcagggacggggaaggccggtccagtcaggtttcccctgcaggagcgcccggctgggtctgagcttgtcgggaggctctcctgctgcagagctgggacggaacttatagtacctcgcagggtggcagccaagagcctcctggcacagcggcaccaggcaggtgacgcctattggaccccagaggtcatcccagctccagacgtggacacattttcttccaatgatgtctacggatgaggaaactgaggcctggagaggttaaagagacccgttcagagtcctacagtggcagactggtcttctgaggacctctgccctctacacagcggcctcttcaggtgcagggaggaaatggaagcacgttctatgctggttccaccccaggcatctgtgtgcttcgaggatgtggctatggcattcacacaggaggagtgggaacagctggacctggcccagaggacactgtaccgagaggtgacactggagacctgggagcatattgtctccctggctggagcaagaagaggacctgtgcagggcagagcaggaggccccccgagggaaaatgacatttgaagacaaagtcagacatctacaagccaaggaatgccagagattgccagcaaaccaccaaaaactaaggaaagggatggaacatatactttcttgtagccctcagaaggaaccaactatgccaacactttgatctcagacttctggcttccacaactgtaacaataaatttatgtcgtttaagccacaaaat

SEQ ID NO: 423630 - DNA, 1162 bp, Homo sapiens
  misc_feature (29)..(29): n is a, c, g, or t
gacatcaaaaatggttaggtacgaggctnggttttggagagttcactgttagccgggtgcggctggagcgcaggaccaggccagagccgccccaagtgatctgggcgtgccggagaaacgagcagggcctgcgtggggtccctcatgcggcgaggccgagcaagggcaggggcctgatgggatcgggatctctccggcctcagggacggggaaggccggtccagtcaggtttcccctgcaggagcgcccggctgggtctgagcttgtcgggaggctctcctgctgcagagctgggacggaacttatagtacctcgcagggtggcagccaagagcctcctggcacagcggcaccaggcaggtgacgcctattggaccccagaggtcatcccagctccagacgtggacacattttcttccaatgatgtctacggatgaggaaactgaggcctggagaggttaaagagacccgttcagagtcctacagtggcagactggtcttctgaggacctctgccctctacacagcggcctcttcaggtgcagggaggaaatggaagcacgttctatgctggttccaccccaggcatctgtgtgcttcgaggatgtggctatggcattcacacaggaggagtgggaacagctggacctggcccagaggacactgtaccgagaggtgacactggagacctgggagcatattgtctccctggctggagcaagaagaggacctgtgcagggcagagcaggaggccccccgaggtacttcaggtctttcacaagtcacaggtgtagtggctgatgggagcttcaggttcccggtctgggacttcacataacacaggcttgacaccagaaagatgtatccaactatctaatcctagtactttgaccccagaaggcatggccagtactgaaaatggtcccttccactttgattgtaattattgagcaggtgatccctccttctatgttttaacaggtaccttgtctgttggcctgattttgggttggtggttagttcctggtgtggggagcttttgagttccaaactcttgtaaagcctgctgaaataatcccaggttaactaggtattttactaaactggatgtttctggatcagagattagatcattagttaaaaatggccttttgtataacaaaa

SEQ ID NO: 423631 - DNA, 1197 bp, Homo sapiens
  misc_feature (29)..(29): n is a, c, g, or t
gacatcaaaaatggttaggtacgaggctnggttttggagagttcactgttagccgggtgcggctggagcgcaggaccaggccagagccgccccaagtgatctgggcgtgccggagaaacgagcagggcctgcgtggggtccctcatgcggcgaggccgagcaagggcaggggcctgatgggatcgggatctctccggcctcagggacggggaaggccggtccagtcaggtttcccctgcaggagcgcccggctgggtctgagcttgtcgggaggctctcctgctgcagagctgggacggaacttatagtacctcgcagggtggcagccaagagcctcctggcacagcggcaccaggcaggtgacgcctattggaccccagaggtcatcccagctccagacgtggacacattttcttccaatgatgtctacggatgaggaaactgaggcctggagaggttaaagagacccgttcagagtcctacagtggcagactggtcttctgaggacctctgccctctacacagcggcctcttcaggtgcagggaggaaatggaagcacgttctatgctggttccaccccaggcatctgtgtgcttcgaggatgtggctatggcattcacacaggaggagtgggaacagctggacctggcccagaggacactgtaccgagaggtgacactggagacctgggagcatattgtctccctggggcttttcctttccaaatctgatgtgatctctcagctggagcaagaagaggacctgtgcagggcagagcaggaggccccccgaggtacttcaggtctttcacaagtcacaggtgtagtggctgatgggagcttcaggttcccggtctgggacttcacataacacaggcttgacaccagaaagatgtatccaactatctaatcctagtactttgaccccagaaggcatggccagtactgaaaatggtcccttccactttgattgtaattattgagcaggtgatccctccttctatgttttaacaggtaccttgtctgttggcctgattttgggttggtggttagttcctggtgtggggagcttttgagttccaaactcttgtaaagcctgctgaaataatcccaggttaactaggtattttactaaactggatgtttctggatcagagattagatcattagttaaaaatggccttttgtataacaaaa

SEQ ID NO: 423632 - DNA, 999 bp, Homo sapiens
  misc_feature (29)..(29): n is a, c, g, or t
gacatcaaaaatggttaggtacgaggctnggttttggagagttcactgttagccgggtgcggctggagcgcaggaccaggccagagccgccccaagtgatctgggcgtgccggagaaacgagcagggcctgcgtggggtccctcatgcggcgaggccgagcaagggcaggggcctgatgggatcgggatctctccggcctcagggacggggaaggccggtccagtcaggtttcccctgcaggagcgcccggctgggtctgagcttgtcgggaggctctcctgctgcagagctgggacggaacttatagtacctcgcagggtggcagccaagagcctcctggcacagcggcaccaggcaggtgacgcctattggaccccagaggtcatcccagctccagacgtggacacattttcttccaatgatgtctacggatgaggaaactgaggcctggagaggttaaagagacccgttcagagtcctacagtggcagactggtcttctgaggacctctgccctctacacagcggcctcttcaggtgcagggaggaaatggaagcacgttctatgctggttccaccccaggcatctgtgtgcttcgaggatgtggctatggcattcacacaggaggagtgggaacagctggacctggcccagaggacactgtaccgagaggtgacactggagacctgggagcatattgtctccctggctggagcaagaagaggacctgtgcagggcagagcaggaggccccccgagaaatttggagacagacaacttgtcacgcatacagggaaaatgacatttgaagacaaagtcagacatctacaagccaaggaatgccagagattgccagcaaaccaccaaaaactaaggaaagggatggaacatatactttcttgtagccctcagaaggaaccaactatgccaacactttgatctcagacttctggcttccacaactgtaacaataaatttatgtcgtttaagccacaaaat

SEQ ID NO: 423633 - DNA, 852 bp, Homo sapiens
cttctgcggcttagtcgacgcaggtggcagccaagagcctcctggcacagcggcaccaggcaggtgacgcctattggaccccagaggtcatcccagctccagacgtggacacattttcttccaatgatgtctacggatgaggaaactgaggcctggagaggttaaagagacccgttcagagtcctacagtggcaggtaatggagccagtactttgacagcaggttgcaaaactggtcttctgaggacctctgccctctacacagcggcctcttcaggtgcagggaggaaatggaagcacgttctatgctggttccaccccaggcatctgtgtgcttcgaggatgtggctatggcattcacacaggaggagtgggaacagctggacctggcccagaggacactgtaccgagaggtgacactggagacctgggagcatattgtctccctggggcttttcctttccaaatctgatgtgatctctcagctggagcaagaagaggacctgtgcagggcagagcaggaggccccccgaggaacgaggcccagcaaaaagcagagacggtacagggccagaaggatctgagagagtgtggccagcttgagcccctcaggagtcggccagaaggatctgagagagtgtggccagcttgagcccctcgggagtcagctcctccgtccccactggtaacgtcttcaccccttcaacacggtgtgaagggccatgtcatggttgatcttcagtccctcagactacaccatcagccccatgggggtgagcaaataacaagtaactatactgttccctgctatgtgtctggctcttggtaaaatttaaaaaagttaaaaattaaa

SEQ ID NO: 423634 - DNA, 773 bp, Homo sapiens
cttctgcggcttagtcgacgcaggtggcagccaagagcctcctggcacagcggcaccaggcaggtgacgcctattggaccccagaggtcatcccagctccagacgtggacacattttcttccaatgatgtctacggatgaggaaactgaggcctggagaggttaaagagacccgttcagagtcctacagtggcaggtaatggagccagtactttgacagcaggttgcaaaactggtcttctgaggacctctgccctctacacagcggcctcttcaggtgcagggaggaaatggaagcacgttctatgctggttccaccccaggcatctgtgtgcttcgaggatgtggctatggcattcacacaggaggagtgggaacagctggacctggcccagaggacactgtaccgagaggtgacactggagacctgggagcatattgtctccctggggcttttcctttccaaatctgatgtgatctctcagctggagcaagaagaggacctgtgcagggcagagcaggaggccccccgagaaatttggagacagacaacttgtcacgcatacagggaaaatgacatttgaagacaaagtcagacatctacaagccaaggaatgccagagattgccagcaaaccaccaaaaactaaggaaagggatggaacatatactttcttgtagccctcagaaggaaccaactatgccaacactttgatctcagacttctggcttccacaactgtaacaataaatttatgtcgtttaagccacaaaat

SEQ ID NO: 423635 - DNA, 713 bp, Homo sapiens
cttctgcggcttagtcgacgcaggtggcagccaagagcctcctggcacagcggcaccaggcaggtgacgcctattggaccccagaggtcatcccagctccagacgtggacacattttcttccaatgatgtctacggatgaggaaactgaggcctggagaggttaaagagacccgttcagagtcctacagtggcaggtaatggagccagtactttgacagcaggttgcaaaactggtcttctgaggacctctgccctctacacagcggcctcttcaggtgcagggaggaaatggaagcacgttctatgctggttccaccccaggcatctgtgtgcttcgaggatgtggctatggcattcacacaggaggagtgggaacagctggacctggcccagaggacactgtaccgagaggtgacactggagacctgggagcatattgtctccctggggcttttcctttccaaatctgatgtgatctctcagctggagcaagaagaggacctgtgcagggcagagcaggaggccccccgaggtaagagcagaccttgtggtgagcagctcaacgtttaacaagcttggacagagagctctccgcagggccccaggggccaaggagggagccttgtttggaggaagcctccttgggtgctctttgcagcagttcacccattcaaaggagttcaccaattcgaagtatgcagttcatggcttc

SEQ ID NO: 423636 - DNA, 716 bp, Homo sapiens
catattatcatatactttaatagcacaacaaaattacaaattaataattgtgggtattttagaatatatatgaaacagctatttggtcaaagaggaaataaaaatactacatctgtttaagtaaaaataagtactctgtatcaaatgatcaacatgaatacaaaataccaaagcttgcctaaagcctaggccgggaacgatggtcctaaacagtttttgtttatgtaggtcctatcaatatttggtgtattaggaattaaaacggaaaaaaattaatatattttattaatataatttttcaaaatctattctatgttaatatataggttgagctgtgtctcttcccaaaattgatatgttgaagttctaacccatagtacctcagaccttatttggagacagtgtctttaaagagctgaaatgaggtcattagagtgagccctggtccattatgactgttgtccttataaaaacagaaatttggagacagacaacttgtcacgcatacagggaaaatgacatttgaagacaaagtcagacatctacaagccaaggaatgccagagattgccagcaaaccaccaaaaactaaggaaagggatggaacatatactttcttgtagccctcagaaggaaccaactatgccaacactttgatctcagacttctggcttccacaactgtaacaataaatttatgtcgtttaagccacaaaat

SEQ ID NO: 423637 - DNA, 247 bp, Homo sapiens
tggcacgaggcgccattggccggtgcgtgcggtggcagccaagagcctcctggcacagcggcaccaggcaggtgacgcctattggaccccagaggtcatcccagctccagacgtggacacattttcttccaatgatgtctacggatgaggaaactgaggcctggagaggttaaagagacccgttcagagtcctacagtggcaggtctctattttcattaaagaagcttaaatattttgtcaagttca

SEQ ID NO: 423638 - DNA, 551 bp, Homo sapiens
ttgtaaggattaaagcagaggggacttccttattatgctgctcaggtagactggaaatctggtttgtttagggatctacctgcttaaagtatcagtctgattatgtggcatttagcctaagtgactctgtcttggtttggtctggtctcatgaggcctagagcaggagctcagtccaaaaccatgtcctctcataattttgtgtaacttgcctaacacctgctccttctcaggaacgaggcccagcaaaaagcagagacggtacagggccagaaggatctgagagagtgtggccagcttgagcccctcaggagtcggccagaaggatctgagagagtgtggccagcttgagcccctcgggagtcagctcctccgtccccactggtaacgtcttcaccccttcaacacggtgtgaagggccatgtcatggttgatcttcagtccctcagactacaccatcagccccatgggggtgagcaaataacaagtaactatactgttccctgctatgtgtctggctcttggtaaaatttaaaaaagttaaaaattaaa

SEQ ID NO: 423639 - DNA, 3746 bp, Homo sapiens
tggcacgaggcgccattggccggtgcgtgcggtggcagccaagagcctcctggcacagcggcaccaggcaggtgacgcctattggaccccagaggtcatcccagctccagacgtggacacattttcttccaatgatgtctacggatgaggaaactgaggcctggagaggttaaagagacccgttcagagtcctacagtggcagactggtcttctgaggacctctgccctctacacagcggcctcttcaggtgcagggaggaaatggaagcacgttctatgctggttccaccccaggcatctgtgtgcttcgaggatgtggctatggcattcacacaggaggagtgggaacagctggacctggcccagaggacactgtaccgagaggtgacactggagacctgggagcatattgtctccctggggcttttcctttccaaatctgatgtgatctctcagctggagcaagaagaggacctgtgcagggcagagcaggaggccccccgagactggaaagctacccttgaggagaataggttgaattctgaaaaagatcgagctagggaagaactatcccaccacgtggaagtgtacaggagtggaccggaggagccaccctctttggtattaggaaaagtgcaagatcagagcaaccagttaagggaacaccaggagaactccttgaggttcatggtactcacctcagagagactgtttgctcaaagggaacattgtgagcttgaacttgggggaggttattctctaccttctactttaagccttctacctacaacattacctacaagtacaggtttccctaagcccaactcacaagttaaagagttgaaacaaaattcagctttcattaatcatgagaaaaatggagcagatgggaagcactgtgagagtcatcagtgtgctagagctttctgtcagagtatttacttgagtaaacttggaaacgttgaaacaggaaagaaaaacccttatgaatatattgtcagtggtgactctctcaactatggttcctccctttgttttcatggtagaactttttcagtgaagaaaagtgatgactgtaaggattatggaaacctcttcagtcacagtgtgtctctgaatgaacagaagccagtgcattttgggaaaagtcagtatgagtgtgatgagtgcagggaaacctgttctgagagtctgtgccttgtacaaacagaaagaagtggccctggagagacccccttcagatgtgaggaacgctgtgctgccttccccatggcctcatctttttctgactgtaacatcattcagactacagagaagccatctgtgtgtaatcagtgtggaaaatctttcagctgttgtaagctcatacaccagagaacacacactggagaaaagcccttcgaatgtactcagtgtgggaaatcttttagccagagctatgaccttgtcatacatcagaggacacacactggagagaagccctatgagtgtgacctgtgtgggaaatccttcacccagagatccaaacttattacacatcagcgaattcacactggagaaaaaccgtatcagtgtattgaatgcagaaaatccttcaggtggaactctaacctcattgtacatcagagaattcatactggagagaaaccgtatgagtgcactcactgtggaaagtccttcagccaaagctatgagttagttacacataaaagaacgcacactggagaaaaacccttcaaatgtactcagtgtgggaaatctttcagccagaagtatgaccttgttgtacatcagaggacacacactggagagaagccctatgagtgcaacctgtgtgggaaatccttctcccagagttccaaacttattacgcatcagcgaattcacactggagaaaaaccgtatcagtgtattgaatgtgggaaatccttcagatggaactctaacctcgtcatacatcagagaattcatactggagagaaaccgtacgattgcactcactgtggaaagtccttcagccaaagctatcagttagttgcacataaaagaactcacactggagaaaagccctatgaatgtaacgagtgtggaaaagccttcaatcgaagcactcagctcatcaggcatctgcaaattcacactggggagaagccgtacaaatgcaatcagtgcaataaagcctttgcaaggagctcctaccttgtgatgcatcagagaactcacactggtgagaaaccttttgagtgtagtcagtgtgggaaagccttttcagggagctctaaccttctttcccatcacagaattcattctggagagaaaccctatgaatgtagtgactgtgggaaatccttccggcagcgatctcaacttgtagtgcatcggcggacacatactggagagaaaccttaggagtgcagtcattgtgggaaagctttcatccagaggtctcccctcatcatgcaccagaggacgcatgtcggtgggaagagctatcagtgtgacgtgtattaagccagcggttgtgactcattgaacatcagaggacatatcctggagaaaagccctacgaatgcattgattgtgggaaagccttcaatgatcgctcaacccttagtaaacacgagaggacacacactggaggcaaaccctatgaatgtgaccattgcgagaaagcctttagccaacggtgtcaacttactaggcagcagagaattcatactggagagaagccctgtgaatgttaacaaatgtggaaaagcttccagttatgatactttccttattcaacatgagaaagctcatgggcaagaaactctatgaataaccaagatggagccgggtgcagttgccaacacttgtaatcccagcactttgcgaggccgaggcaggtggatcacttgagcccaggagtttgaaaccagcctgggtaacatggcaaaatcctgtctacaaaaaatacaaaaattagcctagcatggtggcgcatacctgtagtcctagctactcaggaggctgaggtgggaggatcacttgagcttgggaggcggttgttgcagtgagctgtgatcatgccatcacaccgctgccttgtgagagattgagacactctaaataaataataaccaagatgggaaatttccctgccagaccttgtttactagaaatcaggtggccaaaacatgactctcagagtggggcttcatgaccatgtgcatcagaattgcctggagtgtgcactgaaactgtgtattaccaagctcactctagccaactaaataaaaatctctggcagtaaaatccaggagtctgcagtttctaaaatcacacaggtgagtgggcatggtggctcatgcctgtaatcccagcactctggaaggctgaggtgggtggatcacctgaagtcagaagtttgagaccagcctggcaaacatggcaaaactgtctctattaaaaatacaggccaggggctgggcacggtacctcacacctgtaatcccagcacttaggtaggccaaggtgggtggatcacgaggtcaggagattgagaccatcctggctaatatggtgaaaccctgtctctactaaaaatacaaaaaaattagctaggcatggtggcgggctcctgtagtcccagctactcaggaggctagagcaggagaatggcgcgaacatgggaggcgtagcttgcagtgagctgagatcacaccactgcactccagcctgggcaacagagcaagactgtctc

SEQ ID NO: 423640 - DNA, 3295 bp, Homo sapiens
tggcacgaggcgccattggccggtgcgtgcggtggcagccaagagcctcctggcacagcggcaccaggcaggtgacgcctattggaccccagaggtcatcccagctccagacgtggacacattttcttccaatgatgtctacggatgaggaaactgaggcctggagaggttaaagagacccgttcagagtcctacagtggcagactggtcttctgaggacctctgccctctacacagcggcctcttcaggtgcagggaggaaatggaagcacgttctatgctggttccaccccaggcatctgtgtgcttcgaggatgtggctatggcattcacacaggaggagtgggaacagctggacctggcccagaggacactgtaccgagaggtgacactggagacctgggagcatattgtctccctggggcttttcctttccaaatctgatgtgatctctcagctggagcaagaagaggacctgtgcagggcagagcaggaggccccccgagactggaaagctacccttgaggagaataggttgaattctgaaaaagatcgagctagggaagaactatcccaccacgtggaagtgtacaggagtggaccggaggagccaccctctttggtattaggaaaagtgcaagatcagagcaaccagttaagggaacaccaggagaactccttgaggttcatggtactcacctcagagagactgtttgctcaaagggaacattgtgagcttgaacttgggggaggttattctctaccttctactttaagccttctacctacaacattacctacaagtacaggtttccctaagcccaactcacaagttaaagagttgaaacaaaattcagctttcattaatcatgagaaaaatggagcagatgggaagcactgtgagagtcatcagtgtgctagagctttctgtcagagtatttacttgagtaaacttggaaacgttgaaacaggaaagaaaaacccttatgaatatattgtcagtggtgactctctcaactatggttcctccctttgttttcatggtagaactttttcagtgaagaaaagtgatgactgtaaggattatggaaacctcttcagtcacagtgtgtctctgaatgaacagaagccagtgcattttgggaaaagtcagtatgagtgtgatgagtgcagggaaacctgttctgagagtctgtgccttgtacaaacagaaagaagtggccctggagagacccccttcagatgtgaggaacgctgtgctgccttccccatggcctcatctttttctgactgtaacatcattcagactacagagaagccatctgtgtgtaatcagtgtggaaaatctttcagctgttgtaagctcatacaccagagaacacacactggagaaaagcccttcgaatgtactcagtgtgggaaatcttttagccagagctatgaccttgtcatacatcagaggacacacactggagagaagccctatgagtgtgacctgtgtgggaaatccttcacccagagatccaaacttattacacatcagcgaattcacactggagaaaaaccgtatcagtgtattgaatgcagaaaatccttcaggtggaactctaacctcattgtacatcagagaattcatactggagagaaaccgtatgagtgcactcactgtggaaagtccttcagccaaagctatgagttagttacacataaaagaacgcacactggagaaaaacccttcaaatgtactcagtgtgggaaatctttcagccagaagtatgaccttgttgtacatcagaggacacacactggagagaagccctatgagtgcaacctgtgtgggaaatccttctcccagagttccaaacttattacgcatcagcgaattcacactggagaaaaaccgtatcagtgtattgaatgtgggaaatccttcagatggaactctaacctcgtcatacatcagagaattcatactggagagaaaccgtacgattgcactcactgtggaaagtccttcagccaaagctatcagttagttgcacataaaagaactcacactggagaaaagccctatgaatgtaacgagtgtggaaaagccttcaatcgaagcactcagctcatcaggcatctgcaaattcacactggggagaagccgtacaaatgcaatcagtgcaataaagcctttgcaaggagctcctaccttgtgatgcatcagagaactcacactggtgagaaaccttttgagtgtagtcagtgtgggaaagccttttcagggagctctaaccttctttcccatcacagaattcattctggagagaaaccctatgaatgtagtgactgtgggaaatccttccggcagcgatctcaacttgtagtgcatcggcggacacatactggagagaaaccttaggagtgcagtcattgtgggaaagctttcatccagaggtctcccctcatcatgcaccagaggacgcatgtcggtgggaagagctatcagtgtgacgtgtattaagccagcggttgtgactcattgaacatcagaggacatatcctggagaaaagccctacgaatgcattgattgtgggaaagccttcaatgatcgctcaacccttagtaaacacgagaggacacacactggaggcaaaccctatgaatgtgaccattgcgagaaagcctttagccaacggtgtcaacttactaggcagcagagaattcatactggagagaagccctgtgaatgttaacaaatgtggaaaagcttccagttatgatactttccttattcaacatgagaaagctcatgggcaagaaactctatgaataaccaagatggagccgggtgcagttgccaacacttgtaatcccagcactttgcgaggccgaggcaggtggatcacttgagcccaggagtttgaaaccagcctgggtaacatggcaaaatcctgtctacaaaaaatacaaaaattagcctagcatggtggcgcatacctgtagtcctagctactcaggaggctgaggtgggaggatcacttgagcttgggaggcggttgttgcagtgagctgtgatcatgccatcacaccgctgccttgtgagagattgagacactctaaataaataataaccaagatgggaaatttccctgccagaccttgtttactagaaatcaggtggccaaaacatgactctcagagtggggcttcatgaccatgtgcatcagaattgcctggagtgtgcactgaaactgtgtattaccaagctcactctagccaactaaataaaaatctctggcagta

SEQ ID NO: 423641 - DNA, 3546 bp, Homo sapiens
ccagaaaaaaagatgtgcattggtacggctgggtttaggtcgtattctgtccgcgcgtgtcgtctgagacgctggccttgagagccgccccaagtgatctgggcgtgccggagaaacgagcagggcctgcgtggggtccctcatgcggcgaggccgagcaagggcaggggcctgatgggatcgggatctctccggcctcagggacggggaaggccggtccagtcaggtttcccctgcaggagcgcccggctgggtctgagcttgtcgggaggctctcctgctgcagagctgggacggaacttatagtacctcgcagggtggcagccaagagcctcctggcacagcggcaccaggcaggtgacgcctattggaccccagaggtcatcccagctccagacgtggacacattttcttccaatgatgtctacggatgaggaaactgaggcctggagaggttaaagagacccgttcagagtcctacagtggcagactggtcttctgaggacctctgccctctacacagcggcctcttcaggtgcagggaggaaatggaagcacgttctatgctggttccaccccaggcatctgtgtgcttcgaggatgtggctatggcattcacacaggaggagtgggaacagctggacctggcccagaggacactgtaccgagaggtgacactggagacctgggagcatattgtctccctggctggagcaagaagaggacctgtgcagggcagagcaggaggccccccgagactggaaagctacccttgaggagaataggttgaattctgaaaaagatcgagctagggaagaactatcccaccacgtggaagtgtacaggagtggaccggaggagccaccctctttggtattaggaaaagtgcaagatcagagcaaccagttaagggaacaccaggagaactccttgaggttcatggtactcacctcagagagactgtttgctcaaagggaacattgtgagcttgaacttgggggaggttattctctaccttctactttaagccttctacctacaacattacctacaagtacaggtttccctaagcccaactcacaagttaaagagttgaaacaaaattcagctttcattaatcatgagaaaaatggagcagatgggaagcactgtgagagtcatcagtgtgctagagctttctgtcagagtatttacttgagtaaacttggaaacgttgaaacaggaaagaaaaacccttatgaatatattgtcagtggtgactctctcaactatggttcctccctttgttttcatggtagaactttttcagtgaagaaaagtgatgactgtaaggattatggaaacctcttcagtcacagtgtgtctctgaatgaacagaagccagtgcattttgggaaaagtcagtatgagtgtgatgagtgcagggaaacctgttctgagagtctgtgccttgtacaaacagaaagaagtggccctggagagacccccttcagatgtgaggaacgctgtgctgccttccccatggcctcatctttttctgactgtaacatcattcagactacagagaagccatctgtgtgtaatcagtgtggaaaatctttcagctgttgtaagctcatacaccagagaacacacactggagaaaagcccttcgaatgtactcagtgtgggaaatcttttagccagagctatgaccttgtcatacatcagaggacacacactggagagaagccctatgagtgtgacctgtgtgggaaatccttcacccagagatccaaacttattacacatcagcgaattcacactggagaaaaaccgtatcagtgtattgaatgcagaaaatccttcaggtggaactctaacctcattgtacatcagagaattcatactggagagaaaccgtatgagtgcactcactgtggaaagtccttcagccaaagctatgagttagttacacataaaagaacgcacactggagaaaaacccttcaaatgtactcagtgtgggaaatctttcagccagaagtatgaccttgttgtacatcagaggacacacactggagagaagccctatgagtgcaacctgtgtgggaaatccttctcccagagttccaaacttattacgcatcagcgaattcacactggagaaaaaccgtatcagtgtattgaatgtgggaaatccttcagatggaactctaacctcgtcatacatcagagaattcatactggagagaaaccgtacgattgcactcactgtggaaagtccttcagccaaagctatcagttagttgcacataaaagaactcacactggagaaaagccctatgaatgtaacgagtgtggaaaagccttcaatcgaagcactcagctcatcaggcatctgcaaattcacactggggagaagccgtacaaatgcaatcagtgcaataaagcctttgcaaggagctcctaccttgtgatgcatcagagaactcacactggtgagaaaccttttgagtgtagtcagtgtgggaaagccttttcagggagctctaaccttctttcccatcacagaattcattctggagagaaaccctatgaatgtagtgactgtgggaaatccttccggcagcgatctcaacttgtagtgcatcggcggacacatactggagagaaaccttaggagtgcagtcattgtgggaaagctttcatccagaggtctcccctcatcatgcaccagaggacgcatgtcggtgggaagagctatcagtgtgacgtgtattaagccagcggttgtgactcattgaacatcagaggacatatcctggagaaaagccctacgaatgcattgattgtgggaaagccttcaatgatcgctcaacccttagtaaacacgagaggacacacactggaggcaaaccctatgaatgtgaccattgcgagaaagcctttagccaacggtgtcaacttactaggcagcagagaattcatactggagagaagccctgtgaatgttaacaaatgtggaaaagcttccagttatgatactttccttattcaacatgagaaagctcatgggcaagaaactctatgaataaccaagatggagccgggtgcagttgccaacacttgtaatcccagcactttgcgaggccgaggcaggtggatcacttgagcccaggagtttgaaaccagcctgggtaacatggcaaaatcctgtctacaaaaaatacaaaaattagcctagcatggtggcgcatacctgtagtcctagctactcaggaggctgaggtgggaggatcacttgagcttgggaggcggttgttgcagtgagctgtgatcatgccatcacaccgctgccttgtgagagattgagacactctaaataaataataaccaagatgggaaatttccctgccagaccttgtttactagaaatcaggtggccaaaacatgactctcagagtggggcttcatgaccatgtgcatcagaattgcctggagtgtgcactgaaactgtgtattaccaagctcactctagccaactaaataaaaatctctggcagta

SEQ ID NO: 423642 - DNA, 3322 bp, Homo sapiens
cttctgcggcttagtcgacgcaggtggcagccaagagcctcctggcacagcggcaccaggcaggtgacgcctattggaccccagaggtcatcccagctccagacgtggacacattttcttccaatgatgtctacggatgaggaaactgaggcctggagaggttaaagagacccgttcagagtcctacagtggcaggtaatggagccagtactttgacagcaggttgcaaaactggtcttctgaggacctctgccctctacacagcggcctcttcaggtgcagggaggaaatggaagcacgttctatgctggttccaccccaggcatctgtgtgcttcgaggatgtggctatggcattcacacaggaggagtgggaacagctggacctggcccagaggacactgtaccgagaggtgacactggagacctgggagcatattgtctccctggggcttttcctttccaaatctgatgtgatctctcagctggagcaagaagaggacctgtgcagggcagagcaggaggccccccgagactggaaagctacccttgaggagaataggttgaattctgaaaaagatcgagctagggaagaactatcccaccacgtggaagtgtacaggagtggaccggaggagccaccctctttggtattaggaaaagtgcaagatcagagcaaccagttaagggaacaccaggagaactccttgaggttcatggtactcacctcagagagactgtttgctcaaagggaacattgtgagcttgaacttgggggaggttattctctaccttctactttaagccttctacctacaacattacctacaagtacaggtttccctaagcccaactcacaagttaaagagttgaaacaaaattcagctttcattaatcatgagaaaaatggagcagatgggaagcactgtgagagtcatcagtgtgctagagctttctgtcagagtatttacttgagtaaacttggaaacgttgaaacaggaaagaaaaacccttatgaatatattgtcagtggtgactctctcaactatggttcctccctttgttttcatggtagaactttttcagtgaagaaaagtgatgactgtaaggattatggaaacctcttcagtcacagtgtgtctctgaatgaacagaagccagtgcattttgggaaaagtcagtatgagtgtgatgagtgcagggaaacctgttctgagagtctgtgccttgtacaaacagaaagaagtggccctggagagacccccttcagatgtgaggaacgctgtgctgccttccccatggcctcatctttttctgactgtaacatcattcagactacagagaagccatctgtgtgtaatcagtgtggaaaatctttcagctgttgtaagctcatacaccagagaacacacactggagaaaagcccttcgaatgtactcagtgtgggaaatcttttagccagagctatgaccttgtcatacatcagaggacacacactggagagaagccctatgagtgtgacctgtgtgggaaatccttcacccagagatccaaacttattacacatcagcgaattcacactggagaaaaaccgtatcagtgtattgaatgcagaaaatccttcaggtggaactctaacctcattgtacatcagagaattcatactggagagaaaccgtatgagtgcactcactgtggaaagtccttcagccaaagctatgagttagttacacataaaagaacgcacactggagaaaaacccttcaaatgtactcagtgtgggaaatctttcagccagaagtatgaccttgttgtacatcagaggacacacactggagagaagccctatgagtgcaacctgtgtgggaaatccttctcccagagttccaaacttattacgcatcagcgaattcacactggagaaaaaccgtatcagtgtattgaatgtgggaaatccttcagatggaactctaacctcgtcatacatcagagaattcatactggagagaaaccgtacgattgcactcactgtggaaagtccttcagccaaagctatcagttagttgcacataaaagaactcacactggagaaaagccctatgaatgtaacgagtgtggaaaagccttcaatcgaagcactcagctcatcaggcatctgcaaattcacactggggagaagccgtacaaatgcaatcagtgcaataaagcctttgcaaggagctcctaccttgtgatgcatcagagaactcacactggtgagaaaccttttgagtgtagtcagtgtgggaaagccttttcagggagctctaaccttctttcccatcacagaattcattctggagagaaaccctatgaatgtagtgactgtgggaaatccttccggcagcgatctcaacttgtagtgcatcggcggacacatactggagagaaaccttaggagtgcagtcattgtgggaaagctttcatccagaggtctcccctcatcatgcaccagaggacgcatgtcggtgggaagagctatcagtgtgacgtgtattaagccagcggttgtgactcattgaacatcagaggacatatcctggagaaaagccctacgaatgcattgattgtgggaaagccttcaatgatcgctcaacccttagtaaacacgagaggacacacactggaggcaaaccctatgaatgtgaccattgcgagaaagcctttagccaacggtgtcaacttactaggcagcagagaattcatactggagagaagccctgtgaatgttaacaaatgtggaaaagcttccagttatgatactttccttattcaacatgagaaagctcatgggcaagaaactctatgaataaccaagatggagccgggtgcagttgccaacacttgtaatcccagcactttgcgaggccgaggcaggtggatcacttgagcccaggagtttgaaaccagcctgggtaacatggcaaaatcctgtctacaaaaaatacaaaaattagcctagcatggtggcgcatacctgtagtcctagctactcaggaggctgaggtgggaggatcacttgagcttgggaggcggttgttgcagtgagctgtgatcatgccatcacaccgctgccttgtgagagattgagacactctaaataaataataaccaagatgggaaatttccctgccagaccttgtttactagaaatcaggtggccaaaacatgactctcagagtggggcttcatgaccatgtgcatcagaattgcctggagtgtgcactgaaactgtgtattaccaagctcactctagccaactaaataaaaatctctggcagta

SEQ ID NO: 423643 - DNA, 3621 bp, Homo sapiens
ggccaccggaagcaccgccattggccggtgcgtgcaggtgagtctggcggcctcaaggttggctcggaggttcactgttagccgggtgcggctggagcgcaggaccaggccagagccgccccaagtgatctgggcgtgccggagaaacgagcagggcctgcgtggggtccctcatgcggcgaggccgagcaagggcaggggcctgatgggatcgggatctctccggcctcagggacggggaaggccggtccagtcaggtttcccctgcaaggatgctgccctgtgcttggtgtcttgatgcatttgtctgtgtgatgtggctcatccatgtcttgcatgatgcttgtggactgtgaacattataagtacactctgcagtgttggcatgccaatgatgccatccctgtgcagcatgctgtgcaccatgtgcaggtgacgcctattggaccccagaggtcatcccagctccagacgtggacacattttcttccaatgatgtctacggatgaggaaactgaggcctggagaggttaaagagacccgttcagagtcctacagtggcagactggtcttctgaggacctctgccctctacacagcggcctcttcaggtgcagggaggaaatggaagcacgttctatgctggttccaccccaggcatctgtgtgcttcgaggatgtggctatggcattcacacaggaggagtgggaacagctggacctggcccagaggacactgtaccgagaggtgacactggagacctgggagcatattgtctccctggctggagcaagaagaggacctgtgcagggcagagcaggaggccccccgagactggaaagctacccttgaggagaataggttgaattctgaaaaagatcgagctagggaagaactatcccaccacgtggaagtgtacaggagtggaccggaggagccaccctctttggtattaggaaaagtgcaagatcagagcaaccagttaagggaacaccaggagaactccttgaggttcatggtactcacctcagagagactgtttgctcaaagggaacattgtgagcttgaacttgggggaggttattctctaccttctactttaagccttctacctacaacattacctacaagtacaggtttccctaagcccaactcacaagttaaagagttgaaacaaaattcagctttcattaatcatgagaaaaatggagcagatgggaagcactgtgagagtcatcagtgtgctagagctttctgtcagagtatttacttgagtaaacttggaaacgttgaaacaggaaagaaaaacccttatgaatatattgtcagtggtgactctctcaactatggttcctccctttgttttcatggtagaactttttcagtgaagaaaagtgatgactgtaaggattatggaaacctcttcagtcacagtgtgtctctgaatgaacagaagccagtgcattttgggaaaagtcagtatgagtgtgatgagtgcagggaaacctgttctgagagtctgtgccttgtacaaacagaaagaagtggccctggagagacccccttcagatgtgaggaacgctgtgctgccttccccatggcctcatctttttctgactgtaacatcattcagactacagagaagccatctgtgtgtaatcagtgtggaaaatctttcagctgttgtaagctcatacaccagagaacacacactggagaaaagcccttcgaatgtactcagtgtgggaaatcttttagccagagctatgaccttgtcatacatcagaggacacacactggagagaagccctatgagtgtgacctgtgtgggaaatccttcacccagagatccaaacttattacacatcagcgaattcacactggagaaaaaccgtatcagtgtattgaatgcagaaaatccttcaggtggaactctaacctcattgtacatcagagaattcatactggagagaaaccgtatgagtgcactcactgtggaaagtccttcagccaaagctatgagttagttacacataaaagaacgcacactggagaaaaacccttcaaatgtactcagtgtgggaaatctttcagccagaagtatgaccttgttgtacatcagaggacacacactggagagaagccctatgagtgcaacctgtgtgggaaatccttctcccagagttccaaacttattacgcatcagcgaattcacactggagaaaaaccgtatcagtgtattgaatgtgggaaatccttcagatggaactctaacctcgtcatacatcagagaattcatactggagagaaaccgtacgattgcactcactgtggaaagtccttcagccaaagctatcagttagttgcacataaaagaactcacactggagaaaagccctatgaatgtaacgagtgtggaaaagccttcaatcgaagcactcagctcatcaggcatctgcaaattcacactggggagaagccgtacaaatgcaatcagtgcaataaagcctttgcaaggagctcctaccttgtgatgcatcagagaactcacactggtgagaaaccttttgagtgtagtcagtgtgggaaagccttttcagggagctctaaccttctttcccatcacagaattcattctggagagaaaccctatgaatgtagtgactgtgggaaatccttccggcagcgatctcaacttgtagtgcatcggcggacacatactggagagaaaccttaggagtgcagtcattgtgggaaagctttcatccagaggtctcccctcatcatgcaccagaggacgcatgtcggtgggaagagctatcagtgtgacgtgtattaagccagcggttgtgactcattgaacatcagaggacatatcctggagaaaagccctacgaatgcattgattgtgggaaagccttcaatgatcgctcaacccttagtaaacacgagaggacacacactggaggcaaaccctatgaatgtgaccattgcgagaaagcctttagccaacggtgtcaacttactaggcagcagagaattcatactggagagaagccctgtgaatgttaacaaatgtggaaaagcttccagttatgatactttccttattcaacatgagaaagctcatgggcaagaaactctatgaataaccaagatggagccgggtgcagttgccaacacttgtaatcccagcactttgcgaggccgaggcaggtggatcacttgagcccaggagtttgaaaccagcctgggtaacatggcaaaatcctgtctacaaaaaatacaaaaattagcctagcatggtggcgcatacctgtagtcctagctactcaggaggctgaggtgggaggatcacttgagcttgggaggcggttgttgcagtgagctgtgatcatgccatcacaccgctgccttgtgagagattgagacactctaaataaataataaccaagatgggaaatttccctgccagaccttgtttactagaaatcaggtggccaaaacatgactctcagagtggggcttcatgaccatgtgcatcagaattgcctggagtgtgcactgaaactgtgtattaccaagctcactctagccaactaaataaaaatctctggcagta

SEQ ID NO: 423644 - DNA, 2403 bp, Homo sapiens
  misc_feature (9)..(9): n is a, c, g, or t
ccaacttangtgctaggtacgaggctgggtgtgagctgtcagagtatttacttgagtaaacttggaaacgttgaaacaggaaagaaaaacccttatgaatatattgtcagtggtgactctctcaactatggttcctccctttgttttcatggtagaactttttcagtgaagaaaagtgatgactgtaaggattatggaaacctcttcagtcacagtgtgtctctgaatgaacagaagccagtgcattttgggaaaagtcagtatgagtgtgatgagtgcagggaaacctgttctgagagtctgtgccttgtacaaacagaaagaagtggccctggagagacccccttcagatgtgaggaacgctgtgctgccttccccatggcctcatctttttctgactgtaacatcattcagactacagagaagccatctgtgtgtaatcagtgtggaaaatctttcagctgttgtaagctcatacaccagagaacacacactggagaaaagcccttcgaatgtactcagtgtgggaaatcttttagccagagctatgaccttgtcatacatcagaggacacacactggagagaagccctatgagtgtgacctgtgtgggaaatccttcacccagagatccaaacttattacacatcagcgaattcacactggagaaaaaccgtatcagtgtattgaatgcagaaaatccttcaggtggaactctaacctcattgtacatcagagaattcatactggagagaaaccgtatgagtgcactcactgtggaaagtccttcagccaaagctatgagttagttacacataaaagaacgcacactggagaaaaacccttcaaatgtactcagtgtgggaaatctttcagccagaagtatgaccttgttgtacatcagaggacacacactggagagaagccctatgagtgcaacctgtgtgggaaatccttctcccagagttccaaacttattacgcatcagcgaattcacactggagaaaaaccgtatcagtgtattgaatgtgggaaatccttcagatggaactctaacctcgtcatacatcagagaattcatactggagagaaaccgtacgattgcactcactgtggaaagtccttcagccaaagctatcagttagttgcacataaaagaactcacactggagaaaagccctatgaatgtaacgagtgtggaaaagccttcaatcgaagcactcagctcatcaggcatctgcaaattcacactggggagaagccgtacaaatgcaatcagtgcaataaagcctttgcaaggagctcctaccttgtgatgcatcagagaactcacactggtgagaaaccttttgagtgtagtcagtgtgggaaagccttttcagggagctctaaccttctttcccatcacagaattcattctggagagaaaccctatgaatgtagtgactgtgggaaatccttccggcagcgatctcaacttgtagtgcatcggcggacacatactggagagaaaccttaggagtgcagtcattgtgggaaagctttcatccagaggtctcccctcatcatgcaccagaggacgcatgtcggtgggaagagctatcagtgtgacgtgtattaagccagcggttgtgactcattgaacatcagaggacatatcctggagaaaagccctacgaatgcattgattgtgggaaagccttcaatgatcgctcaacccttagtaaacacgagaggacacacactggaggcaaaccctatgaatgtgaccattgcgagaaagcctttagccaacggtgtcaacttactaggcagcagagaattcatactggagagaagccctgtgaatgttaacaaatgtggaaaagcttccagttatgatactttccttattcaacatgagaaagctcatgggcaagaaactctatgaataaccaagatggagccgggtgcagttgccaacacttgtaatcccagcactttgcgaggccgaggcaggtggatcacttgagcccaggagtttgaaaccagcctgggtaacatggcaaaatcctgtctacaaaaaatacaaaaattagcctagcatggtggcgcatacctgtagtcctagctactcaggaggctgaggtgggaggatcacttgagcttgggaggcggttgttgcagtgagctgtgatcatgccatcacaccgctgccttgtgagagattgagacactctaaataaataataaccaagatgggaaatttccctgccagaccttgtttactagaaatcaggtggccaaaacatgactctcagagtggggcttcatgaccatgtgcatcagaattgcctggagtgtgcactgaaactgtgtattaccaagctcactctagccaactaaataaaaatctctggcagta

SEQ ID NO: 423645 - DNA, 1249 bp, Homo sapiens
  misc_feature (29)..(29): n is a, c, g, or t
gacatcaaaaatggttaggtacgaggctnggttttggagagttcactgttagccgggtgcggctggagcgcaggaccaggccagagccgccccaagtgatctgggcgtgccggagaaacgagcagggcctgcgtggggtccctcatgcggcgaggccgagcaagggcaggggcctgatgggatcgggatctctccggcctcagggacggggaaggccggtccagtcaggtttcccctgcaggagcgcccggctgggtctgagcttgtcgggaggctctcctgctgcagagctgggacggaacttatagtacctcgcagggtggcagccaagagcctcctggcacagcggcaccaggcaggtgacgcctattggaccccagaggtcatcccagctccagacgtggacacattttcttccaatgatgtctacggatgaggaaactgaggcctggagaggttaaagagacccgttcagagtcctacagtggcagactggtcttctgaggacctctgccctctacacagcggcctcttcaggtgcagggaggaaatggaagcacgttctatgctggttccaccccaggcatctgtgtgcttcgaggatgtggctatggcattcacacaggaggagtgggaacagctggacctggcccagaggacactgtaccgagaggtgacactggagacctgggagcatattgtctccctggctggagcaagaagaggacctgtgcagggcagagcaggaggccccccgagggaaaatgacatttgaagacaaagtcagacatctacaagccaaggaatgccagagattgccagcaaaccaccaaaaactaaggaaagggatggaacatatactttcttgtagccctcagaaggaaccaactatgccaacactttgatctcagacttctgagcaagctgggaaaaaaaaaaaaaaaaaccggaaaaacaggacggaaggcggggaaacgacagggggcctcacaagtgattggccacaccaaattccaaaaaggagatgaaagagggaaagcaaaagaaagacagagacacacggaacgacagaacgaccgaaagaccgaaagaccgaaagacagaaacacacgaacgacagaacgacagaacgaacgaaacggtggcctcacaatgattggcaaaaacactttacaaaacaggagattttccaaccaccccaacattgtttagtcaacttgattacaaccaattatgattgtcccccagt

SEQ ID NO: 423646 - DNA, 1078 bp, Homo sapiens
  misc_feature (29)..(29): n is a, c, g, or t
gacatcaaaaatggttaggtacgaggctnggttttggagagttcactgttagccgggtgcggctggagcgcaggaccaggccagagccgccccaagtgatctgggcgtgccggagaaacgagcagggcctgcgtggggtccctcatgcggcgaggccgagcaagggcaggggcctgatgggatcgggatctctccggcctcagggacggggaaggccggtccagtcaggtttcccctgcaggagcgcccggctgggtctgagcttgtcgggaggctctcctgctgcagagctgggacggaacttatagtacctcgcagggtggcagccaagagcctcctggcacagcggcaccaggcaggtgacgcctattggaccccagaggtcatcccagctccagacgtggacacattttcttccaatgatgtctacggatgaggaaactgaggcctggagaggttaaagagacccgttcagagtcctacagtggcagactggtcttctgaggacctctgccctctacacagcggcctcttcaggtgcagggaggaaatggaagcacgttctatgctggttccaccccaggcatctgtgtgcttcgaggatgtggctatggcattcacacaggaggagtgggaacagctggacctggcccagaggacactgtaccgagaggtgacactggagacctgggagcatattgtctccctggctggagcaagaagaggacctgtgcagggcagagcaggaggccccccgaggaacgaggcccagcaaaaagcagagacggtacagggccagaaggatctgagagagtgtggccagcttgagcccctcaggagtcggccagaaggatctgagagagtgtggccagcttgagcccctcgggagtcagctcctccgtccccactggtaacgtcttcaccccttcaacacggtgtgaagggccatgtcatggttgatcttcagtccctcagactacaccatcagccccatgggggtgagcaaataacaagtaactatactgttccctgctatgtgtctggctcttggtaaaatttaaaaaagttaaaaattaaa

SEQ ID NO: 423647 - DNA, 959 bp, Homo sapiens
cttctgcggcttagtcgacgcaggtggcagccaagagcctcctggcacagcggcaccaggcaggtgacgcctattggaccccagaggtcatcccagctccagacgtggacacattttcttccaatgatgtctacggatgaggaaactgaggcctggagaggttaaagagacccgttcagagtcctacagtggcaggtaatggagccagtactttgacagcaggttgcaaaactggtcttctgaggacctctgccctctacacagcggcctcttcaggtgcagggaggaaatggaagcacgttctatgctggttccaccccaggcatctgtgtgcttcgaggatgtggctatggcattcacacaggaggagtgggaacagctggacctggcccagaggacactgtaccgagaggtgacactggagacctgggagcatattgtctccctggggcttttcctttccaaatctgatgtgatctctcagctggagcaagaagaggacctgtgcagggcagagcaggaggccccccgagagaaggggatgctgcctgggagctttttgggactcccaatagaagacagatttagtctcctggaaggctgcctgatccagttcccacagcagctgccacttgctcaggaacgaggcccagcaaaaagcagagacggtacagggccagaaggatctgagagagtgtggccagcttgagcccctcaggagtcggccagaaggatctgagagagtgtggccagcttgagcccctcgggagtcagctcctccgtccccactggtaacgtcttcaccccttcaacacggtgtgaagggccatgtcatggttgatcttcagtccctcagactacaccatcagccccatgggggtgagcaaataacaagtaactatactgttccctgctatgtgtctggctcttggtaaaatttaaaaaagttaaaaattaaa

SEQ ID NO: 423648 - DNA, 2430 bp, Homo sapiens
gaaaggaggagaggaagagaggactaagaggggagcaaggcgaggaggccgcggcgggcgcagcgggcacctgggccgtgctgcccccgcgagcaaggcgccgccattccgctgctcggggcgccgccgccgccgccaccgcgcccaggggccatgctcccgccgcccccgcgccagccgccgccccaggcgcgtgcggcccgcggcgcggtgcgcctgcagcggcccttcctgcgcagcccgctgggcgtgttgcggctgctgcagctgctggccggcgctgccttctggatcactatcgccaccagcaagtaccagggccccgtgcacttcgcgctcttcgtgtccgtgctcttctggctgctcaccctgggcctctacttcctcacgctgctgggcaagcacgagctggtccccgtgctgggctcgcgctggctcatggtcaacgtggcgcacgatgtgctggcggccgcgctctacggcgccgccaccggcatcatgagcgaccagatgcagcgccacagctactgcaacctcaaggattacccgctcccctgcgcctaccacgccttcctggcggccgccgtctgcggcggcgtctgccacggcctctacctgctttcggcgctctatggctgcgggcgtcgctgccagggcaagcaggaggtggcgtgaggccgcccgcgcccgccgcggccccgatcggggcgggggaatccccggagaccagcctccttaatcccttcccccgccgccgccccgcgcgggtgcgccctggcaccctctccctgccctccagcgtttccactgtcgcccgcgcccgggaaccctgacgctcagctcccgcccgacggcagcgccgccgccgcccagaatcccagcccagaatcccgaccgccgcgccggacgcgccgtctcccgggacaagcgcaggctgcgatccgaggggctgacacacactcgcagacgagccgccccgaggcgaaacctcgcggttcctcttcccttccctgctgagactaagacgtggacaggggccgcgcagatccgggggaggctcccaaattggaaccaggcttctggctgcccccttccctcccgccccgtggtcggaagagcactcccttccctggcccctcatccagcctccggtgctgtaaaacgcaggcgctgggccgcgggcggagctgaggacaggccttggctggtcccaggatgagcgacgagtttggttttagctggggattgtgctggcatcctgcgaagctcctcccagccggtctctctgtgctcggttgtcttggggtggggcccatccgccgaggtggggaccgataggagaagccggctaaaggaaagtcacctgcaagagatcccggcactgatctggagcagctgacagggtgggtctcccttaccaaagagaagaaccactctctggcgctggggtgacctgctggctgggcctgtaaggtttccatgttgctgaggccatggagattcccagagctggtcacaccgaccgctctcagggcccgctgccctgggctggcaacaccattctggccttggcctgcagaagctttcagagtcttcactggcagtagggggagatggggagaggaatgatctctgcccagccccttcctttccaaaccatgcaatggaagagcccagatgggtgaagattgattttgccttaactcaagagaattcctgttctccttgtgctatgatttggacacaagattctggatacctggaacttagctgtgtactcctgtaccctaaacagtggatttgagttccagcgtttattcttttttccttttttcagatcaccatctaagttacatctttagctcaggtccatccttctcaagatctccttcttagccccccagcccctggtgctgtctgtggtcaggtgaccttactcaggagcagatatctccttggccgccatggagcctcatccatccacacgtgcctgtagcattccagagctcactgcccttctagatgtgccttcccgcttggcttccagcggcttgtgctcactctgtctgccaggtatgagaagaacacgtaagaccgccaccacactcaccctccctcaaggccctgtgccataggggtggccacccgacctgcccccagaacttttggatactggaggcagttgcataggtctccctctctgggcaccaggactcagtccagcccaagactactctgggcagctcccatcccagtctggggccatttgcagactcaggaaaggatttctacagtgttctataaaagccaaaagagagagtgggtttgggaagagtgagggtggttggggagaggggaccgatgtgcctcattgtttagtggtgattacaaatatgcttttctggataaagtttggttgtttgctcttgg

SEQ ID NO: 423649 - DNA, 1213 bp, Homo sapiens
cgagctgggggcctggcgcagaggggaaaggggggcgccagggtgatggggacccagagcctgctcttgggaacagccagagtaagattggaacccagacttgcagtccagcgctgtttgcattaaaagggctaaaggaaagtcacctgcaagagatcccggcactgatctggagcagctgacagggtgggtctcccttaccaaagagaagaaccactctctggcgctggggtgacctgctggctgggcctgtaaggtttccatgttgctgaggccatggagattcccagagctggtcacaccgaccgctctcagggcccgctgccctgggctggcaacaccattctggccttggcctgcagaagctttcagagtcttcactggcagtagggggagatggggagaggaatgatctctgcccagccccttcctttccaaaccatgcaatggaagagcccagatgggtgaagattgattttgccttaactcaagagaattcctgttctccttgtgctatgatttggacacaagattctggatacctggaacttagctgtgtactcctgtaccctaaacagtggatttgagttccagcgtttattcttttttccttttttcagatcaccatctaagttacatctttagctcaggtccatccttctcaagatctccttcttagccccccagcccctggtgctgtctgtggtcaggtgaccttactcaggagcagatatctccttggccgccatggagcctcatccatccacacgtgcctgtagcattccagagctcactgcccttctagatgtgccttcccgcttggcttccagcggcttgtgctcactctgtctgccaggtatgagaagaacacgtaagaccgccaccacactcaccctccctcaaggccctgtgccataggggtggccacccgacctgcccccagaacttttggatactggaggcagttgcataggtctccctctctgggcaccaggactcagtccagcccaagactactctgggcagctcccatcccagtctggggccatttgcagactcaggaaaggatttctacagtgttctataaaagccaaaagagagagtgggtttgggaagagtgagggtggttggggagaggggaccgatgtgcctcattgtttagtggtgattacaaatatgcttttctggataaagtttggttgtttgctcttgg

SEQ ID NO: 423650 - DNA, 3051 bp, Homo sapiens
gaaaggaggagaggaagagaggactaagaggggagcaaggcgaggaggccgcggcgggcgcagcgggcacctgggccgtgctgcccccgcgagcaaggcgccgccattccgctgctcggggcgccgccgccgccgccaccgcgcccaggggccatgctcccgccgcccccgcgccagccgccgccccaggcgcgtgcggcccgcggcgcggtgcgcctgcagcggcccttcctgcgcagcccgctgggcgtgttgcggctgctgcagctgctggccggcgctgccttctggatcactatcgccaccagcaagtaccagggccccgtgcacttcgcgctcttcgtgtccgtgctcttctggctgctcaccctgggcctctacttcctcacgctgctgggcaagcacgagctggtccccgtgctgggctcgcgctggctcatggtcaacgtggcgcacgatgtgctggcggccgcgctctacggcgccgccaccggcatcatgagcgaccagatgcagcgccacagctactgcaacctcaaggattacccgctcccctgcgcctaccacgccttcctggcggccgccgtctgcggcggcgtctgccacggcctctacctgctttcggcgctctatggctgcgggcgtcgctgccagggcaagcaggaggtggcgtgaggccgcccgcgcccgccgcggccccgatcggggcgggggaatccccggagaccagcctccttaatcccttcccccgccgccgccccgcgcgggtgcgccctggcaccctctccctgccctccagcgtttccactgtcgcccgcgcccgggaaccctgacgctcagctcccgcccgacggcagcgccgccgccgcccagaatcccagcccagaatcccgaccgccgcgccggacgcgccgtctcccgggacaagcgcaggctgcgatccgaggggctgacacacactcgcagacgagccgccccgaggcgaaacctcgcggttcctcttcccttccctgctgagactaagacgtggacaggggccgcgcagatccgggggaggctcccaaattggaaccaggcttctggctgcccccttccctcccgccccgtggtcggaagagcactcccttccctggcccctcatccagcctccggtgctgtaaaacgcaggcgctgggccgcgggcggagctgaggacaggccttggctggtcccaggatgagcgacgagtttggttttagctggggattgtgctggcatcctgcgaagctcctcccagccggtctctctgtgctcggttgtcttggggtggggcccatccgccgaggtggggaccgataggagaagccggtgggttgtacccttacacttgtggagtctcctcttgcctctacctactccgcctttgtccttaaggtttttgcaggccagtgccaaacacacactaactgtcctggcctctccgtgacacaagtctcttcccagccttcctcacaggcttctgccgcccccctcatctccaccctcccccatatctgtttgcattaggagttccacgaccatggtggaatgttaaggtgaaccccaccccttcttacagatggggacccagagcctgctcttgggaacagccagagtaagattggaacccagacttgcagtccagcgctgtttgcattaaaagggtgggtgagtcaggacccctggctcaggagccgcctctcctaaaagagggtttcaaggccaaatgggtttgtcaacggtgctgtctccctttcttggagatgctcattagcttatcaaagactgagaagtcccgctgttacagaaataatttagtttgctgtattaactgctcctgggcctggagcagtattcccaccttaagattcccagcatccctgtgctgtcccggctctcattcatgccgaagggcccaacccattggctgtgttctgtttgaagatttggggggcgccttctctttcttccccagggaattctctagcagagggaggggacccaccccagtgaggaagtagattgctgcctctagccagagacctgaactggggaatttgaacattcctttacattgttggagaaatgaagccaaagttattcagatggttttcccaggctaaaggaaagtcacctgcaagagatcccggcactgatctggagcagctgacagggtgggtctcccttaccaaagagaagaaccactctctggcgctggggtgacctgctggctgggcctgtaaggtttccatgttgctgaggccatggagattcccagagctggtcacaccgaccgctctcagggcccgctgccctgggctggcaacaccattctggccttggcctgcagaagctttcagagtcttcactggcagtagggggagatggggagaggaatgatctctgcccagccccttcctttccaaaccatgcaatggaagagcccagatgggtgaagattgattttgccttaactcaagagaattcctgttctccttgtgctatgatttggacacaagattctggatacctggaacttagctgtgtactcctgtaccctaaacagtggatttgagttccagcgtttattcttttttccttttttcagatcaccatctaagttacatctttagctcaggtccatccttctcaagatctccttcttagccccccagcccctggtgctgtctgtggtcaggtgaccttactcaggagcagatatctccttggccgccatggagcctcatccatccacacgtgcctgtagcattccagagctcactgcccttctagatgtgccttcccgcttggcttccagcggcttgtgctcactctgtctgccaggtatgagaagaacacgtaagaccgccaccacactcaggaaaggatttctacagtgttctataaaagccaaaagagagagtgggtttgggaagagtgagggtggttggggagaggggaccgatgtgcctcattgtttagtggtgattacaaatatgcttttctggataaagtttggttgtttgctcttgg

SEQ ID NO: 423651 - DNA, 3191 bp, Homo sapiens
  misc_feature (2782)..(2782): n is a, c, g, or t
  misc_feature (3105)..(3105): n is a, c, g, or t
  misc_feature (3127)..(3127): n is a, c, g, or t
  misc_feature (3169)..(3169): n is a, c, g, or t
  misc_feature (3172)..(3173): n is a, c, g, or t
  misc_feature (3175)..(3184): n is a, c, g, or t
  misc_feature (3188)..(3188): n is a, c, g, or t
  misc_feature (3191)..(3191): n is a, c, g, or t
gaaaggaggagaggaagagaggactaagaggggagcaaggcgaggaggccgcggcgggcgcagcgggcacctgggccgtgctgcccccgcgagcaaggcgccgccattccgctgctcggggcgccgccgccgccgccaccgcgcccaggggccatgctcccgccgcccccgcgccagccgccgccccaggcgcgtgcggcccgcggcgcggtgcgcctgcagcggcccttcctgcgcagcccgctgggcgtgttgcggctgctgcagctgctggccggcgctgccttctggatcactatcgccaccagcaagtaccagggccccgtgcacttcgcgctcttcgtgtccgtgctcttctggctgctcaccctgggcctctacttcctcacgctgctgggcaagcacgagctggtccccgtgctgggctcgcgctggctcatggtcaacgtggcgcacgatgtgctggcggccgcgctctacggcgccgccaccggcatcatgagcgaccagatgcagcgccacagctactgcaacctcaaggattacccgctcccctgcgcctaccacgccttcctggcggccgccgtctgcggcggcgtctgccacggcctctacctgctttcggcgctctatggctgcgggcgtcgctgccagggcaagcaggaggtggcgtgaggccgcccgcgcccgccgcggccccgatcggggcgggggaatccccggagaccagcctccttaatcccttcccccgccgccgccccgcgcgggtgcgccctggcaccctctccctgccctccagcgtttccactgtcgcccgcgcccgggaaccctgacgctcagctcccgcccgacggcagcgccgccgccgcccagaatcccagcccagaatcccgaccgccgcgccggacgcgccgtctcccgggacaagcgcaggctgcgatccgaggggctgacacacactcgcagacgagccgccccgaggcgaaacctcgcggttcctcttcccttccctgctgagactaagacgtggacaggggccgcgcagatccgggggaggctcccaaattggaaccaggcttctggctgcccccttccctcccgccccgtggtcggaagagcactcccttccctggcccctcatccagcctccggtgctgtaaaacgcaggcgctgggccgcgggcggagctgaggacaggccttggctggtcccaggatgagcgacgagtttggttttagctggggattgtgctggcatcctgcgaagctcctcccagccggtctctctgtgctcggttgtcttggggtggggcccatccgccgaggtggggaccgataggagaagccggtgggttgtacccttacacttgtggagtctcctcttgcctctacctactccgcctttgtccttaaggtttttgcaggccagtgccaaacacacactaactgtcctggcctctccgtgacacaagtctcttcccagccttcctcacaggcttctgccgcccccctcatctccaccctcccccatatctgtttgcattaggagttccacgaccatggtggaatgttaaggtgaaccccaccccttcttacagatggggacccagagcctgctcttgggaacagccagagtaagattggaacccagacttgcagtccagcgctgtttgcattaaaagggtgggtgagtcaggacccctggctcaggagccgcctctcctaaaagagggtttcaaggccaaatgggtttgtcaacggtgctgtctccctttcttggagatgctcattagcttatcaaagactgagaagtcccgctgttacagaaataatttagtttgctgtattaactgctcctgggcctggagcagtattcccaccttaagattcccagcatccctgtgctgtcccggctctcattcatgccgaagggcccaacccattggctgtgttctgtttgaagatttggggggcgccttctctttcttccccagggaattctctagcagagggaggggacccaccccagtgaggaagtagattgctgcctctagccagagacctgaactggggaatttgaacattcctttacattgttggagaaatgaagccaaagttattcagatggttttcccaggctaaaggaaagtcacctgcaagagatcccggcactgatctggagcagctgacagggtgggtctcccttaccaaagagaagaaccactctctggcgctggggtgacctgctggctgggcctgtaaggtttccatgttgctgaggccatggagattcccagagctggtcacaccgaccgctctcagggcccgctgccctgggctggcaacaccattctggccttggcctgcagaagctttcagagtcttcactggcagtagggggagatggggagaggaatgatctctgcccagccccttcctttccaaaccatgcaatggaagagcccagatgggtgaagattgattttgccttaactcaagagaattcctgttctccttgtgctatgatttggacacaagattctggatacctggaacttagctgtgtactcctgtaccctaaacagtggatttgagttccagcgtttattcttttttccttttttcagatcaccatctaagttacatctttagctcaggtccatccttctcaagatctccttcttagccccccagcccctggtgctgtctgtggtcaggtgaccttactcaggagcagatatctccttggccgccatggagcctcatccatccacacgtgcctntagcatgactcgttctaatttttgggtgagctcaggctgtgatgtcagaggtgagctctatctcttattagttgtccagtcttaggcaatttatgaaacctctttgcctcttagcttcctcacttagtaaatggggataatattagtacctacctcactgggctgttgaaagagcttcatgagatgaggcgtgcctggcaatttcatcagtgcaattcagccctcagcagtatatgtttgttgggaggatttcataagatatacataaaatgctgggctcaacgcctgacccacagtcatagttagtgctcataaatgtgaantccctcctgccccattccactntgggtctccctgcacctaaggaatgataatctcaccagcctnggnnannnnnnnnnnctcnttn

SEQ ID NO: 423652 - DNA, 3219 bp, Homo sapiens
gaaaggaggagaggaagagaggactaagaggggagcaaggcgaggaggccgcggcgggcgcagcgggcacctgggccgtgctgcccccgcgagcaaggcgccgccattccgctgctcggggcgccgccgccgccgccaccgcgcccaggggccatgctcccgccgcccccgcgccagccgccgccccaggcgcgtgcggcccgcggcgcggtgcgcctgcagcggcccttcctgcgcagcccgctgggcgtgttgcggctgctgcagctgctggccggcgctgccttctggatcactatcgccaccagcaagtaccagggccccgtgcacttcgcgctcttcgtgtccgtgctcttctggctgctcaccctgggcctctacttcctcacgctgctgggcaagcacgagctggtccccgtgctgggctcgcgctggctcatggtcaacgtggcgcacgatgtgctggcggccgcgctctacggcgccgccaccggcatcatgagcgaccagatgcagcgccacagctactgcaacctcaaggattacccgctcccctgcgcctaccacgccttcctggcggccgccgtctgcggcggcgtctgccacggcctctacctgctttcggcgctctatggctgcgggcgtcgctgccagggcaagcaggaggtggcgtgaggccgcccgcgcccgccgcggccccgatcggggcgggggaatccccggagaccagcctccttaatcccttcccccgccgccgccccgcgcgggtgcgccctggcaccctctccctgccctccagcgtttccactgtcgcccgcgcccgggaaccctgacgctcagctcccgcccgacggcagcgccgccgccgcccagaatcccagcccagaatcccgaccgccgcgccggacgcgccgtctcccgggacaagcgcaggctgcgatccgaggggctgacacacactcgcagacgagccgccccgaggcgaaacctcgcggttcctcttcccttccctgctgagactaagacgtggacaggggccgcgcagatccgggggaggctcccaaattggaaccaggcttctggctgcccccttccctcccgccccgtggtcggaagagcactcccttccctggcccctcatccagcctccggtgctgtaaaacgcaggcgctgggccgcgggcggagctgaggacaggccttggctggtcccaggatgagcgacgagtttggttttagctggggattgtgctggcatcctgcgaagctcctcccagccggtctctctgtgctcggttgtcttggggtggggcccatccgccgaggtggggaccgataggagaagccggtgggttgtacccttacacttgtggagtctcctcttgcctctacctactccgcctttgtccttaaggtttttgcaggccagtgccaaacacacactaactgtcctggcctctccgtgacacaagtctcttcccagccttcctcacaggcttctgccgcccccctcatctccaccctcccccatatctgtttgcattaggagttccacgaccatggtggaatgttaaggtgaaccccaccccttcttacagatggggacccagagcctgctcttgggaacagccagagtaagattggaacccagacttgcagtccagcgctgtttgcattaaaagggtgggtgagtcaggacccctggctcaggagccgcctctcctaaaagagggtttcaaggccaaatgggtttgtcaacggtgctgtctccctttcttggagatgctcattagcttatcaaagactgagaagtcccgctgttacagaaataatttagtttgctgtattaactgctcctgggcctggagcagtattcccaccttaagattcccagcatccctgtgctgtcccggctctcattcatgccgaagggcccaacccattggctgtgttctgtttgaagatttggggggcgccttctctttcttccccagggaattctctagcagagggaggggacccaccccagtgaggaagtagattgctgcctctagccagagacctgaactggggaatttgaacattcctttacattgttggagaaatgaagccaaagttattcagatggttttcccaggctaaaggaaagtcacctgcaagagatcccggcactgatctggagcagctgacagggtgggtctcccttaccaaagagaagaaccactctctggcgctggggtgacctgctggctgggcctgtaaggtttccatgttgctgaggccatggagattcccagagctggtcacaccgaccgctctcagggcccgctgccctgggctggcaacaccattctggccttggcctgcagaagctttcagagtcttcactggcagtagggggagatggggagaggaatgatctctgcccagccccttcctttccaaaccatgcaatggaagagcccagatgggtgaagattgattttgccttaactcaagagaattcctgttctccttgtgctatgatttggacacaagattctggatacctggaacttagctgtgtactcctgtaccctaaacagtggatttgagttccagcgtttattcttttttccttttttcagatcaccatctaagttacatctttagctcaggtccatccttctcaagatctccttcttagccccccagcccctggtgctgtctgtggtcaggtgaccttactcaggagcagatatctccttggccgccatggagcctcatccatccacacgtgcctgtagcattccagagctcactgcccttctagatgtgccttcccgcttggcttccagcggcttgtgctcactctgtctgccaggtatgagaagaacacgtaagaccgccaccacactcaccctccctcaaggccctgtgccataggggtggccacccgacctgcccccagaacttttggatactggaggcagttgcataggtctccctctctgggcaccaggactcagtccagcccaagactactctgggcagctcccatcccagtctggggccatttgcagactcaggaaaggatttctacagtgttctataaaagccaaaagagagagtgggtttgggaagagtgagggtggttggggagaggggaccgatgtgcctcattgtttagtggtgattacaaatatgcttttctggataaagtttggttgtttgctcttgg

SEQ ID NO: 423653 - DNA, 3123 bp, Homo sapiens
gaaaggaggagaggaagagaggactaagaggggagcaaggcgaggaggccgcggcgggcgcagcgggcacctgggccgtgctgcccccgcgagcaaggcgccgccattccgctgctcggggcgccgccgccgccgccaccgcgcccaggggccatgctcccgccgcccccgcgccagccgccgccccaggcgcgtgcggcccgcggcgcggtgcgcctgcagcggcccttcctgcgcagcccgctgggcgtgttgcggctgctgcagctgctggccggcgctgccttctggatcactatcgccaccagcaagtaccagggccccgtgcacttcgcgctcttcgtgtccgtgctcttctggctgctcaccctgggcctctacttcctcacgctgctgggcaagcacgagctggtccccgtgctgggctcgcgctggctcatggtcaacgtggcgcacgatgtgctggcggccgcgctctacggcgccgccaccggcatcatgagcgaccagatgcagcgccacagctactgcaacctcaaggattacccgctcccctgcgcctaccacgccttcctggcggccgccgtctgcggcggcgtctgccacggcctctacctgctttcggcgctctatggctgcgggcgtcgctgccagggcaagcaggaggtggcgtgaggccgcccgcgcccgccgcggccccgatcggggcgggggaatccccggagaccagcctccttaatcccttcccccgccgccgccccgcgcgggtgcgccctggcaccctctccctgccctccagcgtttccactgtcgcccgcgcccgggaaccctgacgctcagctcccgcccgacggcagcgccgccgccgcccagaatcccagcccagaatcccgaccgccgcgccggacgcgccgtctcccgggacaagcgcaggctgcgatccgaggggctgacacacactcgcagacgagccgccccgaggcgaaacctcgcggttcctcttcccttccctgctgagactaagacgtggacaggggccgcgcagatccgggggaggctcccaaattggaaccaggcttctggctgcccccttccctcccgccccgtggtcggaagagcactcccttccctggcccctcatccagcctccggtgctgtaaaacgcaggcgctgggccgcgggcggagctgaggacaggccttggctggtcccaggatgagcgacgagtttggttttagctggggattgtgctggcatcctgcgaagctcctcccagccggtctctctgtgctcggttgtcttggggtggggcccatccgccgaggtggggaccgataggagaagccggtgggttgtacccttacacttgtggagtctcctcttgcctctacctactccgcctttgtccttaaggtttttgcaggccagtgccaaacacacactaactgtcctggcctctccgtgacacaagtctcttcccagccttcctcacaggcttctgccgcccccctcatctccaccctcccccatatctgtttgcattaggagttccacgaccatggtggaatgttaaggtgaaccccaccccttcttacagatggggacccagagcctgctcttgggaacagccagagtaagattggaacccagacttgcagtccagcgctgtttgcattaaaagggtgggtgagtcaggacccctggctcaggagccgcctctcctaaaagagggtttcaaggccaaatgggtttgtcaacggtgctgtctccctttcttggagatgctcattagcttatcaaagactgagaagtcccgctgttacagaaataatttagtttgctgtattaactgctcctgggcctggagcagtattcccaccttaagattcccagcatccctgtgctgtcccggctctcattcatgccgaagggcccaacccattggctgtgttctgtttgaagatttggggggcgccttctctttcttccccagggaattctctagcagagggaggggacccaccccagtgaggaagtagattgctgcctctagccagagacctgaactggggaatttgaacattcctttacattgttggagaaatgaagccaaagttattcagatggttttcccaggctaaaggaaagtcacctgcaagagatcccggcactgatctggagcagctgacagggtgggtctcccttaccaaagagaagaaccactctctggcgctggggtgacctgctggctgggcctgtaaggtttccatgttgctgaggccatggagattcccagagctggtcacaccgaccgctctcagggcccgctgccctgggctggcaacaccattctggccttggcctgcagaagctttcagagtcttcactggcagtagggggagatggggagaggaatgatctctgcccagccccttcctttccaaaccatgcaatggaagagcccagatgggtgaagattgattttgccttaactcaagagaattcctgttctccttgtgctatgatttggacacaagattctggatacctggaacttagctgtgtactcctgtaccctaaacagtggatttgagttccagcgtttattcttttttccttttttcagatcaccatctaagttacatctttagctcaggtccatccttctcaagatctccttcttagccccccagcccctggtgctgtctgtggtcaggtgaccttactcaggagcagatatctccttggccgccatggagcctcatccatccacacgtgcctgtagcattccagagctcactgcccttctagatgtgccttcccgcttggcttccagcggcttgtgctcactctgtctgccaggtatgagaagaacacgtaagaccgccaccacctgggcaccaggactcagtccagcccaagactactctgggcagctcccatcccagtctggggccatttgcagactcaggaaaggatttctacagtgttctataaaagccaaaagagagagtgggtttgggaagagtgagggtggttggggagaggggaccgatgtgcctcattgtttagtggtgattacaaatatgcttttctggataaagtttggttgtttgctcttgg

SEQ ID NO: 423654 - DNA, 96 bp, Homo sapiens
tgcattagaattttggggatggctgtgtagaaagatggttttattagtgaagcatttccaaaacttattatcaggagaacccttaatttctcattt

SEQ ID NO: 423655 - DNA, 442 bp, Homo sapiens
aaaaattgccagtcaagaatatgagacccagcaaagctatccttcagataaataaagtctgtcatagacaagcaaaaactgaagtaatttatcaccactagactggtcttacaagaaataatctagggaatactacatttggaaggaaaaagataataatcactatcattaaaacatataaaagtataaaactcactggcagaacagatacacaaaagagagaaaagaattaaaccttatcagtatagaaaaccattaaatgacaatgataaacaataagagagaaggaaaggatcaatggatgtacaaaacaaccagaaaacaacaaaatataggagtatgtcctcacctattaataaaaaccttaaatgtaagtgaattaaattccccacttaaaagatatagactgaatggattttaaaaaccaactatatgctgccta

SEQ ID NO: 423656 - DNA, 1707 bp, Homo sapiens
  misc_feature (3)..(3): n is a, c, g, or t
  misc_feature (19)..(20): n is a, c, g, or t
  misc_feature (23)..(24): n is a, c, g, or t
  misc_feature (30)..(30): n is a, c, g, or t
atngctaggtaagaggctnngtnntgaatnggccgaggcgctgcggaaagttggggcaacctgttgctagtctggtcgttggtgacagcgaggcttccgcgctcgctgctggtgagcagccccggcgtgccccgcgggctggaagaggcggcggcgtgatgcggcccgtggacgcggacgaggcgcgggagccccgcgaggagccgggcagcccgctgagccccgcgccccgcgccggccgcgagaacctggcctccctggagcgcgagcgcgcccgggcgcactggcgggcccgcaggaagctgctggagatccagagcctgctcgacgccatcaagagtgaggtggaggcagaggagcggggcgcccgggccccagcaccccgcccgcgtgcggaggctgaggagcgggtggctcggctgtgcgccgaagcagagaggaaggctgcggaggcggcgcggatgggcaggcggatcgtggagctgcaccagcggatcgccggctgcgagtgctgctgagccggcgaggccgcgcgggtctggagcggagcgcggcggggagtgtcccgcgtggaaggcgctgggtaggcagggaggggagcgcagagccgtgccacgctctccgcggagttggtttcattcttttttcataggtggccaactgacgaactgtgttcacctgataaggagtcgtggctgcttggacaggctcaaaccaagagagcctttcgttttgtctcccctgtttttctgcctgcgttttctccacattagccactcaatttccagtaccatcctggcggatgacttcagcattagatggtcaggtgtatttttttattaataggcgcattcagtttggaaaagacagcttttcattaatgtcccacgtaaaggaatatggcctatacagtacgtacgctgctgcgtggtcatatttgttcctgtgatcttattgtattttcaaagtttggaagtatactcgtgtgctttgctgtttttttatgcttcctggaatttggggactcatgagagacttgaggttagagttctgcaagtgagaagacactacatggttgcagctgccacatgaagaacccaagctcctgtcaaagttgtgaatgcgactttggatgagattaagaaggcccagtggacggttggtcttgaagagtggcagtgtgtggatttgaggacctctgcagaccatcagatcaaaggagggagagctgttttgggtgttttgttttttttgtttttatagcattttgctttttcttggaatgtaattttcctatggcatgttaactggtgcacatcgtgtaacctgtctggtgagcaacctacaattgggatgagttctaggtacatgtgtttgctgactttggggtaaacaactttgttataatacagtctctgccacagatgcatgtgacctcttcaggggcccagagtggctgaggaaggaaagcttcaagctggccatgggggtcccaaacagtcattccaggcttagatgatgactagcctaggtcatcagagcccagactccacagagactaaaatcagagctctgtcttgttatgataaatttcatttgcttggaaaaagaaatgctgaaagccagtgtttagaatctttgtgcagatgaccaaagcaattgacttggccaagaaaaggtaaggtaaataaacatttttcaaaatga

SEQ ID NO: 423657 - DNA, 2585 bp, Homo sapiens
ccccttctattgtggaagctttgttctttctctctttgcaataaatcctgctgctgctcactctttgggtccacactgcctttatgagccgtaacaggtctgcagtttcactcctgagccggcgagaccacgaacccaccagaaggaaaaaactccgaacacatccgaacatcagaaggaacaaactccagacgcgccactttaagagctgtaacactcaccgcgagggtccgtggcttcattcttgaagtcagtgagaccaagaacccaccaattccggacacattgggaacttagagcagtgcttgggacatggttatcagcgtcagatatttccttaaactagcgtgaagtcgactttaaccttccagcagtgtgagtgagggccctgaccctagaatcaacgcccaaagagctgtggcgctacagcgggcggggacatggggtgcgcatgcgtgcgggggggtacgcgtgcgtgcaagtgcgcgtgcgcgcgcaggaccgctgaggcgggagccccgaatgcggttctcgcttgctgcgtggcggtaaaggaccgcaggtgtcgtaaaagggccgcagtggcagcgtcctggccgacggctagtagcccattttggataccgtcctcgctgcggaaagttggggcaacctgttgctagtctggtcgttggtgacagcgaggcttccgcgctcgctgctggtgagcagccccggcgtgccccgcgggctggaagaggcggcggcgtgatgcggcccgtggacgcggacgaggcgcgggagccccgcgaggagccgggcagcccgctgagccccgcgccccgcgccggccgcgagaacctggcctccctggagcgcgagcgcgcccgggcgcactggcgggcccgcaggaagctgctggagatccagagcctgctcgacgccatcaagagtgaggtggaggcagaggagcggggcgcccgggccccagcaccccgcccgcgtgcggaggctgaggagcgggtggctcggctgtgcgccgaagcagagaggaaggctgcggaggcggcgcggatgggcaggcggatcgtggagctgcaccagcggatcgccggctgcgagtgctgctgagccggcgaggccgcgcgggtctggagcggagcgcggcggggagtgtcccgcgtggaaggcgctgggtaggcagggaggggagcgcagagccgtgccacgctctccgcggagttggtttcattcttttttcataggtaattagagaaaataatttgatatgttgttgtaaagagtcatgaccactggaagtattttcaggacgtagacctggtgggtcactacgtggggggagagaggtgtgaagcggaggtacatgctggaaacgtgtgaatgttgttacgagattggagcgtttgcgatgaccttcctgcaggtggaagcattgtgcacaggtggttgggtttgtttgactcccggatatgagaatatcaagctcaaaatttatgttgtgatgatgaatttctcccacttgtactttaggtggccaactgacgaactgtgttcacctgataaggagtcgtggctgcttggacaggctcaaaccaagagagcctttcgttttgtctcccctgtttttctgcctgcgttttctccacattagccactcaatttccagtaccatcctggcggatgacttcagcattagatggtcaggtgtatttttttattaataggcgcattcagtttggaaaagacagcttttcattaatgtcccacgtaaaggaatatggcctatacagtacgtacgctgctgcgtggtcatatttgttcctgtgatcttattgtattttcaaagtttggaagtatactcgtgtgctttgctgtttttttatgcttcctggaatttggggactcatgagagacttgaggttagagttctgcaagtgagaagacactacatggttgcagctgccacatgaagaacccaagctcctgtcaaagttgtgaatgcgactttggatgagattaagaaggcccagtggacggttggtcttgaagagtggcagtgtgtggatttgaggacctctgcagaccatcagatcaaaggagggagagctgttttgggtgttttgttttttttgtttttatagcattttgctttttcttggaatgtaattttcctatggcatgttaactggtgcacatcgtgtaacctgtctggtgagcaacctacaattgggatgagttctaggtacatgtgtttgctgactttggggtaaacaactttgttataatacagtctctgccacagatgcatgtgacctcttcaggggcccagagtggctgaggaaggaaagcttcaagctggccatgggggtcccaaacagtcattccaggcttagatgatgactagcctaggtcatcagagcccagactccacagagactaaaatcagagctctgtcttgttatgataaatttcatttgcttggaaaaagaaatgctgaaagccagtgtttagaatctttgtgcagatgaccaaagcaattgacttggccaagaaaaggtaaggtaaataaacatttttcaaaatga

SEQ ID NO: 423658 - DNA, 2299 bp, Homo sapiens
ccccttctattgtggaagctttgttctttctctctttgcaataaatcctgctgctgctcactctttgggtccacactgcctttatgagccgtaacaggtctgcagtttcactcctgagccggcgagaccacgaacccaccagaaggaaaaaactccgaacacatccgaacatcagaaggaacaaactccagacgcgccactttaagagctgtaacactcaccgcgagggtccgtggcttcattcttgaagtcagtgagaccaagaacccaccaattccggacacattgggaacttagagcagtgcttgggacatggttatcagcgtcagatatttccttaaactagcgtgaagtcgactttaaccttccagcagtgtgagtgagggccctgaccctagaatcaacgcccaaagagctgtggcgctacagcgggcggggacatggggtgcgcatgcgtgcgggggggtacgcgtgcgtgcaagtgcgcgtgcgcgcgcaggaccgctgaggcgggagccccgaatgcggttctcgcttgctgcgtggcggtaaaggaccgcaggtgtcgtaaaagggccgcagtggcagcgtcctggccgacggctagtagcccattttggataccgtcctcgctgcggaaagttggggcaacctgttgctagtctggtcgttggtgacagcgaggcttccgcgctcgctgctggtgagcagccccggcgtgccccgcgggctggaagaggcggcggcgtgatgcggcccgtggacgcggacgaggcgcgggagccccgcgaggagccgggcagcccgctgagccccgcgccccgcgccggccgcgagaacctggcctccctggagcgcgagcgcgcccgggcgcactggcgggcccgcaggaagctgctggagatccagagcctgctcgacgccatcaagagtgaggtggaggcagaggagcggggcgcccgggccccagcaccccgcccgcgtgcggaggctgaggagcgggtggctcggctgtgcgccgaagcagagaggaaggctgcggaggcggcgcggatgggcaggcggatcgtggagctgcaccagcggatcgccggctgcgagtgctgctgagccggcgaggccgcgcgggtctggagcggagcgcggcggggagtgtcccgcgtggaaggcgctgggtaggcagggaggggagcgcagagccgtgccacgctctccgcggagttggtttcattcttttttcataggtggccaactgacgaactgtgttcacctgataaggagtcgtggctgcttggacaggctcaaaccaagagagcctttcgttttgtctcccctgtttttctgcctgcgttttctccacattagccactcaatttccagtaccatcctggcggatgacttcagcattagatggtcaggtgtatttttttattaataggcgcattcagtttggaaaagacagcttttcattaatgtcccacgtaaaggaatatggcctatacagtacgtacgctgctgcgtggtcatatttgttcctgtgatcttattgtattttcaaagtttggaagtatactcgtgtgctttgctgtttttttatgcttcctggaatttggggactcatgagagacttgaggttagagttctgcaagtgagaagacactacatggttgcagctgccacatgaagaacccaagctcctgtcaaagttgtgaatgcgactttggatgagattaagaaggcccagtggacggttggtcttgaagagtggcagtgtgtggatttgaggacctctgcagaccatcagatcaaaggagggagagctgttttgggtgttttgttttttttgtttttatagcattttgctttttcttggaatgtaattttcctatggcatgttaactggtgcacatcgtgtaacctgtctggtgagcaacctacaattgggatgagttctaggtacatgtgtttgctgactttggggtaaacaactttgttataatacagtctctgccacagatgcatgtgacctcttcaggggcccagagtggctgaggaaggaaagcttcaagctggccatgggggtcccaaacagtcattccaggcttagatgatgactagcctaggtcatcagagcccagactccacagagactaaaatcagagctctgtcttgttatgataaatttcatttgcttggaaaaagaaatgctgaaagccagtgtttagaatctttgtgcagatgaccaaagcaattgacttggccaagaaaaggtaaggtaaataaacatttttcaaaatga

SEQ ID NO: 423659 - DNA, 2615 bp, Homo sapiens
ccccttctattgtggaagctttgttctttctctctttgcaataaatcctgctgctgctcactctttgggtccacactgcctttatgagccgtaacaggtctgcagtttcactcctgagccggcgagaccacgaacccaccagaaggaaaaaactccgaacacatccgaacatcagaaggaacaaactccagacgcgccactttaagagctgtaacactcaccgcgagggtccgtggcttcattcttgaagtcagtgagaccaagaacccaccaattccggacacattgggaacttagagcagtgcttgggacatggttatcagcgtcagatatttccttaaactagcgtgaagtcgactttaaccttccagcagtgtgagtgagggccctgaccctagaatcaacgcccaaagagctgtggcgctacagcgggcggggacatggggtgcgcatgcgtgcgggggggtacgcgtgcgtgcaagtgcgcgtgcgcgcgcaggaccgctgaggcgggagccccgaatgcggttctcgcttgctgcgtggcggtaaaggaccgcaggtgtcgtaaaagggccgcagtggcagcgtcctggccgacggctagtagcccattttggataccgtcctcgctgcggaaagttggggcaacctgttgctagtctggtcgttggtgacagcgaggcttccgcgctcgctgctggtgagcagccccggcgtgccccgcgggctggaagaggcggcggcgtgatgcggcccgtggacgcggacgaggcgcgggagccccgcgaggagccgggcagcccgctgagccccgcgccccgcgccggccgcgagaacctggcctccctggagcgcgagcgcgcccgggcgcactggcgggcccgcaggaagctgctggagatccagagcctgctcgacgccatcaagagtgaggtggaggcagaggagcggggcgcccgggccccagcaccccgcccgcgtgcggaggctgaggagcgggtggctcggctgtgcgccgaagcagagaggaaggctgcggaggcggcgcggatgggcaggcggatcgtggagctgcaccagcggatcgccggctgcgagtgctgctgagccggcgaggccgcgcgggtctggagcggagcgcggcggggagtgtcccgcgtggaaggcgctgggtaggcagggaggggagcgcagagccgtgccacgctctccgcggagttggtttcattcttttttcataggtaattagagaaaataatttgatatgttgttgtaaagagtcatgaccactggaagtattttcaggacgtagacctggtgggtcactacgtggggggagagaggtgtgaagcggaggtacatgctggaaacgtgtgaatgttgttacgagattggagcgtttgcgatgaccttcctgcaggtggaagcattgtgcacaggtggttgggtttgtttgactcccggatatgagaatatcaagctcaaaatttatgttgtgatgatgaatttctcccacttgtactttaggtggccaactgacgaactgtgttcacctgataaggagtcgtggctgcttggacaggctcaaaccaagagagcctttcgttttgtctcccctgtttttctgcctgcgttttctccacattagccactcaatttccagtaccatcctggcggatgacttcagcattagatggtcaggtgtatttttttattaataggcgcattcagtttggaaaagacagcttttcattaatgtcccacgtaaaggaatatggcctatacagtacgtacgctgctgcgtggtcatatttgttcctgtgatcttattgtattttcaaagtttggaagtatactcgtgtgctttgctgtttttttatgcttcctggaatttggggactcatgagagacttgaggttagagttctgcaagtgagaagacactacatggttgcagctgccacatgaagaacccaagctcctgtcaaagttgtgaatgcgactttggatgagattaagaaggcccagtggacggttggtcttgaagagtggcagtgtgtggatttgaggacctctgcagaccatcagatcaaaggagggagagctgttttgggtgttttgttttttttgtttttatagcattttgctttttcttggaatgtaattttcctatggcatgttaactggtgcacatcgtgtaacctgtctggtgagcaacctacaattgggatgagttctaggtacatgtgtttgctgactttggggtaaacaactttgttataatacagtctctgccacagatgcatgtgacctcttcaggggcccagagtggctgaggaaggaaagcttcaagctggccatgggggtcccaaacagtcattccaggcttagatgatgactagcctaggtcatcagagcccagactccacagagactaaaatcagagctctgtcttgttatgataaatttcatttgcttggaaaaagaaatgctgaaagccagtgtttagaatctttgtgcagatgaccaaagcaattgacttggccaagaaaaggtaaggtaaataaacatttttcaaaatgaaaaaaaaaagtcgacgcggccgcgaattta

SEQ ID NO: 423660 - DNA, 2589 bp, Homo sapiens
  misc_feature (2570)..(2570): n is a, c, g, or t
ccccttctattgtggaagctttgttctttctctctttgcaataaatcctgctgctgctcactctttgggtccacactgcctttatgagccgtaacaggtctgcagtttcactcctgagccggcgagaccacgaacccaccagaaggaaaaaactccgaacacatccgaacatcagaaggaacaaactccagacgcgccactttaagagctgtaacactcaccgcgagggtccgtggcttcattcttgaagtcagtgagaccaagaacccaccaattccggacacattgggaacttagagcagtgcttgggacatggttatcagcgtcagatatttccttaaactagcgtgaagtcgactttaaccttccagcagtgtgagtgagggccctgaccctagaatcaacgcccaaagagctgtggcgctacagcgggcggggacatggggtgcgcatgcgtgcgggggggtacgcgtgcgtgcaagtgcgcgtgcgcgcgcaggaccgctgaggcgggagccccgaatgcggttctcgcttgctgcgtggcggtaaaggaccgcaggtgtcgtaaaagggccgcagtggcagcgtcctggccgacggctagtagcccattttggataccgtcctcgctgcggaaagttggggcaacctgttgctagtctggtcgttggtgacagcgaggcttccgcgctcgctgctggtgagcagccccggcgtgccccgcgggctggaagaggcggcggcgtgatgcggcccgtggacgcggacgaggcgcgggagccccgcgaggagccgggcagcccgctgagccccgcgccccgcgccggccgcgagaacctggcctccctggagcgcgagcgcgcccgggcgcactggcgggcccgcaggaagctgctggagatccagagcctgctcgacgccatcaagagtgaggtggaggcagaggagcggggcgcccgggccccagcaccccgcccgcgtgcggaggctgaggagcgggtggctcggctgtgcgccgaagcagagaggaaggctgcggaggcggcgcggatgggcaggcggatcgtggagctgcaccagcggatcgccggctgcgagtgctgctgagccggcgaggccgcgcgggtctggagcggagcgcggcggggagtgtcccgcgtggaaggcgctgggtaggcagggaggggagcgcagagccgtgccacgctctccgcggagttggtttcattcttttttcataggtaattagagaaaataatttgatatgttgttgtaaagagtcatgaccactggaagtattttcaggacgtagacctggtgggtcactacgtggggggagagaggtgtgaagcggaggtacatgctggaaacgtgtgaatgttgttacgagattggagcgtttgcgatgaccttcctgcaggtggaagcattgtgcacaggtggttgggtttgtttgactcccggatatgagaatatcaagctcaaaatttatgttgtgatgatgaatttctcccacttgtactttaggtggccaactgacgaactgtgttcacctgataaggagtcgtggctgcttggacaggctcaaaccaagagagcctttcgttttgtctcccctgtttttctgcctgcgttttctccacattagccactcaatttccagtaccatcctggcggatgacttcagcattagatggtcaggtgtatttttttattaataggcgcattcagtttggaaaagacagcttttcattaatgtcccacgtaaaggaatatggcctatacagtacgtacgctgctgcgtggtcatatttgttcctgtgatcttattgtattttcaaagtttggaagtatactcgtgtgctttgctgtttttttatgcttcctggaatttggggactcatgagagacttgaggttagagttctgcaagtgagaagacactacatggttgcagctgccacatgaagaacccaagctcctgtcaaagttgtgaatgcgactttggatgagattaagaaggcccagtggacggttggtcttgaagagtggcagtgtgtggatttgaggacctctgcagaccatcagatcaaaggagggagagctgttttgggtgttttgttttttttgtttttatagcattttgctttttcttggaatgtaattttcctatggcatgttaactggtgcacatcgtgtaacctgtctggtgagcaacctacaattgggatgagttctaggtacatgtgtttgctgactttggggtaaacaactttgttataatacagtctctgccacagatgcatgtgacctcttcaggggcccagagtggctgaggaaggaaagcttcaagctggccatgggggtcccaaacagtcattccaggcttagatgatgactagcctaggtcatcagagcccagactccacagagactaaaatcagagctctgtcttgttatgataaatttcatttgcttggaaaaagaaatgctgaaagccagtgtttagaatctttgtgcagatgaccaaagcaattgacttggccaaggatgtcattgaagagtatntcaaatgcaagaaatgaag

SEQ ID NO: 423661 - DNA, 2139 bp, Homo sapiens
ccccttctattgtggaagctttgttctttctctctttgcaataaatcctgctgctgctcactctttgggtccacactgcctttatgagccgtaacaggtctgcagtttcactcctgagccggcgagaccacgaacccaccagaaggaaaaaactccgaacacatccgaacatcagaaggaacaaactccagacgcgccactttaagagctgtaacactcaccgcgagggtccgtggcttcattcttgaagtcagtgagaccaagaacccaccaattccggacacattgggaacttagagcagtgcttgggacatggttatcagcgtcagatatttccttaaactagcgtgaagtcgactttaaccttccagcagtgtgagtgagggccctgaccctagaatcaacgcccaaagagctgtggcgctacagcgggcggggacatggggtgcgcatgcgtgcgggggggtacgcgtgcgtgcaagtgcgcgtgcgcgcgcaggaccgctgaggcgggagccccgaatgcggttctcgcttgctgcgtggcggtaaaggaccgcaggtgtcgtaaaagggccgcagtggcagcgtcctggccgacggctagtagcccattttggataccgtcctcgctgcggaaagttggggcaacctgttgctagtctggtcgttggtgacagcgaggcttccgcgctcgctgctggtgagcagccccggcgtgccccgcgggctggaagaggcggcggcgtgatgcggcccgtggacgcggacgaggcgcgggagccccgcgaggagccgggcagcccgctgagccccgcgccccgcgccggccgcgagaacctggcctccctggagcgcgagcgcgcccgggcgcactggcgggcccgcaggaagctgctggagatccagagcctgctcgacgccatcaagagtgaggtggaggcagaggagcggggcgcccgggccccagcaccccgcccgcgtgcggaggctgaggagcgggtggctcggctgtgcgccgaagcagagaggaaggctgcggaggcggcgcggatgggcaggcggatcgtggagctgcaccagcggatcgccggctgcgagtgctgctgagccggcgaggccgcgcgggtctggagcggagcgcggcggggagtgtcccgcgtggaaggcgctgggtaggcagggaggggagcgcagagccgtgccacgctctccgcggagttggtttcattcttttttcataggtaattagagaaaataatttgatatgttgttgtaaagagtcatgaccactggaagtattttcaggacgtagacctggtgggtcactacgtggggggagagaggtgtgaagcggaggtacatgctggaaacgtgtgaatgttgttacgagattggagcgtttgcgatgaccttcctgcaggtggaagcattgtgcacaggtggttgggtttgtttgactcccggatatgagaatatcaagctcaaaatttatgttgtgatgatgaatttctcccacttgtactttaggtggccaactgacgaactgtgttcacctgataaggagtcgtggctgcttggacaggctcaaaccaagagagcctttcgttttgtctcccctgtttttctgcctgcgttttctccacattagccactcaatttccagtaccatcctggcggatgacttcagcattagatggtcaggtgtatttttttattaataggcgcattcagtttggaaaagacagcttttcattaatgtcccacgtaaaggaatatggcctatacagtacgtacgctgctgcgtggtcatatttgttcctgtgatcttattgtattttcaaagtttggaagtatactcgtgtgctttgctgtttttttatgcttcctggaatttggggactcatgagagacttgaggttagagttctgcaagtgagaagacactacatggttgcagctgccacatgaagaacccaagctcctgtcaaagttgtgaatgcgactttggatgagattaagaaggcccagtggacggttggtcttgaagagtggcagtgtgtggatttgaggacctctgcagaccatcagatcaaaggagggagagctgttttgggtactacgctttggcaggtaccgg

SEQ ID NO: 423662 - DNA, 624 bp, Homo sapiens
ccgtacatatcccagcttccttgttcaaggttctgtacttggaatacccttgcgattaagaaggcccagtggacggttggtcttgaagagtggcagtgtgtggatttgaggacctctgcagaccatcagatcaaaggagggagagctgttttgggtgttttgttttttttgtttttatagcattttgctttttcttggaatgtaattttcctatggcatgttaactggtgcacatcgtgtaacctgtctggtgagcaacctacaattgggatgagttctaggtacatgtgtttgctgactttggggtaaacaactttgttataatacagtctctgccacagatgcatgtgacctcttcaggggcccagagtggctgaggaaggaaagcttcaagctggccatgggggtcccaaacagtcattccaggcttagatgatgactagcctaggtcatcagagcccagactccacagagactaaaatcagagctctgtcttgttatgataaatttcatttgcttggaaaaagaaatgctgaaagccagtgtttagaatctttgtgcagatgaccaaagcaattgacttggccaagaaaaggtaaggtaaataaacatttttcaaaatga

SEQ ID NO: 423663 - DNA, 481 bp, Homo sapiens
  misc_feature (3)..(3): n is a, c, g, or t
  misc_feature (19)..(20): n is a, c, g, or t
  misc_feature (23)..(24): n is a, c, g, or t
  misc_feature (30)..(30): n is a, c, g, or t
  misc_feature (358)..(358): n is a, c, g, or t
  misc_feature (362)..(362): n is a, c, g, or t
  misc_feature (382)..(383): n is a, c, g, or t
  misc_feature (467)..(467): n is a, c, g, or t
atngctaggtaagaggctnngtnntgaatnggccgaggcgcgtgtcgtaaaagggccgcagtggcagcgtcctggccgacggctagtagcccattttggataccgtcctcgctgcggaaagttggggcaacctgttgctagtctggtcgttggtgacagcgaggcttccgcgctcgctgctggtgagcagccccggcgtgccccgcgggctggaagaggcggcggcgtgatgcggcccgtggacgcggacgaggcgcgggagccccgcgaggagccgggcagcccgctgagccccgcgccccgcgccggccgcgagaacctggcctccctggagcgcgagcgcgcccgggcgcacttncttnccctcataatcgctttaaanncaaagccttctctactccaacaatatgtatgttttagtcaaattatcttttctcccgttccccatcacccctcccgtctttcgntagtcttaatatcg

SEQ ID NO: 423664 - DNA, 2064 bp, Homo sapiens
  misc_feature (3)..(3): n is a, c, g, or t
  misc_feature (19)..(20): n is a, c, g, or t
  misc_feature (23)..(24): n is a, c, g, or t
  misc_feature (30)..(30): n is a, c, g, or t
atngctaggtaagaggctnngtnntgaatnggccgaggcgcgtgtcgtaaaagggccgcagtggcagcgtcctggccgacggctagtagcccattttggataccgtcctcgctgcggaaagttggggcaacctgttgctagtctggtcgttggtgacagcgaggcttccgcgctcgctgctggtgagcagccccggcgtgccccgcgggctggaagaggcggcggcgtgatgcggcccgtggacgcggacgaggcgcgggagccccgcgaggagccgggcagcccgctgagccccgcgccccgcgccggccgcgagaacctggcctccctggagcgcgagcgcgcccgggcgcactggcgggcccgcaggaagctgctggagatccagagcctgctcgacgccatcaagagtgaggtggaggcagaggagcggggcgcccgggccccagcaccccgcccgcgtgcggaggctgaggagcgggtggctcggctgtgcgccgaagcagagaggaaggctgcggaggcggcgcggatgggcaggcggatcgtggagctgcaccagcggatcgccggctgcgagtgctgctgagccggcgaggccgcgcgggtctggagcggagcgcggcggggagtgtcccgcgtggaaggcgctgggtaggcagggaggggagcgcagagccgtgccacgctctccgcggagttggtttcattcttttttcataggtaattagagaaaataatttgatatgttgttgtaaagagtcatgaccactggaagtattttcaggacgtagacctggtgggtcactacgtggggggagagaggtgtgaagcggaggtacatgctggaaacgtgtgaatgttgttacgagattggagcgtttgcgatgaccttcctgcaggtggaagcattgtgcacaggtggttgggtttgtttgactcccggatatgagaatatcaagctcaaaatttatgttgtgatgatgaatttctcccacttgtactttaggtggccaactgacgaactgtgttcacctgataaggagtcgtggctgcttggacaggctcaaaccaagagagcctttcgttttgtctcccctgtttttctgcctgcgttttctccacattagccactcaatttccagtaccatcctggcggatgacttcagcattagatggtcaggtgtatttttttattaataggcgcattcagtttggaaaagacagcttttcattaatgtcccacgtaaaggaatatggcctatacagtacgtacgctgctgcgtggtcatatttgttcctgtgatcttattgtattttcaaagtttggaagtatactcgtgtgctttgctgtttttttatgcttcctggaatttggggactcatgagagacttgaggttagagttctgcaagtgagaagacactacatggttgcagctgccacatgaagaacccaagctcctgtcaaagttgtgaatgcgactttggatgagattaagaaggcccagtggacggttggtcttgaagagtggcagtgtgtggatttgaggacctctgcagaccatcagatcaaaggagggagagctgttttgggtgttttgttttttttgtttttatagcattttgctttttcttggaatgtaattttcctatggcatgttaactggtgcacatcgtgtaacctgtctggtgagcaacctacaattgggatgagttctaggtacatgtgtttgctgactttggggtaaacaactttgttataatacagtctctgccacagatgcatgtgacctcttcaggggcccagagtggctgaggaaggaaagcttcaagctggccatgggggtcccaaacagtcattccaggcttagatgatgactagcctaggtcatcagagcccagactccacagagactaaaatcagagctctgtcttgttatgataaatttcatttgcttggaaaaagaaatgctgaaagccagtgtttagaatctttgtgcagatgaccaaagcaattgacttggccaagaaaaggtaaggtaaataaacatttttcaaaatga

SEQ ID NO: 423665 - DNA, 2230 bp, Homo sapiens
ccccttctattgtggaagctttgttctttctctctttgcaataaatcctgctgctgctcactctttgggtccacactgcctttatgagccgtaacaggtctgcagtttcactcctgagccggcgagaccacgaacccaccagaaggaaaaaactccgaacacatccgaacatcagaaggaacaaactccagacgcgccactttaagagctgtaacactcaccgcgagggtccgtggcttcattcttgaagtcagtgagaccaagaacccaccaattccggacacattgggaacttagagcagtgcttgggacatggttatcagcgtcagatatttccttaaactagcgtgaagtcgactttaaccttccagcagtgtgagtgagggccctgaccctagaatcaacgcccaaagagctgtggcgctacagcgggcggggacatggggtgcgcatgcgtgcgggggggtacgcgtgcgtgcaagtgcgcgtgcgcgcgcaggaccgctgaggcgggagccccgaatgcggttctcgcttgctgcgtggcggtaaaggaccgcaggtgtcgtaaaagggccgcagtggcagcgtcctggccgacggctagtagcccattttggataccgtcctcgctgcggaaagttggggcaacctgttgctagtctggtcgttggtgacagcgaggcttccgcgctcgctgctggtgagcagccccggcgtgccccgcgggctggaagaggcggcggcgtgatgcggcccgtggacgcggacgaggcgcgggagccccgcgaggagccgggcagcccgctgagccccgcgccccgcgccggccgcgagaacctggcctccctggagcgcgagcgcgcccgggcgcactggcgggcccgcaggaagctgctggagatccagagcctgctcgacgccatcaagagtgaggtggaggcagaggagcggggcgcccgggccccagcaccccgcccgcgtgcggaggctgaggagcgggtggctcggctgtgcgccgaagcagagaggaaggctgcggaggcggcgcggatgggcaggcggatcgtggagctgcaccagcggatcgccggctgcgagtgctgctgagccggcgaggccgcgcgggtctggagcggagcgcggcggggagtgtcccgcgtggaaggcgctgggtggccaactgacgaactgtgttcacctgataaggagtcgtggctgcttggacaggctcaaaccaagagagcctttcgttttgtctcccctgtttttctgcctgcgttttctccacattagccactcaatttccagtaccatcctggcggatgacttcagcattagatggtcaggtgtatttttttattaataggcgcattcagtttggaaaagacagcttttcattaatgtcccacgtaaaggaatatggcctatacagtacgtacgctgctgcgtggtcatatttgttcctgtgatcttattgtattttcaaagtttggaagtatactcgtgtgctttgctgtttttttatgcttcctggaatttggggactcatgagagacttgaggttagagttctgcaagtgagaagacactacatggttgcagctgccacatgaagaacccaagctcctgtcaaagttgtgaatgcgactttggatgagattaagaaggcccagtggacggttggtcttgaagagtggcagtgtgtggatttgaggacctctgcagaccatcagatcaaaggagggagagctgttttgggtgttttgttttttttgtttttatagcattttgctttttcttggaatgtaattttcctatggcatgttaactggtgcacatcgtgtaacctgtctggtgagcaacctacaattgggatgagttctaggtacatgtgtttgctgactttggggtaaacaactttgttataatacagtctctgccacagatgcatgtgacctcttcaggggcccagagtggctgaggaaggaaagcttcaagctggccatgggggtcccaaacagtcattccaggcttagatgatgactagcctaggtcatcagagcccagactccacagagactaaaatcagagctctgtcttgttatgataaatttcatttgcttggaaaaagaaatgctgaaagccagtgtttagaatctttgtgcagatgaccaaagcaattgacttggccaagaaaaggtaaggtaaataaacatttttcaaaatga

SEQ ID NO: 423666 - DNA, 2245 bp, Homo sapiens
ccccttctattgtggaagctttgttctttctctctttgcaataaatcctgctgctgctcactctttgggtccacactgcctttatgagccgtaacaggtctgcagtttcactcctgagccggcgagaccacgaacccaccagaaggaaaaaactccgaacacatccgaacatcagaaggaacaaactccagacgcgccactttaagagctgtaacactcaccgcgagggtccgtggcttcattcttgaagtcagtgagaccaagaacccaccaattccggacacattgggaacttagagcagtgcttgggacatggttatcagcgtcagatatttccttaaactagcgtgaagtcgactttaaccttccagcagtgtgagtgagggccctgaccctagaatcaacgcccaaagagctgtggcgctacagcgggcggggacatggggtgcgcatgcgtgcgggggggtacgcgtgcgtgcaagtgcgcgtgcgcgcgcaggaccgctgaggcgggagccccgaatgcggttctcgcttgctgcgtggcggtaaaggaccgcaggtgtcgtaaaagggccgcagtggcagcgtcctggccgacggctagtagcccattttggataccgtcctcgctgcggaaagttggggcaacctgttgctagtctggtcgttggtgacagcgaggcttccgcgctcgctgctggtgagcagccccggcgtgccccgcgggctggaagaggcggcggcgtgatgcggcccgtggacgcggacgaggcgcgggagccccgcgaggagccgggcagcccgctgagccccgcgccccgcgccggccgcgagaacctggcctccctggagcgcgagcgcgcccgggcgcactggcgggcccgcaggaagctgctggagatccagagcctgctcgacgccatcaagagtgaggtggaggcagaggagcggggcgcccgggccccagcaccccgcccgcgtgcggaggctgaggagcgggtggctcggctgtgcgccgaagcagagaggaaggctgcggaggcggcgcggatgggcaggcggatcgtggagctgcaccagcggatcgccggctgcgagtgctgctgagccggcgaggccgcgcgggtctggagcggagcgcggcggggagtgtcccgcgtggaaggcgctgggtaggcagggaggggagcgcagagccgtgccacgctctccgcggagttggtttcattcttttttcataggtggccaactgacgaactgtgttcacctgataaggagtcgtggctgcttggacaggctcaaaccaagagagcctttcgttttgtctcccctgtttttctgcctgcgttttctccacattagccactcaatttccagtaccatcctggcggatgacttcagcattagatggtcaggtgtatttttttattaataggcgcattcagtttgggtacgctgctgcgtggtcatatttgttcctgtgatcttattgtattttcaaagtttggaagtatactcgtgtgctttgctgtttttttatgcttcctggaatttggggactcatgagagacttgaggttagagttctgcaagtgagaagacactacatggttgcagctgccacatgaagaacccaagctcctgtcaaagttgtgaatgcgactttggatgagattaagaaggcccagtggacggttggtcttgaagagtggcagtgtgtggatttgaggacctctgcagaccatcagatcaaaggagggagagctgttttgggtgttttgttttttttgtttttatagcattttgctttttcttggaatgtaattttcctatggcatgttaactggtgcacatcgtgtaacctgtctggtgagcaacctacaattgggatgagttctaggtacatgtgtttgctgactttggggtaaacaactttgttataatacagtctctgccacagatgcatgtgacctcttcaggggcccagagtggctgaggaaggaaagcttcaagctggccatgggggtcccaaacagtcattccaggcttagatgatgactagcctaggtcatcagagcccagactccacagagactaaaatcagagctctgtcttgttatgataaatttcatttgcttggaaaaagaaatgctgaaagccagtgtttagaatctttgtgcagatgaccaaagcaattgacttggccaagaaaaggtaaggtaaataaacatttttcaaaatga

SEQ ID NO: 423667 - DNA, 2082 bp, Homo sapiens
aattacggctaggtacgaggctgggtgttggaagtaggtccgttggtcggtcgggaacgaggctcaggcggccaggcccgcgcggagccgttgccatggcagccgccgccggggacgcggacgacgagccgcgctcaggccactcgagctcggagggcgagtgcgcggtggcgccggagccgctgactgacgctgagggcctcttctccttcgctgacttcgggtctgcgctgggcggcggcggcgcgggcctctcgggccgggcgtccggcggggcccagtcgccgctgcgctacttgcacgtcctgtggcagcaggatgcggagccgcgcgacgagctgcgctgcaagatacccgctggccggctgaggcgcgctgccaggccccaccggcggctcgggcccacgggcaaggaggtgcacgctctgaagagactgagggactcggccaatgccaatgatgtggaaacagtgcagcagctgctggaagatggcgcggatccctgtgcagctgatgacaagggccgcacagctctacactttgcctcatgcaatggcaatgaccagattgtgcagctgctcctggaccatggtgctgatcctaaccagcgagatgggctggggaacacgccactgcacctggcggcctgcaccaaccacgttcctgtcatcaccacactgctacgaggaggggcccgtgtagatgccctggaccgagctggtcgcacacccctgcacctggccaagtcaaagctgaatatcctgcaggagggccatgcccagtgcctagaggctgtgcgtctggaggtgaagcagatcatccatatgctgagggagtatctggagcgcctagggcaacatgagcagcgagaacgcctggatgacctctgcacccgcctgcagatgaccagtaccaaagagcaggtggatgaagtgactgacctcctggccagcttcacctccctcagtctgcagatgcagagcatggagaagaggtagcaagagaggctccctgccttcctgccactgccccaccctgccccactgctgtctcagtaccaagaaaaagcccaacatctgggacttggagctgcacttgtctggtgaggaccttgccctcacccgcagatgccgtggggcagagatgctctctctccacggcctcagagccactcccagccacagtttccagcatctctgtggacagggaccacagctcccagcttcttccagttctcgcagcaccagaccagcctctgcagctgcacttcagctccgcagacctgcgctatctcagcagacctcacttgccccatggccttcatggcgcgctccaggcctcagacccttctctgtgttccgtcctggccatgggcttgttgcagtcagcaggtgtgggcttaggcgggcaccctgtggccaggggtactgcgtgaggccctcagttggtcctgtgcctctcaccagcacttagacagacacgtcaccagactttcaaggagatactgcagtgagtttctctggttggaaggggagggttggtgagtcccagaccttaaaaatacaaggttaagagggaccccaaagcaaaaaattccaacccttttcctcccagtcattgaaacaccaaaactattataccggagggtgtaatagttttgctgcccagttgtggtaggccagtagtggcctcccaagatgcccatgtcctaatcccaggaacctgtcaaaattaccttgtatggccaaaggggctttgcagatgtaatgaagttaaggatctttcgccaggaagattatcccagcttgttcaggagggcttgatgtcctcacccgggtctgtataacagaagagcaggtgacgggagaggaggttggaggtgtagcgatggagcaggaaactggagttgaggagggcagctcaagccacagagtccaggccacctcagagccaggaaatgcatcctcccacagagccctggaaggccccagccctgctcccacctggactggctcagtgaggctaattttataattctggctgattttagaactctaagggaataaatttgtgttgttttaa

SEQ ID NO: 423668 - DNA, 2425 bp, Homo sapiens
aattacggctaggtacgaggctgggtgttcggtttaagctggaagggtagtcattggttcgccgctctgtctcggcctgagcccgcccccgctcggttgccgtggttgcgggccctgcccgcccgccagctcgctgacagcacgactcagggcggagggaagtaggtccgttggtcggtcgggaacgaggctcaggcggccaggcccgcgcggagccgttgccatggcagccgccgccggggacgcggacgacgagccgcgctcaggccactcgagctcggagggcgagtgcgcggtggcgccggagccgctgactgacgctgagggcctcttctccttcgctgacttcgggtctgcgctgggcggcggcggcgcgggcctctcgggccgggcgtccggcggggcccagtcgccgctgcgctacttgcacgtcctgtggcagcaggatgcggagccgcgcgacgagctgcgctgcaagatacccgctggccggctgaggcgcgctgccaggccccaccggcggctcgggcccacgggcaaggaggtgcacgctctgaagagactgagggactcggccaatgccaatgatgtggaaacagtgcagcagctgctggaagatggcgcggatccctgtgcagctgatgacaagggccgcacagctctacactttgcctcatgcaatggcaatgaccagattgtgcagctgctcctggaccatggtgctgatcctaaccagcgagatgggctggggaacacgccactgcacctggcggcctgcaccaaccacgttcctgtcatcaccacactgctacgaggaggggcccgtgtagatgccctggaccgagctggtcgcacacccctgcacctggccaagtcaaagctgaatatcctgcaggagggccatgcccagtgcctagaggctgtgcgtctggaggtgaagcagaggtgagtaccccttctgtgtggagaccacggcaccaaggcagcactggacagatgctgccctaaccacagacacacctgcctctggtcccagggctcctgggttgtttcacactgaccccagttggcacctgctccactgtgctttttggaagcagcatcagcctgtctgcctccctaggaacccaggcagctcagctcaccctcttgttccagatcatccatatgctgagggagtatctggagcgcctagggcaacatgagcagcgagaacgcctggatgacctctgcacccgcctgcagatgaccagtaccaaagagcaggtggatgaagtgactgacctcctggccagcttcacctccctcagtctgcagatgcagagcatggagaagaggtagcaagagaggctccctgccttcctgccactgccccaccctgccccactgctgtctcagtaccaagaaaaagcccaacatctgggacttggagctgcacttgtctggtgaggaccttgccctcacccgcagatgccgtggggcagagatgctctctctccacggcctcagagccactcccagccacagtttccagcatctctgtggacagggaccacagctcccagcttcttccagttctcgcagcaccagaccagcctctgcagctgcacttcagctccgcagacctgcgctatctcagcagacctcacttgccccatggccttcatggcgcgctccaggcctcagacccttctctgtgttccgtcctggccatgggcttgttgcagtcagcaggtgtgggcttaggcgggcaccctgtggccaggggtactgcgtgaggccctcagttggtcctgtgcctctcaccagcacttagacagacacgtcaccagactttcaaggagatactgcagtgagtttctctggttggaaggggagggttggtgagtcccagaccttaaaaatacaaggttaagagggaccccaaagcaaaaaattccaacccttttcctcccagtcattgaaacaccaaaactattataccggagggtgtaatagttttgctgcccagttgtggtaggccagtagtggcctcccaagatgcccatgtcctaatcccaggaacctgtcaaaattaccttgtatggccaaaggggctttgcagatgtaatgaagttaaggatctttcgccaggaagattatcccagcttgttcaggagggcttgatgtcctcacccgggtctgtataacagaagagcaggtgacgggagaggaggttggaggtgtagcgatggagcaggaaactggagttgaggagggcagctcaagccacagagtccaggccacctcagagccaggaaatgcatcctcccacagagccctggaaggccccagccctgctcccacctggactggctcagtgaggctaattttataattctggctgattttagaactctaagggaataaatttgtgttgttttaa

SEQ ID NO: 423669 - DNA, 2151 bp, Homo sapiens
aattacggctaggtacgaggctgggtgttcggtttaagctggaagggtagtcattggttcgccgctctgtctcggcctgagcccgcccccgctcggttgccgtggttgcgggccctgcccgcccgccagctcgctgacagcacgactcagggcggagggaagtaggtccgttggtcggtcgggaacgaggctcaggcggccaggcccgcgcggagccgttgccatggcagccgccgccggggacgcggacgacgagccgcgctcaggccactcgagctcggagggcgagtgcgcggtggcgccggagccgctgactgacgctgagggcctcttctccttcgctgacttcgggtctgcgctgggcggcggcggcgcgggcctctcgggccgggcgtccggcggggcccagtcgccgctgcgctacttgcacgtcctgtggcagcaggatgcggagccgcgcgacgagctgcgctgcaagatacccgctggccggctgaggcgcgctgccaggccccaccggcggctcgggcccacgggcaaggaggtgcacgctctgaagagactgagggactcggccaatgccaatgatgtggaaacagtgcagcagctgctggaagatggcgcggatccctgtgcagctgatgacaagggccgcacagctctacactttgcctcatgcaatggcaatgaccagattgtgcagctgctcctggaccatggtgctgatcctaaccagcgagatgggctggggaacacgccactgcacctggcggcctgcaccaaccacgttcctgtcatcaccacactgctacgaggaggggcccgtgtagatgccctggaccgagctggtcgcacacccctgcacctggccaagtcaaagctgaatatcctgcaggagggccatgcccagtgcctagaggctgtgcgtctggaggtgaagcagatcatccatatgctgagggagtatctggagcgcctagggcaacatgagcagcgagaacgcctggatgacctctgcacccgcctgcagatgaccagtaccaaagagcaggtggatgaagtgactgacctcctggccagcttcacctccctcagtctgcagatgcagagcatggagaagaggtagcaagagaggctccctgccttcctgccactgccccaccctgccccactgctgtctcagtaccaagaaaaagcccaacatctgggacttggagctgcacttgtctggtgaggaccttgccctcacccgcagatgccgtggggcagagatgctctctctccacggcctcagagccactcccagccacagtttccagcatctctgtggacagggaccacagctcccagcttcttccagttctcgcagcaccacttgccccatggccttcatggcgcgctccaggcctcagacccttctctgtgttccgtcctggccatgggcttgttgcagtcagcaggtgtgggcttaggcgggcaccctgtggccaggggtactgcgtgaggccctcagttggtcctgtgcctctcaccagcacttagacagacacgtcaccagactttcaaggagatactgcagtgagtttctctggttggaaggggagggttggtgagtcccagaccttaaaaatacaaggttaagagggaccccaaagcaaaaaattccaacccttttcctcccagtcattgaaacaccaaaactattataccggagggtgtaatagttttgctgcccagttgtggtaggccagtagtggcctcccaagatgcccatgtcctaatcccaggaacctgtcaaaattaccttgtatggccaaaggggctttgcagatgtaatgaagttaaggatctttcgccaggaagattatcccagcttgttcaggagggcttgatgtcctcacccgggtctgtataacagaagagcaggtgacgggagaggaggttggaggtgtagcgatggagcaggaaactggagttgaggagggcagctcaagccacagagtccaggccacctcagagccaggaaatgcatcctcccacagagccctggaaggccccagccctgctcccacctggactggctcagtgaggctaattttataattctggctgattttagaactctaagggaataaatttgtgttgttttaa

SEQ ID NO: 423670 - DNA, 1972 bp, Homo sapiens
aattacggctaggtacgaggctgggtgttcggtttaagctggaagggtagtcattggttcgccgctctgtctcggcctgagcccgcccccgctcggttgccgtggttgcgggccctgcccgcccgccagctcgctgacagcacgactcagggcggagggaagtaggtccgttggtcggtcgggaacgaggctcaggcggccaggcccgcgcggagccgttgccatggcagccgccgccggggacgcggacgacgagccgcgctcaggccactcgagctcggagggcgagtgcgcggtggcgccggagccgctgactgacgctgagggcctcttctccttcgctgacttcgggtctgcgctgggcggcggcggcgcgggcctctcgggccgggcgtccggcggggcccagtcgccgctgcgctacttgcacgtcctgtggcagcaggatgcggagccgcgcgacgagctgcgctgcaagatacccgctggccggctgaggcgcgctgccaggccccaccggcggctcgggcccacgggcaaggaggtgcacgctctgaagagactgagggactcggccaatgccaatgatgtggaaacagtgcagcagctgctggaagatggcgcggatccctgtgcagctgatgacaagggccgcacagctctacactttgcctcatgcaatggcaatgaccagattgtgcagctgctcctggaccatggtgctgatcctaaccagcgagatgggctggggaacacgccactgcacctggcggcctgcaccaaccacgttcctgtcatcaccacactgctacgaggaggggcccgtgtagatgccctggaccgagctggtcgcacacccctgcacctggccaagtcaaagctgaatatcctgcaggagggccatgcccagtgcctagaggctgtgcgtctggaggtgaagcagatcatccatatgctgagggagtatctggagcgcctagggcaacatgagcagcgagaacgcctggatgacctctgcacccgcctgcagatgaccagtaccaaagagcaggtggatgaagtgactgacctcctggccagcttcacctccctcagtctgcagatgcagagcatggagaagaggtagcaagagaggctccctgccttcctgccactgccccaccctgccccactgctgtctcagtaccaagaaaaagcccaacatctgggacttggagctgcacttgtctggtgaggaccttgccctcacccgcagatgccgtggggcagagatgctctctctccacggcctcagagccactcccagggccaggggtactgcgtgaggccctcagttggtcctgtgcctctcaccagcacttagacagacacgtcaccagactttcaaggagatactgcagtgagtttctctggttggaaggggagggttggtgagtcccagaccttaaaaatacaaggttaagagggaccccaaagcaaaaaattccaacccttttcctcccagtcattgaaacaccaaaactattataccggagggtgtaatagttttgctgcccagttgtggtaggccagtagtggcctcccaagatgcccatgtcctaatcccaggaacctgtcaaaattaccttgtatggccaaaggggctttgcagatgtaatgaagttaaggatctttcgccaggaagattatcccagcttgttcaggagggcttgatgtcctcacccgggtctgtataacagaagagcaggtgacgggagaggaggttggaggtgtagcgatggagcaggaaactggagttgaggagggcagctcaagccacagagtccaggccacctcagagccaggaaatgcatcctcccacagagccctggaaggccccagccctgctcccacctggactggctcagtgaggctaattttataattctggctgattttagaactctaagggaataaatttgtgttgttttaa

SEQ ID NO: 423671 - DNA, 1930 bp, Homo sapiens
ggcccggggcggggcagcccgggcgaggggcggggcctcagaggaccagtggccgcgctttggtcgcccccgaccctcagccggggtcccccgacgtctgcgctgagggccacactgacccttgagtctcctttcagtaacgatggtgatgatggtttttttagaaagtcttcctgctctgagccagtcaccccagtcttctctcactgggtaatttctgaatggaaacttcccatgactcggaacgcttattggtgaataataaaatgagctctgaagagactgagggactcggccaatgccaatgatgtggaaacagtgcagcagctgctggaagatggcgcggatccctgtgcagctgatgacaagggccgcacagctctacactttgcctcatgcaatggcaatgaccagattgtgcagctgctcctggaccatggtgctgatcctaaccagcgagatgggctggggaacacgccactgcacctggcggcctgcaccaaccacgttcctgtcatcaccacactgctacgaggaggggcccgtgtagatgccctggaccgagctggtcgcacacccctgcacctggccaagtcaaagctgaatatcctgcaggagggccatgcccagtgcctagaggctgtgcgtctggaggtgaagcagatcatccatatgctgagggagtatctggagcgcctagggcaacatgagcagcgagaacgcctggatgacctctgcacccgcctgcagatgaccagtaccaaagagcaggtggatgaagtgactgacctcctggccagcttcacctccctcagtctgcagatgcagagcatggagaagaggtagcaagagaggctccctgccttcctgccactgccccaccctgccccactgctgtctcagtaccaagaaaaagcccaacatctgggacttggagctgcacttgtctggtgaggaccttgccctcacccgcagatgccgtggggcagagatgctctctctccacggcctcagagccactcccagccacagtttccagcatctctgtggacagggaccacagctcccagcttcttccagttctcgcagcaccagaccagcctctgcagctgcacttcagctccgcagacctgcgctatctcagcagacctcacttgccccatggccttcatggcgcgctccaggcctcagacccttctctgtgttccgtcctggccatgggcttgttgcagtcagcaggtgtgggcttaggcgggcaccctgtggccaggggtactgcgtgaggccctcagttggtcctgtgcctctcaccagcacttagacagacacgtcaccagactttcaaggagatactgcagtgagtttctctggttggaaggggagggttggtgagtcccagaccttaaaaatacaaggttaagagggaccccaaagcaaaaaattccaacccttttcctcccagtcattgaaacaccaaaactattataccggagggtgtaatagttttgctgcccagttgtggtaggccagtagtggcctcccaagatgcccatgtcctaatcccaggaacctgtcaaaattaccttgtatggccaaaggggctttgcagatgtaatgaagttaaggatctttcgccaggaagattatcccagcttgttcaggagggcttgatgtcctcacccgggtctgtataacagaagagcaggtgacgggagaggaggttggaggtgtagcgatggagcaggaaactggagttgaggagggcagctcaagccacagagtccaggccacctcagagccaggaaatgcatcctcccacagagccctggaaggccccagccctgctcccacctggactggctcagtgaggctaattttataattctggctgattttagaactctaagggaataaatttgtgttgttttaa

SEQ ID NO: 423672 - DNA, 2037 bp, Homo sapiens
aattacggctaggtacgaggctgggtgttcggtttaagctggaagggtagtcattggttcgccgctctgtctcggcctgagcccgcccccgctcggttgccgtggttgcgggccctgcccgcccgccagctcgctgacagcacgactcagggcggagggaagtaggtccgttggtcggtcgggaacgaggctcaggcggccaggcccgcgcggagccgttgccatggcagccgccgccggggacgcggacgacgagccgcgctcaggccactcgagctcggagggcgagtgcgcggtggcgccggagccgctgactgacgctgagggcctcttctccttcgctgacttcgggtctgcgctgggcggcggcggcgcgggcctctcgggccgggcgtccggcggggcccagtcgccgctgcgctacttgcacgtcctgtggcagcaggatgcggagccgcgcgacgagctgcgctgcaagatacccgctggccggctgaggcgcgctgccaggccccaccggcggctcgggcccacgggcaaggaggtgcacgtgcagcagctgctggaagatggcgcggatccctgtgcagctgatgacaagggccgcacagctctacactttgcctcatgcaatggcaatgaccagattgtgcagctgctcctggaccatggtgctgatcctaaccagcgagatgggctggggaacacgccactgcacctggcggcctgcaccaaccacgttcctgtcatcaccacactgctacgaggagatcatccatatgctgagggagtatctggagcgcctagggcaacatgagcagcgagaacgcctggatgacctctgcacccgcctgcagatgaccagtaccaaagagcaggtggatgaagtgactgacctcctggccagcttcacctccctcagtctgcagatgcagagcatggagaagaggtagcaagagaggctccctgccttcctgccactgccccaccctgccccactgctgtctcagtaccaagaaaaagcccaacatctgggacttggagctgcacttgtctggtgaggaccttgccctcacccgcagatgccgtggggcagagatgctctctctccacggcctcagagccactcccagccacagtttccagcatctctgtggacagggaccacagctcccagcttcttccagttctcgcagcaccagaccagcctctgcagctgcacttcagctccgcagacctgcgctatctcagcagacctcacttgccccatggccttcatggcgcgctccaggcctcagacccttctctgtgttccgtcctggccatgggcttgttgcagtcagcaggtgtgggcttaggcgggcaccctgtggccaggggtactgcgtgaggccctcagttggtcctgtgcctctcaccagcacttagacagacacgtcaccagactttcaaggagatactgcagtgagtttctctggttggaaggggagggttggtgagtcccagaccttaaaaatacaaggttaagagggaccccaaagcaaaaaattccaacccttttcctcccagtcattgaaacaccaaaactattataccggagggtgtaatagttttgctgcccagttgtggtaggccagtagtggcctcccaagatgcccatgtcctaatcccaggaacctgtcaaaattaccttgtatggccaaaggggctttgcagatgtaatgaagttaaggatctttcgccaggaagattatcccagcttgttcaggagggcttgatgtcctcacccgggtctgtataacagaagagcaggtgacgggagaggaggttggaggtgtagcgatggagcaggaaactggagttgaggagggcagctcaagccacagagtccaggccacctcagagccaggaaatgcatcctcccacagagccctggaaggccccagccctgctcccacctggactggctcagtgaggctaattttataattctggctgattttagaactctaagggaataaatttgtgttgttttaa

SEQ ID NO: 423673 - DNA, 1308 bp, Homo sapiens
aattacggctaggtacgaggctgggtgttcggtttaagctggaagggtagtcattggttcgccgctctgtctcggcctgagcccgcccccgctcggttgccgtggttgcgggccctgcccgcccgccagctcgctgacagcacgactcagggcggagggaagtaggtccgttggtcggtcgggaacgaggctcaggcggccaggcccgcgcggagccgttgccatggcagccgccgccggggacgcggacgacgagccgcgctcaggccactcgagctcggagggcgagtgcgcggtggcgccggagccgctgactgacgctgagggcctcttctccttcgctgacttcgggtctgcgctgggcggcggcggcgcgggcctctcgggccgggcgtccggcggggcccagtcgccgctgcgctacttgcacgtcctgtggcagcaggatgcggagccgcgcgacgagctgcgctgcaagatacccgctggccggctgaggcgcgctgccaggccccaccggcggctcgggcacttgccccatggccttcatggcgcgctccaggcctcagacccttctctgtgttccgtcctggccatgggcttgttgcagtcagcaggtgtgggcttaggcgggcaccctgtggccaggggtactgcgtgaggccctcagttggtcctgtgcctctcaccagcacttagacagacacgtcaccagactttcaaggagatactgcagtgagtttctctggttggaaggggagggttggtgagtcccagaccttaaaaatacaaggttaagagggaccccaaagcaaaaaattccaacccttttcctcccagtcattgaaacaccaaaactattataccggagggtgtaatagttttgctgcccagttgtggtaggccagtagtggcctcccaagatgcccatgtcctaatcccaggaacctgtcaaaattaccttgtatggccaaaggggctttgcagatgtaatgaagttaaggatctttcgccaggaagattatcccagcttgttcaggagggcttgatgtcctcacccgggtctgtataacagaagagcaggtgacgggagaggaggttggaggtgtagcgatggagcaggaaactggagttgaggagggcagctcaagccacagagtccaggccacctcagagccaggaaatgcatcctcccacagagccctggaaggccccagccctgctcccacctggactggctcagtgaggctaattttataattctggctgattttagaactctaagggaataaatttgtgttgttttaa

SEQ ID NO: 423674 - DNA, 2152 bp, Homo sapiens
aattacggctaggtacgaggctgggtgttcggtttaagctggaagggtagtcattggttcgccgctctgtctcggcctgagcccgcccccgctcggttgccgtggttgcgggccctgcccgcccgccagctcgctgacagcacgactcagggcggagggaagtaggtccgttggtcggtcgggaacgaggctcaggcggccaggcccgcgcggagccgttgccatggcagccgccgccggggacgcggacgacgagccgcgctcaggccactcgagctcggagggcgagtgcgcggtggcgccggagccgctgactgacgctgagggcctcttctccttcgctgacttcgggtctgcgctgggcggcggcggcgcgggcctctcgggccgggcgtccggcggggcccagtcgccgctgcgctacttgcacgtcctgtggcagcaggatgcggagccgcgcgacgagctgcgctgcaagatacccgctggccggctgaggcgcgctgccaggccccaccggcggctcgggcccacgggcaaggaggtgcacgctctgaagagactgagggactcggccaatgccaatgatgtggaaacagtgcagcagctgctggaagatggcgcggatccctgtgcagctgatgacaagggccgcacagctctacactttgcctcatgcaatggcaatgaccagattgtgcagctgctcctggaccatggtgctgatcctaaccagcgagatgggctggggaacacgccactgcacctggcggcctgcaccaaccacgttcctgtcatcaccacactgctacgaggaggggcccgtgtagatgccctggaccgagctggtcgcacacccctgcacctggccaagtcaaagctgaatatcctgcaggagggccatgcccagtgcctagaggctgtgcgtctggaggtgaagcagatcatccatatgctgagggagtatctggagcgcctagggcaacatgagcagcgagaacgcctggatgacctctgcacccgcctgcagatgaccagtaccaaagagcaggtggatgaagtgactgacctcctggccagcttcacctccctcagtctgcagatgcagagcatggagaagaggtagcaagagaggctccctgccttcctgccactgccccaccctgccccactgctgtctcagtaccaagaaaaagcccaacatctgggacttggagctgcacttgtctggtgaggaccttgccctcacccgcagatgccgtggggcagagatgctctctctccacggcctcagagccactcccagccacagtttccagcatctctgtggacagggaccacagctcccagcttcttccagttctcgcagcaccagaccagcctctgcagctgcacttcagctccgcagacctgcgctatctcagcagacctcacttgccccatggccttcatggcgcgctccaggcctcagacccttctctgtgttccgtcctggccatgggcttgttgcagtcagcaggtgtgggcttaggcgggcaccctgtggccaggggtactgcgtgaggccctcagttggtcctgtgcctctcaccagcacttagacagacacgtcaccagactttcaaggagatactgcagtgagtttctctggttggaaggggagggttggtgagtcccagaccttaaaaatacaaggttaagagggaccccaaagcaaaaaattccaacccttttcctcccagtcattgaaacaccaaaactattataccggagggtgtaatagttttgctgcccagttgtggtaggccagtagtggcctcccaagatgcccatgtcctaatcccaggaacctgtcaaaattaccttgtatggccaaaggggctttgcagatgtaatgaagttaaggatctttcgccaggaagattatcccagcttgttcaggagggcttgatgtcctcacccgggtctgtataacagaagagcaggtgacgggagaggaggttggaggtgtagcgatggagcaggaaatgcatcctcccacagagccctggaaggccccagccctgctcccacctggactggctcagtgaggctaattttataattctggctgattttagaactctaagggaataaatttgtgttgttttaa

SEQ ID NO: 423675 - DNA, 823 bp, Homo sapiens
tcaagccacagagtccaggccacctcagagccaggaaatgcatccacttgccccatggccttcatggcgcgctccaggcctcagacccttctctgtgttccgtcctggccatgggcttgttgcagtcagcaggtgtgggcttaggcgggcaccctgtggccaggggtactgcgtgaggccctcagttggtcctgtgcctctcaccagcacttagacagacacgtcaccagactttcaaggagatactgcagtgagtttctctggttggaaggggagggttggtgagtcccagaccttaaaaatacaaggttaagagggaccccaaagcaaaaaattccaacccttttcctcccagtcattgaaacaccaaaactattataccggagggtgtaatagttttgctgcccagttgtggtaggccagtagtggcctcccaagatgcccatgtcctaatcccaggaacctgtcaaaattaccttgtatggccaaaggggctttgcagatgtaatgaagttaaggatctttcgccaggaagattatcccagcttgttcaggagggcttgatgtcctcacccgggtctgtataacagaagagcaggtgacgggagaggaggttggaggtgtagcgatggagcaggaaactggagttgaggagggcagctcaagccacagagtccaggccacctcagagccaggaaatgcatcctcccacagagccctggaaggccccagccctgctcccacctggactggctcagtgaggctaattttataattctggctgattttagaactctaagggaataaatttgtgttgttttaa

SEQ ID NO: 423676 - DNA, 2210 bp, Homo sapiens
aattacggctaggtacgaggctgggtgttcggtttaagctggaagggtagtcattggttcgccgctctgtctcggcctgagcccgcccccgctcggttgccgtggttgcgggccctgcccgcccgccagctcgctgacagcacgactcagggcggagggaagtaggtccgttggtcggtcgggaacgaggctcaggcggccaggcccgcgcggagccgttgccatggcagccgccgccggggacgcggacgacgagccgcgctcaggccactcgagctcggagggcgagtgcgcggtggcgccggagccgctgactgacgctgagggcctcttctccttcgctgacttcgggtctgcgctgggcggcggcggcgcgggcctctcgggccgggcgtccggcggggcccagtcgccgctgcgctacttgcacgtcctgtggcagcaggatgcggagccgcgcgacgagctgcgctgcaagatacccgctggccggctgaggcgcgctgccaggccccaccggcggctcgggcccacgggcaaggaggtgcacgctctgaagagactgagggactcggccaatgccaatgatgtggaaacagtgcagcagctgctggaagatggcgcggatccctgtgcagctgatgacaagggccgcacagctctacactttgcctcatgcaatggcaatgaccagattgtgcagctgctcctggaccatggtgctgatcctaaccagcgagatgggctggggaacacgccactgcacctggcggcctgcaccaaccacgttcctgtcatcaccacactgctacgaggaggggcccgtgtagatgccctggaccgagctggtcgcacacccctgcacctggccaagtcaaagctgaatatcctgcaggagggccatgcccagtgcctagaggctgtgcgtctggaggtgaagcagatcatccatatgctgagggagtatctggagcgcctagggcaacatgagcagcgagaacgcctggatgacctctgcacccgcctgcagatgaccagtaccaaagagcaggtggatgaagtgactgacctcctggccagcttcacctccctcagtctgcagatgcagagcatggagaagaggtagcaagagaggctccctgccttcctgccactgccccaccctgccccactgctgtctcagtaccaagaaaaagcccaacatctgggacttggagctgcacttgtctggtgaggaccttgccctcacccgcagatgccgtggggcagagatgctctctctccacggcctcagagccactcccagccacagtttccagcatctctgtggacagggaccacagctcccagcttcttccagttctcgcagcaccagaccagcctctgcagctgcacttcagctccgcagacctgcgctatctcagcagacctcacttgccccatggccttcatggcgcgctccaggcctcagacccttctctgtgttccgtcctggccatgggcttgttgcagtcagcaggtgtgggcttaggcgggcaccctgtggccaggggtactgcgtgaggccctcagttggtcctgtgcctctcaccagcacttagacagacacgtcaccagactttcaaggagatactgcagtgagtttctctggttggaaggggagggttggtgagtcccagaccttaaaaatacaaggttaagagggaccccaaagcaaaaaattccaacccttttcctcccagtcattgaaacaccaaaactattataccggagggtgtaatagttttgctgcccagttgtggtaggccagtagtggcctcccaagatgcccatgtcctaatcccaggaacctgtcaaaattaccttgtatggccaaaggggctttgcagatgtaatgaagttaaggatctttcgccaggaagattatcccagcttgttcaggagggcttgatgtcctcacccgggtctgtataacagaagagcaggtgacgggagaggaggttggaggtgtagcgatggagcaggaaactggagttgaggagggcagctcaagccacagagtccaggccacctcagagccaggaaatgcatcctcccacagagccctggaaggccccagccctgctcccacctggactggctcagtgaggctaattttataattctggctgattttagaactctaagggaataaatttgtgttgttttaa

SEQ ID NO: 423677 - DNA, 2156 bp, Homo sapiens
aattacggctaggtacgaggctgggtgttcggtttaagctggaagggtagtcattggttcgccgctctgtctcggcctgagcccgcccccgctcggttgccgtggttgcgggccctgcccgcccgccagctcgctgacagcacgactcagggcggagggaagtaggtccgttggtcggtcgggaacgaggctcaggcggccaggcccgcgcggagccgttgccatggcagccgccgccggggacgcggacgacgagccgcgctcaggccactcgagctcggagggcgagtgcgcggtggcgccggagccgctgactgacgctgagggcctcttctccttcgctgacttcgggtctgcgctgggcggcggcggcgcgggcctctcgggccgggcgtccggcggggcccagtcgccgctgcgctacttgcacgtcctgtggcagcaggatgcggagccgcgcgacgagctgcgctgcaagatacccgctggccggctgaggcgcgctgccaggccccaccggcggctcgggcccacgggcaaggaggtgcacgctctgaagagactgagggactcggccaatgccaatgatgtggaaacagtgcagcagctgctggaagatggcgcggatccctgtgcagctgatgacaagggccgcacagctctacactttgcctcatgcaatggcaatgaccagattgtgcagctgctcctggaccatggtgctgatcctaaccagcgagatgggctggggaacacgccactgcacctggcggcctgcaccaaccacgttcctgtcatcaccacactgctacgaggaggggcccgtgtagatgccctggaccgagctggtcgcacacccctgcacctggccaagtcaaagctgaatatcctgcaggagggccatgcccagtgcctagaggctgtgcgtctggaggtgaagcagatcatccatatgctgagggagtatctggagcgcctagggcaacatgagcagcgagaacgcctggatgacctctgcacccgcctgcagatgaccagtaccaaagagcaggtggatgaagtgactgacctcctggccagcttcacctccctcagtctgcagatgcagagcatggagaagaggtagcaagagaggctccctgccttcctgccactgccccaccctgccccactgctgtctcagtaccaagatcacccgcagatgccgtggggcagagatgctctctctccacggcctcagagccactcccagccacagtttccagcatctctgtggacagggaccacagctcccagcttcttccagttctcgcagcaccagaccagcctctgcagctgcacttcagctccgcagacctgcgctatctcagcagacctcacttgccccatggccttcatggcgcgctccaggcctcagacccttctctgtgttccgtcctggccatgggcttgttgcagtcagcaggtgtgggcttaggcgggcaccctgtggccaggggtactgcgtgaggccctcagttggtcctgtgcctctcaccagcacttagacagacacgtcaccagactttcaaggagatactgcagtgagtttctctggttggaaggggagggttggtgagtcccagaccttaaaaatacaaggttaagagggaccccaaagcaaaaaattccaacccttttcctcccagtcattgaaacaccaaaactattataccggagggtgtaatagttttgctgcccagttgtggtaggccagtagtggcctcccaagatgcccatgtcctaatcccaggaacctgtcaaaattaccttgtatggccaaaggggctttgcagatgtaatgaagttaaggatctttcgccaggaagattatcccagcttgttcaggagggcttgatgtcctcacccgggtctgtataacagaagagcaggtgacgggagaggaggttggaggtgtagcgatggagcaggaaactggagttgaggagggcagctcaagccacagagtccaggccacctcagagccaggaaatgcatcctcccacagagccctggaaggccccagccctgctcccacctggactggctcagtgaggctaattttataattctggctgattttagaactctaagggaataaatttgtgttgttttaa

SEQ ID NO: 423678 - DNA, 2038 bp, Homo sapiens
aattacggctaggtacgaggctgggtgttcggtttaagctggaagggtagtcattggttcgccgctctgtctcggcctgagcccgcccccgctcggttgccgtggttgcgggccctgcccgcccgccagctcgctgacagcacgactcagggcggagggaagtaggtccgttggtcggtcgggaacgaggctcaggcggccaggcccgcgcggagccgttgccatggcagccgccgccggggacgcggacgacgagccgcgctcaggccactcgagctcggagggcgagtgcgcggtggcgccggagccgctgactgacgctgagggcctcttctccttcgctgacttcgggtctgcgctgggcggcggcggcgcgggcctctcgggccgggcgtccggcggggcccagtcgccgctgcgctacttgcacgtcctgtggcagcaggatgcggagccgcgcgacgagctgcgctgcaagatacccgctggccggctgaggcgcgctgccaggccccaccggcggctcgggcccacgggcaaggaggtgcacgctctgaagagactgagggactcggccaatgccaatgatgtggaaacagtgcagcagctgctggaagatggcgcggatccctgtgcagctgatgacaagggccgcacagctctacactttgcctcatgcaatggcaatgaccagattgtgcagctgctcctggaccatggtgctgatcctaaccagcgagatgggctggggaacacgccactgcacctggcggcctgcaccaaccacgttcctgtcatcaccacactgctacgaggaggggcccgtgtagatgccctggaccgagctggtcgcacacccctgcacctggccaagtcaaagctgaatatcctgcaggagggccatgcccagtgcctagaggctgtgcgtctggaggtgaagcagatcatccatatgctgagggagtatctggagcgcctagggcaacatgagcagcgagaacgcctggatgacctctgcacccgcctgcagatgaccagtaccaaagagcaggtggatgaagtgactgacctcctggccagcttcacctccctcagtctgcagatgcagagcatggagaagaggtagcaagagaggctccctgccttcctgccactgccccaccctgccccactgctgtctcagtaccaagaaaaagcccaacatctgggacttggagctgcacttgtctggtgaggaccttgccctcacccgcagatgccgtggggcagagatgctctctctccacggcctcagagccactcccagccacagtttccagcatctctgtggacagggaccacagctcccagcttcttccagttctcgcagcacggccaggggtactgcgtgaggccctcagttggtcctgtgcctctcaccagcacttagacagacacgtcaccagactttcaaggagatactgcagtgagtttctctggttggaaggggagggttggtgagtcccagaccttaaaaatacaaggttaagagggaccccaaagcaaaaaattccaacccttttcctcccagtcattgaaacaccaaaactattataccggagggtgtaatagttttgctgcccagttgtggtaggccagtagtggcctcccaagatgcccatgtcctaatcccaggaacctgtcaaaattaccttgtatggccaaaggggctttgcagatgtaatgaagttaaggatctttcgccaggaagattatcccagcttgttcaggagggcttgatgtcctcacccgggtctgtataacagaagagcaggtgacgggagaggaggttggaggtgtagcgatggagcaggaaactggagttgaggagggcagctcaagccacagagtccaggccacctcagagccaggaaatgcatcctcccacagagccctggaaggccccagccctgctcccacctggactggctcagtgaggctaattttataattctggctgattttagaactctaagggaataaatttgtgttgttttaa

SEQ ID NO: 423679 - DNA, 2371 bp, Homo sapiens
aattacggctaggtacgaggctgggtgttggaagtaggtccgttggtcggtcgggaacgaggctcaggcggccaggcccgcgcggagccgttgccatggcagccgccgccggggacgcggacgacgagccgcgctcaggccactcgagctcggagggcgagtgcgcggtggcgccggagccgctgactgacgctgagggcctcttctccttcgctgacttcgggtctgcgctgggcggcggcggcgcgggcctctcgggccgggcgtccggcggggcccagtcgccgctgcgctacttgcacgtcctgtggcagcaggatgcggagccgcgcgacgagctgcgctgcaagatacccgctggccggctgaggcgcgctgccaggccccaccggcggctcgggcccacgggcaaggaggtgcacgctctgaagagactgagggactcggccaatgccaatgatgtggaaacagtgcagcagctgctggaagatggcgcggatccctgtgcagctgatgacaagggccgcacagctctacactttgcctcatgcaatggcaatgaccagattgtgcagctgctcctggaccatggtgctgatcctaaccagcgagatgggctggggaacacgccactgcacctggcggcctgcaccaaccacgttcctgtcatcaccacactgctacgaggaggtatgtggtttcttcccctctctgtcctctttctccccctcacccccagaatgctcacctcagctggtaccttggggcccgtgtagatgccctggaccgagctggtcgcacacccctgcacctggccaagtcaaagctgaatatcctgcaggagggccatgcccagtgcctagaggctgtgcgtctggaggtgaagcagaggtgagtaccccttctgtgtggagaccacggcaccaaggcagcactggacagatgctgccctaaccacagacacacctgcctctggtcccagggctcctgggttgtttcacactgaccccagttggcacctgctccactgtgctttttggaagcagcatcagcctgtctgcctccctaggaacccaggcagctcagctcaccctcttgttccagatcatccatatgctgagggagtatctggagcgcctagggcaacatgagcagcgagaacgcctggatgacctctgcacccgcctgcagatgaccagtaccaaagagcaggtggatgaagtgactgacctcctggccagcttcacctccctcagtctgcagatgcagagcatggagaagaggtagcaagagaggctccctgccttcctgccactgccccaccctgccccactgctgtctcagtaccaagaaaaagcccaacatctgggacttggagctgcacttgtctggtgaggaccttgccctcacccgcagatgccgtggggcagagatgctctctctccacggcctcagagccactcccagccacagtttccagcatctctgtggacagggaccacagctcccagcttcttccagttctcgcagcaccagaccagcctctgcagctgcacttcagctccgcagacctgcgctatctcagcagacctcacttgccccatggccttcatggcgcgctccaggcctcagacccttctctgtgttccgtcctggccatgggcttgttgcagtcagcaggtgtgggcttaggcgggcaccctgtggccaggggtactgcgtgaggccctcagttggtcctgtgcctctcaccagcacttagacagacacgtcaccagactttcaaggagatactgcagtgagtttctctggttggaaggggagggttggtgagtcccagaccttaaaaatacaaggttaagagggaccccaaagcaaaaaattccaacccttttcctcccagtcattgaaacaccaaaactattataccggagggtgtaatagttttgctgcccagttgtggtaggccagtagtggcctcccaagatgcccatgtcctaatcccaggaacctgtcaaaattaccttgtatggccaaaggggctttgcagatgtaatgaagttaaggatctttcgccaggaagattatcccagcttgttcaggagggcttgatgtcctcacccgggtctgtataacagaagagcaggtgacgggagaggaggttggaggtgtagcgatggagcaggaaactggagttgaggagggcagctcaagccacagagtccaggccacctcagagccaggaaatgcatcctcccacagagccctggaaggccccagccctgctcccacctggactggctcagtgaggctaattttataattctggctgattttagaactctaagggaataaatttgtgttgttttaa

SEQ ID NO: 423680 - DNA, 2162 bp, Homo sapiens
aattacggctaggtacgaggctgggtgttcggtttaagctggaagggtagtcattggttcgccgctctgtctcggcctgagcccgcccccgctcggttgccgtggttgcgggccctgcccgcccgccagctcgctgacagcacgactcagggcggagggaagtaggtccgttggtcggtcgggaacgaggctcaggcggccaggcccgcgcggagccgttgccatggcagccgccgccggggacgcggacgacgagccgcgctcaggccactcgagctcggagggcgagtgcgcggtggcgccggagccgctgactgacgctgagggcctcttctccttcgctgacttcgggtctgcgctgggcggcggcggcgcgggcctctcgggccgggcgtccggcggggcccagtcgccgctgcgctacttgcacgtcctgtggcagcaggatgcggagccgcgcgacgagctgcgctgcaagatacccgctggccggctgaggcgcgctgccaggccccaccggcggctcgggcccacgggcaaggaggtgcacgtgcagcagctgctggaagatggcgcggatccctgtgcagctgatgacaagggccgcacagctctacactttgcctcatgcaatggcaatgaccagattgtgcagctgctcctggaccatggtgctgatcctaaccagcgagatgggctggggaacacgccactgcacctggcggcctgcaccaaccacgttcctgtcatcaccacactgctacgaggaggggcccgtgtagatgccctggaccgagctggtcgcacacccctgcacctggccaagtcaaagctgaatatcctgcaggagggccatgcccagtgcctagaggctgtgcgtctggaggtgaagcagatcatccatatgctgagggagtatctggagcgcctagggcaacatgagcagcgagaacgcctggatgacctctgcacccgcctgcagatgaccagtaccaaagagcaggtggatgaagtgactgacctcctggccagcttcacctccctcagtctgcagatgcagagcatggagaagaggtagcaagagaggctccctgccttcctgccactgccccaccctgccccactgctgtctcagtaccaagaaaaagcccaacatctgggacttggagctgcacttgtctggtgaggaccttgccctcacccgcagatgccgtggggcagagatgctctctctccacggcctcagagccactcccagccacagtttccagcatctctgtggacagggaccacagctcccagcttcttccagttctcgcagcaccagaccagcctctgcagctgcacttcagctccgcagacctgcgctatctcagcagacctcacttgccccatggccttcatggcgcgctccaggcctcagacccttctctgtgttccgtcctggccatgggcttgttgcagtcagcaggtgtgggcttaggcgggcaccctgtggccaggggtactgcgtgaggccctcagttggtcctgtgcctctcaccagcacttagacagacacgtcaccagactttcaaggagatactgcagtgagtttctctggttggaaggggagggttggtgagtcccagaccttaaaaatacaaggttaagagggaccccaaagcaaaaaattccaacccttttcctcccagtcattgaaacaccaaaactattataccggagggtgtaatagttttgctgcccagttgtggtaggccagtagtggcctcccaagatgcccatgtcctaatcccaggaacctgtcaaaattaccttgtatggccaaaggggctttgcagatgtaatgaagttaaggatctttcgccaggaagattatcccagcttgttcaggagggcttgatgtcctcacccgggtctgtataacagaagagcaggtgacgggagaggaggttggaggtgtagcgatggagcaggaaactggagttgaggagggcagctcaagccacagagtccaggccacctcagagccaggaaatgcatcctcccacagagccctggaaggccccagccctgctcccacctggactggctcagtgaggctaattttataattctggctgattttagaactctaagggaataaatttgtgttgttttaa

SEQ ID NO: 423681 - DNA, 695 bp, Homo sapiens
ggcctttctaaggtttatagaatagtaatggcctttactattttataaggtttatagaatagtaatggcctattctataaaccttataaacttgctctgggagaatgcattctaaattatatatagtgtttcagctcccattgtggtgttcatagtcttctaggaacagataaacttaagtattcaattcactcttggcattttttctttaatataggctttttagcctatttttggaaaactgcttttcttctgagaaccttattctgaatgtcatcaactttaccaaaccttctaagtccagagctaacttagtactgtttaagttactattgactgaattttcttcattttctgtttagtccagtgttaccaaggtaagctggggaatgaagtataccaacttctttcagagcattttaggacattatggcagctttagaaggctgtcttgtttctagccaagggagagccagcgcaggttttggatactagagaaagtcatttgcttgtactattgccattttagaaagctctgatgtgaattcaaattttacctctgttacttaaagccaacaattttaaggcagtagttttactggccatttaagctctttgtacagtgtcaatttgtaaaaaagaaaaaacgaaaaaaaatctcaaataaaacatgagataacattttaagacttcca

SEQ ID NO: 423682 - DNA, 4443 bp, Homo sapiens
agcggagtcgccggcccctcccgacaacctccctggcgcgcgcagttccacttccggcgtatgaggcggtgacaatgggagcagcgcgggcggcgccgggaggcagctgacaagcgtttgcggcttcgcttcatggccgctctcccgcccctcctgggatctgtggggagctggggagcccgcagcggcccggagccggagctggcgagccgagcggagacctgtgcgccgcgcctctgaggcgcagcatgtgaagcggagacggcatccagtggggggcgagcctctcagccggccgggatggctaccacggccgagctcttcgaggagccttttgtggcagatgaatatattgaacgtcttgtatggagaaccccaggaggaggctctagaggtggacctgaagcttttgatcctaaaagattattagaagaatttgtaaatcatattcaggaactccagataatggatgaaaggattcagaggaaagtagagaaactagagcaacaatgtcagaaagaagccaaggaatttgccaagaaggtacaagagctgcagaaaagcaatcaggttgccttccaacatttccaagaactagatgagcacattagctatgtagcaactaaagtctgtcaccttggagaccagttagagggggtaaacacacccagacaacgggcagtggaggctcagaaattgatgaaatactttaatgagtttctagatggagaattgaaatctgatgtttttacaaattctgaaaagataaaggaagcagcagacatcattcagaagttgcacctaattgcccaagagttaccttttgatagattttcagaagttaaatccaaaattgcaagtaaataccatgatttagaatgccagctgattcaggagtttaccagtgctcaaagaagaggtgaaatctccagaatgagagaagtagcagcagttttacttcattttaagggttattcccattgtgttgatgtttatataaagcagtgccaggagggtgcttatttgagaaatgatatatttgaagacgctggaatactctgtcaaagagtgaacaaacaagttggagatatcttcagtaatccagaaacagtcctggctaaacttattcaaaatgtatttgaaatcaaactacagagttttgtgaaagagcagttagaagaatgtaggaagtccgatgcagagcaatatctcaaaaatctctatgatctgtatacaagaaccaccaatctttccagcaagctgatggagtttaatttaggtactgataaacagactttcttgtctaagcttatcaaatccattttcatttcctatttggagaactatattgaggtggagactggatatttgaaaagcagaagtgctatgatcctacagcgctattatgattcgaaaaaccatcaaaagagatccattggcacaggaggtattcaagatttgaaggaaagaattagacagcgtaccaacttaccacttgggccaagtatcgatactcatggggagacttttctatcccaagaagtggtggttaatcttttacaagaaaccaaacaagcctttgaaagatgtcataggctctctgatccttctgacttaccaaggaatgccttcagaatttttaccattcttgtggaatttttatgtattgagcatattgattatgctttggaaacaggacttgctggaattccctcttcagattctaggaatgcaaatctttattttttggacgttgtgcaacaggccaatactatttttcatctttttgacaaacagtttaatgatcaccttatgccactaataagctcttctcctaagttatctgaatgccttcagaagaaaaaagaaataattgaacaaatggagatgaaattggatactggcattgataggacattaaattgtatgattggacagatgaagcatattttggctgcagaacagaagaaaacagattttaagccagaagatgaaaacaatgttttgattcaatatactaatgcctgtgtaaaagtctgtgcttacgtaagaaaacaagtggagaagattaaaaattccatggatgggaagaatgtggatacagttttgatggaacttggagtacgttttcatcgacttatctatgagcatcttcaacaatattcctacagttgtatgggtggcatgttggcaatttgtgatgtagccgaatataggaagtgtgccaaagacttcaagattccaatggtattacatctttttgatactctgcatgctctttgcaatcttctggtagttgccccagataatttaaagcaagtctgctcaggagaacaacttgctaatctggacaagaatatacttcactccttcgtacaacttcgtgctgattatagatctgcccgccttgctcgacacttcagctgagattgaatttacaaaggaattcagtgtcagttcctttacagaggaatgtcttatacttcagcagccctcggttgatagaaagcacaggagataccttatgacacagccaacattttgtgaaacaatgactggaacaaaacagcagccatacttacctttgaggttttatttaaagtttggataccactagctatattttgcttttttcccctcacattgaattttaattccattcttgaatgtagaaatttcagattctctaaaactacatgtcactgtttttatcctagaaaatgttgctgtcagaaggcaaaggaaatgttaccagtgttttcggttcttgtacttttaacatattccatttagaaattttgccattctgttttccattaataataggtgaaatacaggaaaactacatttgttattcctcagtttttaatgaccttttcagcatcaattgttaatcagattattttaggttttcgtaaataatttttttgcctctttcaaaaggttaacaattaagcatactttctgcagttggttgattggatttttttctgaggtacagcattaatactagtccaaaaaatgtcataaactgaactaaaatgatgaactattttatgtagacattaggagtggatcggaatacttctgctttctgggtaaaacttaaaagtttactatttcttattggtaaatagattttaagccaattctagtaagaaattaataaaactaccttattttgtatttcacttaaggtggaggaccttaactaaaggaccatatttattcattattttaatattataagggaagtaaaaaaaagtgaggtatagtctaaatggtgcatataggaaatactgacagtgtttagcaacatgcagccctttgagatttctgtcgtaatgctaaacttgaataagatggaatggctgaacatgtggttagtcttttattttaagaagaattgagaattgatagatttggagatgagctttgcaaaggctgtttgcttttcatgtctataggtctgtcattgtcctttttcaaagcatttctgaagttattcctacttggatatagttaatggaattggcttaatttgatgacataataaatcacttataaaattttaaatatcaagtgaaaatttagaaaggccattactattctataaaccttataaacttgctctgggagaatgcattctaaattatatatagtgtttcagctcccattgtggtgttcatagtcttctaggaacagataaacttaagtattcaattcactcttggcattttttctttaatataggctttttagcctatttttggaaaactgcttttcttctgagaaccttattctgaatgtcatcaactttaccaaaccttctaagtccagagctaacttagtactgtttaagttactattgactgaattttcttcattttctgtttagtccagtgttaccaaggtaagctggggaatgaagtataccaacttctttcagagcattttaggacattatggcagctttagaaggctgtcttgtttctagccaagggagagccagcgcaggttttggatactagagaaagtcatttgcttgtactattgccattttagaaagctctgatgtgaattcaaattttacctctgttacttaaagccaacaattttaaggcagtagttttactggccatttaagctctttgtacagtgtcaatttgtaaaaaagaaaaaacgaaaaaaaatctcaaataaaacatgagataacattttaagacttccaaatcagagaagtgcttcaaattattttgtttggattaatttttaaaatgtaaagcatatacttgttgcttagttattttgtttattattttcatgtttgagttctgtgcaatattttctattatgtccgttgataggacagtgacaaaattcgtaagtgaatacttaatttaaaagtgttaacattaatgctcaataaacaaattccctgca

SEQ ID NO: 423683 - DNA, 4487 bp, Homo sapiens
agcggagtcgccggcccctcccgacaacctccctggcgcgcgcagttccacttccggcgtatgaggcggtgacaatgggagcagcgcgggcggcgccgggaggcagctgacaagcgtttgcggcttcgcttcatggccgctctcccgcccctcctgggatctgtggggagctggggagcccgcagcggcccggagccggagctggcgagccgagcggagacctgtgcgccgcgcctctgaggcgcagcatgtgaagcggagacggcatccagtggggggcgagcctctcagccggccgggatggctaccacggccgagctcttcgaggagccttttgtggcagatgaatatattgaacgtcttgtatggagaaccccaggaggaggctctagaggtggacctgaagcttttgatcctaaaagattattagaagaatttgtaaatcatattcaggaactccagataatggatgaaaggattcagaggaaagtagagaaactagagcaacaatgtcagaaagaagccaaggaatttgccaagaaggtacaagagctgcagaaaagcaatcaggttgccttccaacatttccaagaactagatgagcacattagctatgtagcaactaaagtctgtcaccttggagaccagttagagggggtaaacacacccagacaacgggcagtggaggctcagaaattgatgaaatactttaatgagtttctagatggagaattgaaatctgatgtttttacaaattctgaaaagataaaggaagcagcagacatcattcagaagttgcacctaattgcccaagagttaccttttgatagattttcagaagttaaatccaaaattgcaagtaaataccatgatttagaatgccagctgattcaggagtttaccagtgctcaaagaagaggtgaaatctccagaatgagagaagtagcagcagttttacttcattttaagggttattcccattgtgttgatgtttatataaagcagtgccaggagggtgcttatttgagaaatgatatatttgaagacgctggaatactctgtcaaagagtgaacaaacaagttggagatatcttcagtaatccagaaacagtcctggctaaacttattcaaaatgtatttgaaatcaaactacagagttttgtgaaagagcagttagaagaatgtaggaagtccgatgcagagcaatatctcaaaaatctctatgatctgtatacaagaaccaccaatctttccagcaagctgatggagtttaatttaggtactgataaacagactttcttgtctaagcttatcaaatccattttcatttcctatttggagaactatattgaggtggagactggatatttgaaaagcagaagtgctatgatcctacagcgctattatgattcgaaaaaccatcaaaagagatccattggcacaggaggtattcaagatttgaaggaaagaattagacagcgtaccaacttaccacttgggccaagtatcgatactcatggggagacttttctatcccaagaagtggtggttaatcttttacaagaaaccaaacaagcctttgaaagatgtcataggctctctgatccttctgacttaccaaggaatgccttcagaatttttaccattcttgtggaatttttatgtattgagcatattgattatgctttggaaacaggacttgctggaattccctcttcagattctaggaatgcaaatctttattttttggacgttgtgcaacaggccaatactatttttcatctttttgacaaacagtttaatgatcaccttatgccactaataagctcttctcctaagttatctgaatgccttcagaagaaaaaagaaataattgaacaaatggagatgaaattggatactggcattgataggacattaaattgtatgattggacagatgaagcatattttggctgcagaacagaagaaaacagattttaagccagaagatgaaaacaatgttttgattcaatatactaatgcctgtgtaaaagtctgtgcttacgtaagaaaacaagtggagaagattaaaaattccatggatgggaagaatgtggatacagttttgatggaacttggagtacgttttcatcgacttatctatgagcatcttcaacaatattcctacagttgtatgggtggcatgttggcaatttgtgatgtagccgaatataggaagtgtgccaaagacttcaagattccaatggtattacatctttttgatactctgcatgctctttgcaatcttctggtagttgccccagataatttaaagcaagtctgctcaggagaacaacttgctaatctggacaagaatatacttcactccttcgtacaacttcgtgctgattatagatctgcccgccttgctcgacacttcagctgagattgaatttacaaaggaattcagtgtcagttcctttacagaggaatgtcttatacttcagcagccctcggttgatagaaagcacaggagataccttatgacacagccaacattttgtgaaacaatgactggaacaaaacagcagccatacttacctttgaggttttatttaaagtttggataccactagctatattttgcttttttcccctcacattgaattttaattccattcttgaatgtagaaatttcagattctctaaaactacatgtcactgtttttatcctagaaaatgttgctgtcagaaggcaaaggaaatgttaccagtgttttcggttcttgtacttttaacatattccatttagaaattttgccattctgttttccattaataataggtgaaatacaggaaaactacatttgttattcctcagtttttaatgaccttttcagcatcaattgttaatcagattattttaggttttcgtaaataatttttttgcctctttcaaaaggttaacaattaagcatactttctgcagttggttgattggatttttttctgaggtacagcattaatactagtccaaaaaatgtcataaactgaactaaaatgatgaactattttatgtagacattaggagtggatcggaatacttctgctttctgggtaaaacttaaaagtttactatttcttattggtaaatagattttaagccaattctagtaagaaattaataaaactaccttattttgtatttcacttaaggtggaggaccttaactaaaggaccatatttattcattattttaatattataagggaagtaaaaaaaagtgaggtatagtctaaatggtgcatataggaaatactgacagtgtttagcaacatgcagccctttgagatttctgtcgtaatgctaaacttgaataagatggaatggctgaacatgtggttagtcttttattttaagaagaattgagaattgatagatttggagatgagctttgcaaaggctgtttgcttttcatgtctataggtctgtcattgtcctttttcaaagcatttctgaagttattcctacttggatatagttaatggaattggcttaatttgatgacataataaatcacttataaaattttaaatatcaagtgaaaatttagaaaggccattactattctataaaccttataaacttgctctgggagaatgcattctaaattatatatagtgtttcagctcccattgtggtgttcatagtcttctaggaacagataaacttaagtattcaattcactcttggcattttttctttaatataggctttttagcctatttttggaaaactgcttttcttctgagaaccttattctgaatgtcatcaactttaccaaaccttctaagtccagagctaacttagtactgtttaagttactattgactgaattttcttcattttctgtttagtccagtgttaccaaggtaagctggggaatgaagtataccaacttctttcagagcattttaggacattatggcagctttagaaggctgtcttgtttctagccaagggagagccagcgcaggttttggatactagagaaagtcatttgcttgtactattgccattttagaaagctctgatgtgaattcaaattttacctctgttacttaaagccaacaattttaaggcagtagttttactggccatttaagctctttgtacagtgtcaatttgtaaaaaagaaaaaacgaaaaaaaatctcaaataaaacatgagataacattttaagacttccaaatcagagaagtgcttcaaattattttgtttggattaatttttaaaatgtaaagcatatacttgttgcttagttattttgtttattattttcatgtttgagttctgtgcaatattttctattatgtccgttgataggacagtgacaaaattcgtaagtgaatacttaatttaaaagtgttaacattaatgctcaataaacaaattccctgcagttgttttttttatttcactctttttatattttagagccatcca

SEQ ID NO: 423684 - DNA, 4231 bp, Homo sapiens
agcggagtcgccggcccctcccgacaacctccctggcgcgcgcagttccacttccggcgtatgaggcggtgacaatgggagcagcgcgggcggcgccgggaggcagctgacaagcgtttgcggcttcgcttcatggccgctctcccgcccctcctgggatctgtggggagctggggagcccgcagcggcccggagccggagctggcgagccgagcggagacctgtgcgccgcgcctctgaggcgcagcatgtgaagcggagacggcatccagtggggggcgagcctctcagccggccgggatggctaccacggccgagctcttcgaggagccttttgtggcagatgaatatattgaacgtcttgtatggagaaccccaggaggaggctctagaggtggacctgaagcttttgatcctaaaagattattagaagaatttgtaaatcatattcaggaactccagataatggatgaaaggattcagaggaaagtagagaaactagagcaacaatgtcagaaagaagccaaggaatttgccaagaaggtacaagagctgcagaaaagcaatcaggttgccttccaacatttccaagaactagatgagcacattagctatgtagcaactaaagtctgtcaccttggagaccagttagagggggtaaacacacccagacaacgggcagtggaggctcagaaattgatgaaatactttaatgagtttctagatggagaattgaaatctgatgtttttacaaattctgaaaagataaaggaagcagcagacatcattcagaagttgcacctaattgcccaagagttaccttttgatagattttcagaagttaaatccaaaattgcaagtaaataccatgatttagaatgccagctgattcaggagtttaccagtgctcaaagaagaggtgaaatctccagaatgagagaagtagcagcagttttacttcattttaagggttattcccattgtgttgatgtttatataaagcagtgccaggagggtgcttatttgagaaatgatatatttgaagacgctggaatactctgtcaaagagtgaacaaacaagttggagatatcttcagtaatccagaaacagtcctggctaaacttattcaaaatgtatttgaaatcaaactacagagttttgtgaaagagcagttagaagaatgtaggaagtccgatgcagagcaatatctcaaaaatctctatgatctgtatacaagaaccaccaatctttccagcaagctgatggagtttaatttaggtactgataaacagactttcttgtctaagcttatcaaatccattttcatttcctatttggagaactatattgaggtggagactggatatttgaaaagcagaagtgctatgatcctacagcgctattatgattcgaaaaaccatcaaaagagatccattggcacaggaggtattcaagatttgaaggaaagaattagacagcgtaccaacttaccacttgggccaagtatcgatactcatggggagacttttctatcccaagaagtggtggttaatcttttacaagaaaccaaacaagcctttgaaagatgtcataggctctctgatccttctgacttaccaaggaatgccttcagaatttttaccattcttgtggaatttttatgtattgagcatattgattatgctttggaaacaggacttgctggaattccctcttcagattctaggaatgcaaatctttattttttggacgttgtgcaacaggccaatactatttttcatctttttgacaaacagtttaatgatcaccttatgccactaataagctcttctcctaagttatctgaatgccttcagaagaaaaaagaaataattgaacaaatggagatgaaattggatactggcattgataggacattaaattgtatgattggacagatgaagcatattttggctgcagaacagaagaaaacagattttaagccagaagatgaaaacaatgttttgattcaatatactaatgcctgtgtaaaagtctgtgcttacgtaagaaaacaagtggagaagattaaaaattccatggatgggaagaatgtggatacagttttgatggaacttggagtacgttttcatcgacttatctatgagcatcttcaacaatattcctacagttgtatgggtggcatgttggcaatttgtgatgtagccgaatataggaagtgtgccaaagacttcaagattccaatggtattacatctttttgatactctgcatgctctttgcaatcttctggtagttgccccagataatttaaagcaagtctgctcaggagaacaacttgctaatctggacaagaatatacttcactccttcgtacaacttcgtgctgattatagatctgcccgccttgctcgacacttcagctgagattgaatttacaaaggaattcagtgtcagttcctttacagaggaatgtcttatacttcagcagccctcggttgatagaaagcacaggagataccttatgacacagccaacattttgtgaaacaatgactggaacaaaacagcagccatacttacctttgaggttttatttaaagtttggataccactagctatattttgcttttttcccctcacattgaattttaattccattcttgaatgtagaaatttcagattctctaaaactacatgtcactgtttttatcctagaaaatgttgctgtcagaaggcaaaggaaatgttaccagtgttttcggttcttgtacttttaacatattccatttagaaattttgccattctgttttccattaataataggtgaaatacaggaaaactacatttgttattcctcagtttttaatgaccttttcagcatcaattgttaatcagattattttaggttttcgtaaataatttttttgcctctttcaaaaggttaacaattaagcatactttctgcagttggttgattggatttttttctgaggtacagcattaatactagtccaaaaaatgtcataaactgaactaaaatgatgaactattttatgtagacattaggagtggatcggaatacttctgctttctgggtaaaacttaaaagtttactatttcttattggtaaatagattttaagccaattctagtaagaaattaataaaactaccttattttgtatttcacttaaggtggaggaccttaactaaaggaccatatttattcattattttaatattataagggaagtaaaaaaaagtgaggtatagtctaaatggtgcatataggaaatactgacagtgtttagcaacatgcagccctttgagatttctgtcgtaatgctaaacttgaataagatggaatggctgaacatgtggttagtcttttattttaagaagaattgagaattgatagatttggagatgagctttgcaaaggctgtttgcttttcatgtctataggtctgtcattgtcctttttcaaagcatttctgaagttattcctacttggatatagttaatggaattggcttaatttgatgacataataaatcacttataaaattttaaatatcaagtgaaaatttagaaaggccattactattctataaaccttataaacttgctctgggagaatgcattctaaattatatatagtgtttcagctcccattgtggtgttcatagtcttctaggaacagataaacttaagtattcaattcactcttggcattttttctttaatataggctttttagcctatttttggaaaactgcttttcttctgagaaccttattctgaatgtcatcaactttaccaaaccttctaagtccagagctaacttagtactgtttaagttactattgactgaattttcttcattttctgtttagtccagtgttaccaaggtaagctggggaatgaagtataccaacttctttcagagcattttaggacattatggcagctttagaaggctgtcttgtttctagccaagggagagccagcgcaggttttggatactagagaaagtcatttgcttgtactattgccattttagaaagctctgatgtgaattcaaattttacctctgttacttaaagccaacaattttaaggcagtagttttactggccatttaagctctttgtacagtgtcaatttgtaaaaaagaaaaaacgaaaaaaaatctcaaataaaacatgagataacattttaagacttcca

SEQ ID NO: 423685 - DNA, 4421 bp, Homo sapiens
agcggagtcgccggcccctcccgacaacctccctggcgcgcgcagttccacttccggcgtatgaggcggtgacaatgggagcagcgcgggcggcgccgggaggcagctgacaagcgtttgcggcttcgcttcatggccgctctcccgcccctcctgggatctgtggggagctggggagcccgcagcggcccggagccggagctggcgagccgagcggagacctgtgcgccgcgcctctgaggcgcagcatgtgaagcggagacggcatccagtggggggcgagcctctcagccggccgggatggctaccacggccgagctcttcgaggagccttttgtggcagatgaatatattgaacgtcttgtatggagaaccccaggaggaggctctagaggtggacctgaagcttttgatcctaaaagattattagaagaatttgtaaatcatattcaggaactccagataatggatgaaaggattcagaggaaagtagagaaactagagcaacaatgtcagaaagaagccaaggaatttgccaagaaggtacaagagctgcagaaaagcaatcaggttgccttccaacatttccaagaactagatgagcacattagctatgtagcaactaaagtctgtcaccttggagaccagttagagggggtaaacacacccagacaacgggcagtggaggctcagaaattgatgaaatactttaatgagtttctagatggagaattgaaatctgatgtttttacaaattctgaaaagataaaggaagcagcagacatcattcagaagttgcacctaattgcccaagagttaccttttgatagattttcagaagttaaatccaaaattgcaagtaaataccatgatttagaatgccagctgattcaggagtttaccagtgctcaaagaagaggtgaaatctccagaatgagagaagtagcagcagttttacttcattttaagggttattcccattgtgttgatgtttatataaagcagtgccaggagggtgcttatttgagaaatgatatatttgaagacgctggaatactctgtcaaagagtgaacaaacaagttggagatatcttcagtaatccagaaacagtcctggctaaacttattcaaaatgtatttgaaatcaaactacagagttttgtgaaagagcagttagaagaatgtaggaagtccgatgcagagcaatatctcaaaaatctctatgatctgtatacaagaaccaccaatctttccagcaagctgatggagtttaatttaggtactgataaacagactttcttgtctaagcttatcaaatccattttcatttcctatttggagaactatattgaggtggagactggatatttgaaaagcagaagtgctatgatcctacagcgctattatgattcgaaaaaccatcaaaagagatccattggcacaggaggtattcaagatttgaaggaaagaattagacagcgtaccaacttaccacttgggccaagtatcgatactcatggggagacttttctatcccaagaagtggtggttaatcttttacaagaaaccaaacaagcctttgaaagatgtcataggctctctgatccttctgacttaccaaggaatgccttcagaatttttaccattcttgtggaatttttatgtattgagcatattgattatgctttggaaacaggacttgctggaattccctcttcagattctaggaatgcaaatctttattttttggacgttgtgcaacaggccaatactatttttcatctttttgacaaacagtttaatgatcaccttatgccactaataagctcttctcctaagttatctgaatgccttcagaagaaaaaagaaataattgaacaaatggagatgaaattggatactggcattgataggacattaaattgtatgattggacagatgaagcatattttggctgcagaacagaagaaaacagattttaagccagaagatgaaaacaatgttttgattcaatatactaatgcctgtgtaaaagtctgtgcttacgtaagaaaacaagtggagaagattaaaaattccatggatgggaagaatgtggatacagttttgatggaacttggagtacgttttcatcgacttatctatgagcatcttcaacaatattcctacagttgtatgggtggcatgttggcaatttgtgatgtagccgaatataggaagtgtgccaaagacttcaagattccaatggtattacatctttttgatactctgcatgctctttgcaatcttctggtagttgccccagataatttaaagcaagtctgctcaggagaacaacttgctaatctggacaagaatatacttcactccttcgtacaacttcgtgctgattatagatctgcccgccttgctcgacacttcagctgagattgaatttacaaaggaattcagtgtcagttcctttacagaggaatgtcttatacttcagcagccctcggttgatagaaagcacaggagataccttatgacacagccaacattttgtgaaacaatgactggaacaaaacagcagccatacttacctttgaggttttatttaaagtttggataccactagctatattttgcttttttcccctcacattgaattttaattccattcttgaatgtagaaatttcagattctctaaaactacatgtcactgtttttatcctagaaaatgttgctgtcagaaggcaaaggaaatgttaccagtgttttcggttcttgtacttttaacatattccatttagaaattttgccattctgttttccattaataataggtgaaatacaggaaaactacatttgttattcctcagtttttaatgaccttttcagcatcaattgttaatcagattattttaggttttcgtaaataatttttttgcctctttcaaaaggttaacaattaagcatactttctgcagttggttgattggatttttttctgaggtacagcattaatactagtccaaaaaatgtcataaactgaactaaaatgatgaactattttatgtagacattaggagtggatcggaatacttctgctttctgggtaaaacttaaaagtttactatttcttattggtaaatagattttaagccaattctagtaagaaattaataaaactaccttattttgtatttcacttaaggtggaggaccttaactaaaggaccatatttattcattattttaatattataagggaagtaaaaaaaagtgaggtatagtctaaatggtgcatataggaaatactgacagtgtttagcaacatgcagccctttgagatttctgtcgtaatgctaaacttgaataagatggaatggctgaacatgtggttagtcttttattttaagaagaattgagaattgatagatttggagatgagctttgcaaaggctgtttgcttttcatgtctataggtctgtcattgtcctttttcaaagcatttctgaagttattcctacttggatatagttaatggaattggcttaatttgatgacataataaatcacttataaaattttaaatatcaagtgaaaatttagaaaggccattactattctataaaccttataaacttgctctgggagaatgcattctaaattatatatagtgtttcagctcccattgtggtgttcatagtcttctaggaacagataaacttaagtattcaattcactcttggcattttttctttaatataggctttttagcctatttttggaaaactgcttttcttctgagaaccttattctgaatgtcatcaactttaccaaaccttctaagtccagagctaacttagtactgtttaagttactattgactgaattttcttcattttctgtttagtccagtgttaccaaggtaagctggggaatgaagtataccaacttctttcagagcattttaggacattatggcagctttagaaggctgtcttgtttctagccaagggagagccagcgcaggttttggatactagagaaagtcatttgcttgtactattgccattttagaaagctctgatgtgaattcaaattttacctctgttacttaaagccaacaattttaaggcagtagttttactggccatttaagctctttgtacagtgtcaatttgtaaaaaagaaaaaacgaaaaaaaatctcaaataaaacatgagataacattttaagacttccaaatcagagaagtgcttcaaattattttgtttggattaatttttaaaatgtaaagcatatacttgttgcttagttattttgtttattgagcattaatgttaacacttttaaattaagtattcacttacgaattttgtcactgtcctatcaacggacataatagaaacatattgcacagaactcacacatga

SEQ ID NO: 423686 - DNA, 4384 bp, Homo sapiens
agcggagtcgccggcccctcccgacaacctccctggcgcgcgcagttccacttccggcgtatgaggcggtgacaatgggagcagcgcgggcggcgccgggaggcagctgacaagcgtttgcggcttcgcttcatggccgctctcccgcccctcctgggatctgtggggagctggggagcccgcagcggcccggagccggagctggcgagccgagcggagacctgtgcgccgcgcctctgaggcgcagcatgtgaagcggagacggcatccagtggggggcgagcctctcagccggccgggatggctaccacggccgagctcttcgaggagccttttgtggcagatgaatatattgaacgtcttgtatggagaaccccaggaggaggctctagaggtggacctgaagcttttgatcctaaaagattattagaagaatttgtaaatcatattcaggaactccagataatggatgaaaggattcagaggaaagtagagaaactagagcaacaatgtcagaaagaagccaaggaatttgccaagaaggtacaagagctgcagaaaagcaatcaggttgccttccaacatttccaagaactagatgagcacattagctatgtagcaactaaagtctgtcaccttggagaccagttagagggggtaaacacacccagacaacgggcagtggaggctcagaaattgatgaaatactttaatgagtttctagatggagaattgaaatctgatgtttttacaaattctgaaaagataaaggaagcagcagacatcattcagaagttgcacctaattgcccaagagttaccttttgatagattttcagaagttaaatccaaaattgcaagtaaataccatgatttagaatgccagctgattcaggagtttaccagtgctcaaagaagaggtgaaatctccagaatgagagaagtagcagcagttttacttcattttaagggttattcccattgtgttgatgtttatataaagcagtgccaggagggtgcttatttgagaaatgatatatttgaagacgctggaatactctgtcaaagagtgaacaaacaagttggagatatcttcagtaatccagaaacagtcctggctaaacttattcaaaatgtatttgaaatcaaactacagagttttgtgaaagagcagttagaagaatgtaggaagtccgatgcagagcaatatctcaaaaatctctatgatctgtatacaagaaccaccaatctttccagcaagctgatggagtttaatttaggtactgataaacagactttcttgtctaagcttatcaaatccattttcatttcctatttggagaactatattgaggtggagactggatatttgaaaagcagaagtgctatgatcctacagcgctattatgattcgaaaaaccatcaaaagagatccattggcacaggaggtattcaagatttgaaggaaagaattagacagcgtaccaacttaccacttgggccaagtatcgatactcatggggagacttttctatcccaagaagtggtggttaatcttttacaagaaaccaaacaagcctttgaaagatgtcataggctctctgatccttctgacttaccaaggaatgccttcagaatttttaccattcttgtggaatttttatgtattgagcatattgattatgctttggaaacaggacttgctggaattccctcttcagattctaggaatgcaaatctttattttttggacgttgtgcaacaggccaatactatttttcatctttttgacaaacagtttaatgatcaccttatgccactaataagctcttctcctaagttatctgaatgccttcagaagaaaaaagaaataattgaacaaatggagatgaaattggatactggcattgataggacattaaattgtatgattggacagatgaagcatattttggctgcagaacagaagaaaacagattttaagccagaagatgaaaacaatgttttgattcaatatactaatgcctgtgtaaaagtctgtgcttacgtaagaaaacaagtggagaagattaaaaattccatggatgggaagaatgtggatacagttttgatggaacttggagtacgttttcatcgacttatctatgagcatcttcaacaatattcctacagttgtatgggtggcatgttggcaatttgtgatgtagccgaatataggaagtgtgccaaagacttcaagattccaatggtattacatctttttgatactctgcatgctctttgcaatcttctggtagttgccccagataatttaaagcaagtctgctcaggagaacaacttgctaatctggacaagaatatacttcactccttcgtacaacttcgtgctgattatagatctgcccgccttgctcgacacttcagctgagattgaatttacaaaggaattcagtgtcagttcctttacagaggaatgtcttatacttcagcagccctcggttgatagaaagcacaggagataccttatgacacagccaacattttgtgaaacaatgactggaacaaaacagcagccatacttacctttgaggttttatttaaagtttggataccactagctatattttgcttttttcccctcacattgaattttaattccattcttgaatgtagaaatttcagattctctaaaactacatgtcactgtttttatcctagaaaatgttgctgtcagaaggcaaaggaaatgttaccagtgttttcggttcttgtacttttaacatattccatttagaaattttgccattctgttttccattaataataggtgaaatacaggaaaactacatttgttattcctcagtttttaatgaccttttcagcatcaattgttaatcagattattttaggttttcgtaaataatttttttgcctctttcaaaaggttaacaattaagcatactttctgcagttggttgattggatttttttctgaggtacagcattaatactagtccaaaaaatgtcataaactgaactaaaatgatgaactattttatgtagacattaggagtggatcggaatacttctgctttctgggtaaaacttaaaagtttactatttcttattggtaaatagattttaagccaattctagtaagaaattaataaaactaccttattttgtatttcacttaaggtggaggaccttaactaaaggaccatatttattcattattttaatattataagggaacaacatgcagccctttgagatttctgtcgtaatgctaaacttgaataagatggaatggctgaacatgtggttagtcttttattttaagaagaattgagaattgatagatttggagatgagctttgcaaaggctgtttgcttttcatgtctataggtctgtcattgtcctttttcaaagcatttctgaagttattcctacttggatatagttaatggaattggcttaatttgatgacataataaatcacttataaaattttaaatatcaagtgaaaatttagaaaggccattactattctataaaccttataaacttgctctgggagaatgcattctaaattatatatagtgtttcagctcccattgtggtgttcatagtcttctaggaacagataaacttaagtattcaattcactcttggcattttttctttaatataggctttttagcctatttttggaaaactgcttttcttctgagaaccttattctgaatgtcatcaactttaccaaaccttctaagtccagagctaacttagtactgtttaagttactattgactgaattttcttcattttctgtttagtccagtgttaccaaggtaagctggggaatgaagtataccaacttctttcagagcattttaggacattatggcagctttagaaggctgtcttgtttctagccaagggagagccagcgcaggttttggatactagagaaagtcatttgcttgtactattgccattttagaaagctctgatgtgaattcaaattttacctctgttacttaaagccaacaattttaaggcagtagttttactggccatttaagctctttgtacagtgtcaatttgtaaaaaagaaaaaacgaaaaaaaatctcaaataaaacatgagataacattttaagacttccaaatcagagaagtgcttcaaattattttgtttggattaatttttaaaatgtaaagcatatacttgttgcttagttattttgtttattattttcatgtttgagttctgtgcaatattttctattatgtccgttgataggacagtgacaaaattcgtaagtgaatacttaatttaaaagtgttaacattaatgctcaataaacaaattccctgca

SEQ ID NO: 423687 - DNA, 3870 bp, Homo sapiens
agcggagtcgccggcccctcccgacaacctccctggcgcgcgcagttccacttccggcgtatgaggcggtgacaatgggagcagcgcgggcggcgccgggaggcagctgacaagcgtttgcggcttcgcttcatggccgctctcccgcccctcctgggatctgtggggagctggggagcccgcagcggcccggagccggagctggcgagccgagcggagacctgtgcgccgcgcctctgaggcgcagcatgtgaagcggagacggcatccagtggggggcgagcctctcagccggccgggatggctaccacggccgagctcttcgaggagccttttgtggcagatgaatatattgaacgtcttgtatggagaaccccaggaggaggctctagaggtggacctgaagcttttgatcctaaaagattattagaagaatttgtaaatcatattcaggaactccagataatggatgaaaggattcagaggaaagtagagaaactagagcaacaatgtcagaaagaagccaaggaatttgccaagaaggtacaagagctgcagaaaagcaatcaggttgccttccaacatttccaagaactagatgagcacattagctatgtagcaactaaagtctgtcaccttggagaccagttagagggggtaaacacacccagacaacgggcagtggaggctcagaaattgatgaaatactttaatgagtttctagatggagaattgaaatctgatgtttttacaaattctgaaaagataaaggaagcagcagacatcattcagaagttgcacctaattgcccaagagttaccttttgatagattttcagaagttaaatccaaaattgcaagtaaataccatgatttagaatgccagctgattcaggagtttaccagtgctcaaagaagaggtgaaatctccagaatgagagaagtagcagcagttttacttcattttaagggttattcccattgtgttgatgtttatataaagcagtgccaggagggtgcttatttgagaaatgatatatttgaagacgctggaatactctgtcaaagagtgaacaaacaagttggagatatcttcagtaatccagaaacagtcctggctaaacttattcaaaatgtatttgaaatcaaactacagagttttgtgaaagagcagttagaagaatgtaggaagtccgatgcagagcaatatctcaaaaatctctatgatctgtatacaagaaccaccaatctttccagcaagctgatggagtttaatttaggtactgataaacagactttcttgtctaagcttatcaaatccattttcatttcctatttggagaactatattgaggtggagactggatatttgaaaagcagaagtgctatgatcctacagcgctattatgattcgaaaaaccatcaaaagagatccattggcacaggaggtattcaagatttgaaggaaagaattagacagcgtaccaacttaccacttgggccaagtatcgatactcatggggagacttttctatcccaagaagtggtggttaatcttttacaagaaaccaaacaagcctttgaaagatgtcataggctctctgatccttctgacttaccaaggaatgccttcagaatttttaccattcttgtggaatttttatgtattgagcatattgattatgctttggaaacaggacttgctggaattccctcttcagattctaggaatgcaaatctttattttttggacgttgtgcaacaggccaatactatttttcatctttttgacaaacagtttaatgatcaccttatgccactaataagctcttctcctaagttatctgaatgccttcagaagaaaaaagaaataattgaacaaatggagatgaaattggatactggcattgataggacattaaattgtatgattggacagatgaagcatattttggctgcagaacagaagaaaacagattttaagccagaagatgaaaacaatgttttgattcaatatactaatgcctgtgtaaaagtctgtgcttacgtaagaaaacaagtggagaagattaaaaattccatggatgggaagaatgtggatacagttttgatggaacttggagtacgttttcatcgacttatctatgagcatcttcaacaatattcctacagttgtatgggtggcatgttggcaatttgtgatgtagccgaatataggaagtgtgccaaagacttcaagattccaatggtattacatctttttgatactctgcatgctctttgcaatcttctggtagttgccccagataatttaaagcaagtctgctcaggagaacaacttgctaatctggacaagaatatacttcactccttcgtacaacttcgtgctgattatagatctgcccgccttgctcgacacttcagctgagattgaatttacaaaggaattcagtgtcagttcctttacagaggaatgtcttatacttcagcagccctcggttgatagaaagcacaggagataccttatgacacagccaacattttgtgaaacaatgactggaacaaaacagcagccatacttacctttgaggttttatttaaagtttggataccactagctatattttgcttttttcccctcacattgaattttaattccattcttgaatgtagaaatttcagattctctaaaactacatgtcactgtttttatcctagaaaatgttgctgtcagaaggcaaaggaaatgttaccagtgttttcggttcttgtacttttaacatattccatttagaaattttgccattctgttttccattaataataggtgaaatacaggaaaactacatttgttattcctcagtttttaatgaccttttcagcatcaattgttaatcagattattttaggttttcgtaaataatttttttgcctctttcaaaaggttaacaattaagcatactttctgcagttggttgattggatttttttctgaggtacagcattaatactagtccaaaaaatgtcataaactgaactaaaatgatgaactattttatgtagacattaggagtggatcggaatacttctgctttctgggtaaaacttaaaagtttactatttcttattggtaaatagattttaagccaattctagtaagaaattaataaaactaccttattttgtatttcacttaaggtggaggaccttaactaaaggaccatatttattcattattttaatattataagggaagtaaaaaaaagtgaggtatagtctaaatggtgcatataggaaatactgacagtgtttagcaacatgcagccctttgagatttctgtcgtaatgctaaacttgaataagatggaatggctgaacatgtggttagtcttttattttaagaagaattgagaattgatagatttggagatgagctttgcaaaggctgtttgcttttcatgtctataggtctgtcattgtcctttttcaaagcatttctgaagttattcctacttggatatagttaatggaattggcttaatttgatgacataataaatcacttataaaattttaaatatcaagtgaaaatttagaaaggccattactattctataaaccttataaacttgctctgggagaatgcattctaaattatatatagtgtttcagctcccattgtggtgttcatagtcttctaggaacagataaacttaagtattcaattcactcttggcattttttctttaatataggctttttagcctatttttggaaaactgcttttcttctgagaaccttattctgaatgtcaacgtgtggtaccgcagctcgcaattcgctaatcactggtcactagcgtgtttccgtgt

SEQ ID NO: 423688 - DNA, 3701 bp, Homo sapiens
agcggagtcgccggcccctcccgacaacctccctggcgcgcgcagttccacttccggcgtatgaggcggtgacaatgggagcagcgcgggcggcgccgggaggcagctgacaagcgtttgcggcttcgcttcatggccgctctcccgcccctcctgggatctgtggggagctggggagcccgcagcggcccggagccggagctggcgagccgagcggagacctgtgcgccgcgcctctgaggcgcagcatgtgaagcggagacggcatccagtggggggcgagcctctcagccggccgggatggctaccacggccgagctcttcgaggagccttttgtggcagatgaatatattgaacgtcttgtatggagaaccccaggaggaggctctagaggtggacctgaagcttttgatcctaaaagattattagaagaatttgtaaatcatattcaggaactccagataatggatgaaaggattcagaggaaagtagagaaactagagcaacaatgtcagaaagaagccaaggaatttgccaagaaggtacaagagctgcagaaaagcaatcaggttgccttccaacatttccaagaactagatgagcacattagctatgtagcaactaaagtctgtcaccttggagaccagttagagggggtaaacacacccagacaacgggcagtggaggctcagaaattgatgaaatactttaatgagtttctagatggagaattgaaatctgatgtttttacaaattctgaaaagataaaggaagcagcagacatcattcagaagttgcacctaattgcccaagagttaccttttgatagattttcagaagttaaatccaaaattgcaagtaaataccatgatttagaatgccagctgattcaggagtttaccagtgctcaaagaagaggtgaaatctccagaatgagagaagtagcagcagttttacttcattttaagggttattcccattgtgttgatgtttatataaagcagtgccaggagggtgcttatttgagaaatgatatatttgaagacgctggaatactctgtcaaagagtgaacaaacaagttggagatatcttcagtaatccagaaacagtcctggctaaacttattcaaaatgtatttgaaatcaaactacagagttttgtgaaagagcagttagaagaatgtaggaagtccgatgcagagcaatatctcaaaaatctctatgatctgtatacaagaaccaccaatctttccagcaagctgatggagtttaatttaggtactgataaacagactttcttgtctaagcttatcaaatccattttcatttcctatttggagaactatattgaggtggagactggatatttgaaaagcagaagtgctatgatcctacagcgctattatgattcgaaaaaccatcaaaagagatccattggcacaggaggtattcaagatttgaaggaaagaattagacagcgtaccaacttaccacttgggccaagtatcgatactcatggggagacttttctatcccaagaagtggtggttaatcttttacaagaaaccaaacaagcctttgaaagatgtcataggctctctgatccttctgacttaccaaggaatgccttcagaatttttaccattcttgtggaatttttatgtattgagcatattgattatgctttggaaacaggacttgctggaattccctcttcagattctaggaatgcaaatctttattttttggacgttgtgcaacaggccaatactatttttcatctttttgacaaacagtttaatgatcaccttatgccactaataagctcttctcctaagttatctgaatgccttcagaagaaaaaagaaataattgaacaaatggagatgaaattggatactggcattgataggacattaaattgtatgattggacagatgaagcatattttggctgcagaacagaagaaaacagattttaagccagaagatgaaaacaatgttttgattcaatatactaatgcctgtgtaaaagtctgtgcttacgtaagaaaacaagtggagaagattaaaaattccatggatgggaagaatgtggatacagttttgatggaacttggagtacgttttcatcgacttatctatgagcatcttcaacaatattcctacagttgtatgggtggcatgttggcaatttgtgatgtagccgaatataggaagtgtgccaaagacttcaagattccaatggtattacatctttttgatactctgcatgctctttgcaatcttctggtagttgccccagataatttaaagcaagtctgctcaggagaacaacttgctaatctggacaagaatatacttcactccttcgtacaacttcgtgctgattatagatctgcccgccttgctcgacacttcagctgagattgaatttacaaaggaattcagtgtcagttcctttacagaggaatgtcttatacttcagcagccctcggttgatagaaagcacaggagataccttatgacacagccaacattttgtgaaacaatgactggaacaaaacagcagccatacttacctttgaggttttatttaaagtttggataccactagctatattttgcttttttcccctcacattgaattttaattccattcttgaatgtagaaatttcagattctctaaaactacatgtcactgtttttatcctagaaaatgttgctgtcagaaggcaaaggaaatgttaccagtgttttcggttcttgtacttttaacatattccatttagaaattttgccattctgttttccattaataataggtgaaatacaggaaaactacatttgttattcctcagtttttaatgaccttttcagcatcaattgttaatcagattattttaggttttcgtaaataatttttttgcctctttcaaaaggttaacaattaagcatactttctgcagttggttgattggatttttttctgaggtacagcattaatactagtccaaaaaatgtcataaactgaactaaaatgatgaactattttatgtagacattaggagtggatcggaatacttctgctttctgggtaaaacttaaaagtttactatttcttattggtaaatagattttaagccaattctagtaagaaattaataaaactaccttattttgtatttcacttaaggtggaggaccttaactaaaggaccatatttattcattattttaatattataagggaagtaaaaaaaagtgaggtatagtctaaatggtgcatataggaaatactgacagtgtttagcaacatgcagccctttgagatttctgtcgtaatgctaaacttgaataagatggaatggctgaacatgtggttagtcttttattttaagaagaattgagaattgatagatttggagatgagctttgcaaaggctgtttgcttttcatgtctataggtctgtcattgtcctttttcaaagcatttctgaagttattcctacttggatatagttaatggaattggcttaatttgatgacataataaatcacttataaaattttaaatatcaagtgaaaatttagaaaggccattactattctataaaccttataaacttgctctgagcgggagaaactggctctgagcgggagaaactggctctgagcgggagaaactggctctgagcggg

SEQ ID NO: 423689 - DNA, 907 bp, Homo sapiens
ggcctttctaaggtttatagaatagtaatggcctttactattttataaggtttatagaatagtaatggcctattctataaaccttataaacttgctctgggagaatgcattctaaattatatatagtgtttcagctcccattgtggtgttcatagtcttctaggaacagataaacttaagtattcaattcactcttggcattttttctttaatataggctttttagcctatttttggaaaactgcttttcttctgagaaccttattctgaatgtcatcaactttaccaaaccttctaagtccagagctaacttagtactgtttaagttactattgactgaattttcttcattttctgtttagtccagtgttaccaaggtaagctggggaatgaagtataccaacttctttcagagcattttaggacattatggcagctttagaaggctgtcttgtttctagccaagggagagccagcgcaggttttggatactagagaaagtcatttgcttgtactattgccattttagaaagctctgatgtgaattcaaattttacctctgttacttaaagccaacaattttaaggcagtagttttactggccatttaagctctttgtacagtgtcaatttgtaaaaaagaaaaaacgaaaaaaaatctcaaataaaacatgagataacattttaagacttccaaatcagagaagtgcttcaaattattttgtttggattaatttttaaaatgtaaagcatatacttgttgcttagttattttgtttattattttcatgtttgagttctgtgcaatattttctattatgtccgttgataggacagtgacaaaattcgtaagtgaatacttaatttaaaagtgttaacattaatgctcaataaacaaattccctgca

SEQ ID NO: 423690 - DNA, 1155 bp, Homo sapiens
agcggagtcgccggcccctcccgacaacctccctggcgcgcgcagttccacttccggcgtatgaggcggtgacaatgggagcagcgcgggcggcgccgggaggcagctgacaagcgtttgcggcttcgcttcatggccgctctcccgcccctcctgggatctgtggggagctggggagcccgcagcggcccggagccggagctggcgagccgagcggagacctgtgcgccgcgcctctgaggcgcagcatgtgaagcggagacggcatccagtggggggcgagcctctcagccggccgggatggctaccacggccgagctcttcgaggagccttttgtggcagatgaatatattgaacgtcttgtatggagaaccccaggaggaggctctagaggtggacctgaagcttttgatcctaaaagattattagaagaatttgtaaatcatattcaggaactccagataatggatgaaaggattcagaggaaagtagagaaactagagcaacaatgtcagaaagaagccaaggaatttgccaagaaggtacaagagctgcagaaaagcaatcaggttgccttccaacatttccaagaactagatgagcacattagctatgtagcaactaaagtctgtcaccttggagaccagttagagggggtaaacacacccagacaacgggcagtggaggctcagaaattgatgaaatactttaatgagtttctagatggagaattgaaatctgatgtttttacaaattctgaaaagcactagtcacttactcctggtctaagggtacatggtattggctgctctacaatcttgaaagaaggtaatttagctcactttcttcccctcaggggaaaaaaaatcaaaatgtgcaagaaaatggacattcttatggatcttgtatgtacatagcaacattgtccactcatattgaatacagtcttcctgaattattccagatttactccatagaatatttcagatagtggaatgtaaaagctaagtattattgacactcactttgaattaagcaacacttttttttaatagaactctatagggttatagaatttataatttttagagttctttggaaaatagttatgtgtgtacagataattcctctaaagaaaaggtgtttttgaaaaa

SEQ ID NO: 423691 - DNA, 1197 bp, Homo sapiens
agcggagtcgccggcccctcccgacaacctccctggcgcgcgcagttccacttccggcgtatgaggcggtgacaatgggagcagcgcgggcggcgccgggaggcagctgacaagcgtttgcggcttcgcttcatggccgctctcccgcccctcctgggatctgtggggagctggggagcccgcagcggcccggagccggagctggcgagccgagcggagacctgtgcgccgcgcctctgaggcgcagcatgtgaagcggagacggcatccagtggggggcgagcctctcagccggccgggatggctaccacggccgagctcttcgaggagccttttgtggcagatgaatatattgaacgtcttgtatggagaaccccaggaggaggctctagaggtggacctgaagcttttgatcctaaaagattattagaagaatttgtaaatcatattcaggaactccagataatggatgaaaggattcagaggaaagtagagaaactagagcaacaatgtcagaaagaagccaaggaatttgccaagaaggtacaagagctgcagaaaagcaatcaggttgccttccaacatttccaagaactagatgagcacattagctatgtagcaactaaagtctgtcaccttggagaccagttagagggggtaaacacacccagacaacgggcagtggaggctcagaaattgatgaaatactttaatgagtttctagatggagaattgaaatctgatgtttttacaaattctgaaaaggtaagtgctgtcagaggataaaaccaaatcacagcattaataacagtgccctaattatgagctgcaataattgctttccagagttagacttcaaatcactgagtagctgacttattaaaagtttttattgttctgaaatgtaaactaatacagtttcttgtagattgctgatgaagtgttaatattgagatgtttaattgggtttcctggcatttttttaatgaaattttttgtggcttaatattaacagaatttctatagtttttaaatagtgacagtccattgggtggtggtggggtggtctgacctaaatcattgataagctgagatgcttttctgtaaagcaataaggaattcagaacttctggtttttattacttgaataaagatctcttataaagaattaaagcagtttggaccaaggagagctga

SEQ ID NO: 423692 - DNA, 339 bp, Homo sapiens
gggggtatacattttatgaaagtatacttggatttcactaatggattgcaatccaagtttgaaaaacattactctaagtcaggagagttgtagataaatatggagcattgtaattgtgtgtgtgtgtatttgtgcatgcacacgcagtatggggggagctgtgagttattttcatacctgaaacactgactacatcctataaaaaattgattgcttaaaaaaaattggcattttcaaaaggtagacttgaggagtgatattgtttgatttttgtttttaagctctctgatccttctgacttaccaaggaatgccttcagaatttttaccattcttgtgg

SEQ ID NO: 423693 - DNA, 3050 bp, Homo sapiens
ggccgaggcggcggcggcggcgagcccgggggcgagggcggacgggaacaggaaaagcctccggcagcccctgcgggcggcggcgcagccacggccgcgctccgaggtgaagccgcgcgcggagaggaagcgggtgttttcccctctgcctttcggcccccgcccttcctttcagtttctgcccgctcgctcggaagttggcggttgacaaaaatggcaggagccggggcccgggccggttgccgcagcgccgcggggaccttctgagttggcccggtggcagggagactcgtgcaggggcgtccgatgcgcggggcccggggcctcgggagagctcagctgctgcgggccccagacgaggcgacagggatggacttgcgtagacagccagcgccgggccgccgggcgcgcggtctgggagggcgtgccgccgcggcgccgggccgcgctctgtgaaccggcgaggcgggaaggggccgccgtggtgctcggcacgcccgggcgtgtggcgggcgggcgagagcttgagcgcgatccgggcggccgctgtgcgcaatcagtgcaggctcccgcccgactctgactcggcgcggccgcgacagtgccggccacaccctctgccccgctgccgccggcgccgcttcccaagagctggaggcaggagatgcgcccggggcggccgcgcgtcccagagagccagccccggccgccgtcgcggggaagtgccgcctggtggggtcacggcgcctgaagcccacgtgcgccgccgagcccgaggtggcctcgagcgcggcggctgacagcacagcccgcctgagctgcctcccgcgctcctccccgaggaaaggattttgatttcaaagaaaggaaggaaggaaggacaactcccagcttccccgtcccgccctccccgctccgagggccgcgccaggccatgcccaagaaggcggcggcggcggcgaaccagcagaagggactttcctggcagcccggcgacgaggagcgcggacagtgagtttgctctgccccggttcatggttcctgcaagccctctaggaggccgaaagctgcagcccctccccttgccccgaagagccttccgcgttctctcgccctcgggcccaccccgcgccgcccgggctcccgccgccgcagcccagtgccctctgcccgcggcggtggatggcatgatggtgcggggaaggcaccgcggccttggccagctgagtcgcgacggccgccggggcggcggcagtggccgcggcagcggcggtggtagcgggctccccagcggcatgccagtgccccccgggcgcgatggctagcggcagcgccgggaagcccactggcgaggcggcttctccggctcctgcgagcgccatcggcggggccagctcgcagccgcggaagaggctggtatccgtctgcgaccactgcaagggcaagatgcagctggtggctgacctgctgctgctgtcgagcgaggcgcggcccgtgctcttcgagggccccgcctcctctggtgccggcgccgagtccttcgagcagtgccgggacaccatcatcgcgcgcaccaaggggctctccatcctcacccacgacgtgcagagccagctcaacatgggccgcttcggggaggcgggggacagcctggtggagctgggcgacctggtggtgtcgctgaccgagtgctcggcccacgcggcctatctggccgctgtggccacgccgggcgcccagcccgcgcagccgggcctggtggaccgctaccgcgtgacgcgatgccgccacgaggtggagcagggttgcgccgtgctgcgcgccacgccgctggccgacatgacgccgcagctgctgctggaggtgtcgcagggcctgtcgcgcaacctcaagttcctgacggacgcgtgcgccctggccagtgacaagtcacgggaccgcttttcgcgggagcagttcaagctgggcgtcaagtgcatgagcaccagcgcgtcggcgctgctggcctgcgtgcgcgaggtgaaggtggcgcccagtgagctggcgcgcagccgctgtgcgctcttcagcgggcccctggtgcaggcagtgagcgccctggtaggcttcgccaccgagccgcagttcctgggtcgcgcggcagctgtgagcgccgagggcaaggcggtgcagaccgccatcctgggcggcgccatgagcgtggtgtcggcctgcgtgctcctgacccagtgcctcagggatctggcgcagcaccccgacgggggcgccaagatgtcggaccacagggagaggctgaggaactcggcctgcgccgtgtctgaaggctgcaccctgctatctcaggctttaagggagaggtcttcgcccaggactttaccgccagtgaattccaattctgtgaattagcaccccacccccataccccttcttccacccccagactaaaggaagatacttactctctgcccctctccatttataccaaagaaatcataggtgaaaccccctaccctccccaacgttaaatgctcgagaggaatcttccacaaggcagggccatgcacgcaacctgcacacgcacttggagggcccaggtgtctctccaccagcccccatgcagtagggactggaagatatgtcatctgctggttgtgttatcactcccaccccctaccccagcccgtcttccggaatttctcaactaaatttcattattgggcaggaaggaggtcatgggttcatttcatttttgttttttgtgtttttaattaaaagaaaggttacctcagttttcactccttagacatggatgtagctacctttttttgtatgtcttttttttttttaagcaatcgtgttgaattaggagtatacttggtgtggaaagagtatgaatttgccatgtgatttgcaaatggggggaagctactgtgagcgtgtgtttttttaatttacactatagagtgatttttttttcccccaacgtcaagtttttaccttgcatgtactggagtatttatttcatctattaaaatgttatgtttctcaga

SEQ ID NO: 423694 - DNA, 2084 bp, Homo sapiens
ggccgaggcggcggcggcggcgagcccgggggcgaggcgcggacagtgagtttgctctgccccggttcatggttcctgcaagccctctaggaggccgaaagctgcagcccctccccttgccccgaagagccttccgcgttctctcgccctcgggcccaccccgcgccgcccgggctcccgccgccgcagcccagtgccctctgcccgcggcggtggatggcatgatggtgcggggaaggcaccgcggccttggccagctgagtcgcgacggccgccggggcggcggcagtggccgcggcagcggcggtggtagcgggctccccagcggcatgccagtgccccccgggcgcgatggctagcggcagcgccgggaagcccactggcgaggcggcttctccggctcctgcgagcgccatcggcggggccagctcgcagccgcggaagaggctggtatccgtctgcgaccactgcaagggcaagatgcagctggtggctgacctgctgctgctgtcgagcgaggcgcggcccgtgctcttcgagggccccgcctcctctggtgccggcgccgagtccttcgagcagtgccgggacaccatcatcgcgcgcaccaaggggctctccatcctcacccacgacgtgcagagccagctcaacatgggccgcttcggggaggcgggggacagcctggtggagctgggcgacctggtggtgtcgctgaccgagtgctcggcccacgcggcctatctggccgctgtggccacgccgggcgcccagcccgcgcagccgggcctggtggaccgctaccgcgtgacgcgatgccgccacgaggtggagcagggttgcgccgtgctgcgcgccacgccgctggccgacatgacgccgcagctgctgctggaggtgtcgcagggcctgtcgcgcaacctcaagttcctgacggacgcgtgcgccctggccagtgacaagtcacgggaccgcttttcgcgggagcagttcaagctgggcgtcaagtgcatgagcaccagcgcgtcggcgctgctggcctgcgtgcgcgaggtgaaggtggcgcccagtgagctggcgcgcagccgctgtgcgctcttcagcgggcccctggtgcaggcagtgagcgccctggtaggcttcgccaccgagccgcagttcctgggtcgcgcggcagctgtgagcgccgagggcaaggcggtgcagaccgccatcctgggcggcgccatgagcgtggtgtcggcctgcgtgctcctgacccagtgcctcagggatctggcgcagcaccccgacgggggcgccaagatgtcggaccacagggagaggctgaggaactcggcctgcgccgtgtctgaaggctgcaccctgctatctcaggctttaagggagaggtcttcgcccaggactttaccgccagtgaattccaattctgtgaattagcaccccacccccataccccttcttccacccccagactaaaggaagatacttactctctgcccctctccatttataccaaagaaatcataggtgaaaccccctaccctccccaacgttaaatgctcgagaggaatcttccacaaggcagggccatgcacgcaacctgcacacgcacttggagggcccaggtgtctctccaccagcccccatgcagtagggactggaagatatgtcatctgctggttgtgttatcactcccaccccctaccccagcccgtcttccggaatttctcaactaaatttcattattgggcaggaaggaggtcatgggttcatttcatttttgttttttgtgtttttaattaaaagaaaggttacctcagttttcactccttagacatggatgtagctacctttttttgtatgtcttttttttttttaagcaatcgtgttgaattaggagtatacttggtgtggaaagagtatgaatttgccatgtgatttgcaaatggggggaagctactgtgagcgtgtgtttttttaatttacactatagagtgatttttttttcccccaacgtcaagtttttaccttgcatgtactggagtatttatttcatctattaaaatgttatgtttctcaga

SEQ ID NO: 423695 - DNA, 2144 bp, Homo sapiens
ggccgaggcggcggcggcggcgagcccgggggcgagggcggacgggaacaggaaaagcctccggcagcccctgcgggcggcggcgcagccacggccgcgctccgaggtgaagccgcgcgcggagaggaagcgggtgttttcccctctgcctttcggcccccgcccttcctttcagtttctgcccgctcgctcggaagttggcggttgacaaaaatggcaggagccggggcccgggccggttgccgcagccccagtgccctctgcccgcggcggtggatggcatgatggtgcggggaaggcaccgcggccttggccagctgagtcgcgacggccgccggggcggcggcagtggccgcggcagcggcggtggtagcgggctccccagcggcatgccagtgccccccgggcgcgatggctagcggcagcgccgggaagcccactggcgaggcggcttctccggctcctgcgagcgccatcggcggggccagctcgcagccgcggaagaggctggtatccgtctgcgaccactgcaagggcaagatgcagctggtggctgacctgctgctgctgtcgagcgaggcgcggcccgtgctcttcgagggccccgcctcctctggtgccggcgccgagtccttcgagcagtgccgggacaccatcatcgcgcgcaccaaggggctctccatcctcacccacgacgtgcagagccagctcaacatgggccgcttcggggaggcgggggacagcctggtggagctgggcgacctggtggtgtcgctgaccgagtgctcggcccacgcggcctatctggccgctgtggccacgccgggcgcccagcccgcgcagccgggcctggtggaccgctaccgcgtgacgcgatgccgccacgaggtggagcagggttgcgccgtgctgcgcgccacgccgctggccgacatgacgccgcagctgctgctggaggtgtcgcagggcctgtcgcgcaacctcaagttcctgacggacgcgtgcgccctggccagtgacaagtcacgggaccgcttttcgcgggagcagttcaagctgggcgtcaagtgcatgagcaccagcgcgtcggcgctgctggcctgcgtgcgcgaggtgaaggtggcgcccagtgagctggcgcgcagccgctgtgcgctcttcagcgggcccctggtgcaggcagtgagcgccctggtaggcttcgccaccgagccgcagttcctgggtcgcgcggcagctgtgagcgccgagggcaaggcggtgcagaccgccatcctgggcggcgccatgagcgtggtgtcggcctgcgtgctcctgacccagtgcctcagggatctggcgcagcaccccgacgggggcgccaagatgtcggaccacagggagaggctgaggaactcggcctgcgccgtgtctgaaggctgcaccctgctatctcaggctttaagggagaggtcttcgcccaggactttaccgccagtgaattccaattctgtgaattagcaccccacccccataccccttcttccacccccagactaaaggaagatacttactctctgcccctctccatttataccaaagaaatcataggtgaaaccccctaccctccccaacgttaaatgctcgagaggaatcttccacaaggcagggccatgcacgcaacctgcacacgcacttggagggcccaggtgtctctccaccagcccccatgcagtagggactggaagatatgtcatctgctggttgtgttatcactcccaccccctaccccagcccgtcttccggaatttctcaactaaatttcattattgggcaggaaggaggtcatgggttcatttcatttttgttttttgtgtttttaattaaaagaaaggttacctcagttttcactccttagacatggatgtagctacctttttttgtatgtcttttttttttttaagcaatcgtgttgaattaggagtatacttggtgtggaaagagtatgaatttgccatgtgatttgcaaatggggggaagctactgtgagcgtgtgtttttttaatttacactatagagtgatttttttttcccccaacgtcaagtttttaccttgcatgtactggagtatttatttcatctattaaaatgttatgtttctcaga

SEQ ID NO: 423696 - DNA, 2014 bp, Homo sapiens
ggccgaggcggcggcggcggcgagcccgggggcgagggcggacgggaacaggaaaagcctccggcagcccctgcgggcggcggcgcagccacggccgcgctccgaggtgaagccgcgcgcggagaggaagcgggtgttttcccctctgcctttcggcccccgcccttcctttcagtttctgcccgctcgctcggaagttggcggttgacaaaaatggcaggagccggggcccgggccggttgccgcagcgccgcggggaccttctgagttggcccggtggcagggagactcgtgcaggggcgtccgatgcgcggggcccggggcctcgggagagctcagctgctgcgggccccagacgaggcgacagggatggacttgcgtagacagccagcgccgggccgccgggcgcgcggtctgggagggcgtgccgccgcggcgccgggccgcgctctgtgaaccggcgaggcgggaaggggccgccgtggtgctcggcacgcccgggcgtgtggcgggcgggcgagagcttgagcgcgatccgggcggccgctgtgcgcaatcagtgcaggctcccgcccgactctgactcggcgcggccgcgacagtgccggccacaccctctgccccgctgccgccggcgccgcttcccaagagctggaggcaggagatgcgcccggggcggccgcgcgtcccagagagccagccccggccgccgtcgcggggaagtgccgcctggtggggtcacggcgcctgaagcccacgtgcgccgccgagcccgaggtggcctcgagcgcggcggctgacagcacagcccgcctgagctgcctcccgcgctcctccccgaggaaaggattttgatttcaaagaaaggaaggaaggaaggacaactcccagcttccccggccccgcctcctctggtgccggcgccgagtccttcgagcagtgccgggacaccatcatcgcgcgcaccaaggggctctccatcctcacccacgacgcccagtgagctggcgcgcagccgctgtgcgctcttcagcgggcccctggtgcaggcagtgagcgccctggtaggcttcgccaccgagccgcagttcctgggtcgcgcggcagctgtgagcgccgagggcaaggcggtgcagaccgccatcctgggcggcgccatgagcgtggtgtcggcctgcgtgctcctgacccagtgcctcagggatctggcgcagcaccccgacgggggcgccaagatgtcggaccacagggagaggctgaggaactcggcctgcgccgtgtctgaaggctgcaccctgctatctcaggctttaagggagaggtcttcgcccaggactttaccgccagtgaattccaattctgtgaattagcaccccacccccataccccttcttccacccccagactaaaggaagatacttactctctgcccctctccatttataccaaagaaatcataggtgaaaccccctaccctccccaacgttaaatgctcgagaggaatcttccacaaggcagggccatgcacgcaacctgcacacgcacttggagggcccaggtgtctctccaccagcccccatgcagtagggactggaagatatgtcatctgctggttgtgttatcactcccaccccctaccccagcccgtcttccggaatttctcaactaaatttcattattgggcaggaaggaggtcatgggttcatttcatttttgttttttgtgtttttaattaaaagaaaggttacctcagttttcactccttagacatggatgtagctacctttttttgtatgtcttttttttttttaagcaatcgtgttgaattaggagtatacttggtgtggaaagagtatgaatttgccatgtgatttgcaaatggggggaagctactgtgagcgtgtgtttttttaatttacactatagagtgatttttttttcccccaacgtcaagtttttaccttgcatgtactggagtatttatttcatctattaaaatgttatgtttctcaga

SEQ ID NO: 423697 - DNA, 1477 bp, Homo sapiens
ggccgaggcggcggcggcggcgagcccgggggcgagggcggacgggaacaggaaaagcctccggcagcccctgcgggcggcggcgcagccacggccgcgctccgaggtgaagccgcgcgcggagaggaagcgggtgttttcccctctgcctttcggcccccgcccttcctttcagtttctgcccgctcgctcggaagttggcggttgacaaaaatggcaggagccggggcccgggccggttgccgcagcgccgcggggaccttctgagttggcccggtggcagggagactcgtgcaggggcgtccgatgcgcggggcccggggcctcgggagagctcagctgctgcgggccccagacgaggcgacagggatggacttgcgtagacagccagcgccgggccgccgggcgcgcggtctgggagggcgtgccgccgcggcgccgggccgcgctctgtgaaccggcgaggcgggaaggggccgccgtggtgctcggcacgcccgggcgtgtggcgggcgggcgagagcttgagcgcgatccgggcggccgctgtgcgcaatcagtgcaggctcccgcccgactctgactcggcgcggccgcgacagtgccggccacaccctctgccccgctgccgccggcgccgcttcccaagagctggaggcaggagatgcgcccggggccaccccgacgggggcgccaagatgtcggaccacagggagaggctgaggaactcggcctgcgccgtgtctgaaggctgcaccctgctatctcaggctttaagggagaggtcttcgcccaggactttaccgccagtgaattccaattctgtgaattagcaccccacccccataccccttcttccacccccagactaaaggaagatacttactctctgcccctctccatttataccaaagaaatcataggtgaaaccccctaccctccccaacgttaaatgctcgagaggaatcttccacaaggcagggccatgcacgcaacctgcacacgcacttggagggcccaggtgtctctccaccagcccccatgcagtagggactggaagatatgtcatctgctggttgtgttatcactcccaccccctaccccagcccgtcttccggaatttctcaactaaatttcattattgggcaggaaggaggtcatgggttcatttcatttttgttttttgtgtttttaattaaaagaaaggttacctcagttttcactccttagacatggatgtagctacctttttttgtatgtcttttttttttttaagcaatcgtgttgaattaggagtatacttggtgtggaaagagtatgaatttgccatgtgatttgcaaatggggggaagctactgtgagcgtgtgtttttttaatttacactatagagtgatttttttttcccccaacgtcaagtttttaccttgcatgtactggagtatttatttcatctattaaaatgttatgtttctcaga

SEQ ID NO: 423698 - DNA, 443 bp, Homo sapiens
ggccgaggcggcggcggcggcgagcccgggggcgagggcggacgggaacaggaaaagcctccggcagcccctgcgggcggcggcgcagccacggccgcgctccgaggtgaagccgcgcgcggagaggaagcgggtgttttcccctctgcctttcggcccccgcccttcctttcagtttctgcccgctcgctcggaagttggcggttgacaaaaatggcaggagccggggcccgggccggttgccgcagcgccgcggggaccttctgagttggcccggtggcagggagactcgtgcaggggcgtccgatgcgcggggcccggggcctcgggagagctcagctgctgcgggccccagacgaggcgacagggatggacttgcgtagacagccttcctttcagtttctgcccgctcgctcggaagtgggcggttgacaaaaatggca

SEQ ID NO: 423699 - DNA, 3042 bp, Homo sapiens
tgggagaggacatgatgagtcagtcacgagagcttctgtttgtcacccgcctcttgttgctgaaaagctcttctgtgatgtctgaggataaaaatgcagcaaaaagcaggggatggagtcagtgaccccgtccagcaagccagccctgttcctacacaggcctcatgaatatagtcatcaacctgcctgagtgctttcattgtaaaggtcggtatttaatgtcggttgtacaggaaattgacttagcactttccctgtttttctattgcataattttttttttaacccaaagatattttttttgctgagcctgcccagtattcactgttcacaactttgattactggctacaagaaatattttcttgccttccccaaatcccatactccccagaatctgctggcaaagtgagccctggtacaggatttaattgtgacctcgtcttccctgacctgtgtaagcatctctgtatcctttcggttttaatatctgcactgccaaaagcagtcctcatacttgcaaaaggtctgacaaggttctctccacatacattccagtatgtaaagagaccatgaatatttcagtaagagcaagaacatgactccatcagtgtgaaatttcaaatgtgattataaatatgggagagtcctataggagggtccaccagagataaacttcacggaaaacgttccctaacctcctttaaaagaatagaggatggcagattgttccaaaaggaatggcttgggtttttaactaacaaatgttagcaagcctttcttgaattcactatgtattcaaacttctaatatgctttgtgatttttttctttcatttctttctgtctgaggtaaccaggaattgcgttcaaaatgagctcatttgtgatcaggcttaaaagttgcccaagctgaggtcgtttccccccagtcacaaagcagaatgtttttctcaagacttcataggcacttactggtccgtactatctttggaatataattagaagctttgaatccttgaaaagcaaacctgttctcttcatcaaaaatgctaaccacctgtgcccgtggatcaatatcacctggatgtagtgcttgatatttttcccaactcagaagaaaaccattatggtttagagaggaaatgcagaatggcagaatccaccagagaaattgcacttatcgaaacaggccaaggcctgcatgtgttcggataaatcatttagtattgtgtaaataaagctgcagcctttacttcggagggatggtgtgggattttggccgagggaagcaggacagagaaggagcaggaagctatgctaattttcctgtcagcttaagggatccgtctcagcaagaatcttgtattctgataacggaatgctgtacgtgctgaccacatctaagaaccattaaaaagcaaggaaacaaacaaacaacccttttctcattccgacacacgaatagtcatcgagtattacaccagcccctctggtggcttccttcaaaactgttgatcttagctaaagtgtataaccagttaccagctgcacttcgcacggccatcccgtccacaatgcagcagactcttcccaaggccacctagcaagcaaggttgatcggatcatctaaactggccgcctcctgaatatttcactgaatcctggcgttcatgttgaagcagacaaaatgagaaaggaggagggcattgctcacctctcaatagcttttttcgttcaagttctatgtctttatcagctcttgcctgtgattttaccccaattcaaccttgggagtgggaagaatatgaacagataacccttggcctaacagctccatcaaacctccttgagagcaactacctaggccaggctagtgagtgctttgtgaggaagctggtcagaaggttccctcaactccttcctggtcctcctggacactgcagaaaagacttaggggatccccagcagaggccaattgctctccttccttccctgccccaccaggaaaggaataacgtccacagacttgaagcagatagtgaagtagatctgtgagaggttctaggtacttagtgtgtagactttgacgaatatttctcaagttgggagcccttgttaaaaatgatgtttaagggagtggttggggggaagatgaaggcatggaggaggaagaagagaaggaagcccttgccatataaaattcatgcagactaaacagtttccctgacagaataaataaagtggatgctaccccactccagaatcaaaagcaatttaattaaagtctcttaagttgtaaagagttttaaatgatccgtgttgaaggcgaatgcctgcaaatgcagtgggtctgacgtcagctgccgggcctgggctgggaggccatttgctattctgtttaaggcaggctggattgtcttattttggaaccagcttggtggggggtttgctttgctactgcttctgagccctgagcttcaaaggctgaaattaatggtgaacaaaattgtgcggctctggccatcccatgcggggcaagcccattgagggttatcattaagtaaagaaataaagagggggaaaaaagcctgcctgttccaaaaacctcatcagataatgacctcagtgattgggttttcattaccaaacagcatccagagattatcaacccatagaagaagggaggggaaaaaaaagaaagaaaggaaaagcaactgtctttctctccctctctttctcctttttttttgcacatcttttctttaaaactgtcagatcatttcagtatttcaaatccgaggaaaacagcctgcctgctgctgtatttgaagttgtaatggtgtcaaaaagtcacgactgactgacagccgtcagtcccagaggggctcattaaatcataaaaacttgacaaggaaataattgcgcattgccagcaacttggcgcctgtttagacgtttttattttctttcattattagtccccaccattacgttcattaacaaattgcattaaacaactgttaagggctaaaaaaaattta

SEQ ID NO: 423700 - DNA, 2256 bp, Homo sapiens
tgggagaggacatgatgagtcagtcacgagagcttctgtttgtcacccgcctcttgttgctgaaaagctcttctgtgatgtctgaggataaaaatgcagcaaaaagcaggggatggagtcagtgaccccgtccagcaagccagccctgttcctacacaggcctcatgaatatagtcatcaacctgcctgagtgctttcattgtaaaggtcggtatttaatgtcggttgtacaggaaattgacttagcactttccctgtttttctattgcataattttttttttaacccaaagatattttttttgctgagcctgcccagtattcactgttcacaactttgattactggctacaagaaatattttcttgccttccccaaatcccatactccccagaatctgctggcaaagtgagccctggtacaggatttaattgtgacctcgtcttccctgacctgtgtaagcatctctgtatcctttcggttttaatatctgcactgccaaaagcagtcctcatacttgcaaaaggtctgacaaggttctctccacatacattccagtatgtaaagagaccatgaatatttcagtaagagcaagaacatgactccatcagtgtgaaatttcaaatgtgattataaatatgggagagtcctataggagggtccaccagagataaacttcacggaaaacgttccctaacctcctttaaaagaatagaggatggcagattgttccaaaaggaatggcttgggtttttaactaacaaatgttagcaagcctttcttgaattcactatgtattcaaacttctaatatgctttgtgatttttttctttcatttctttctgtctgaggtaaccaggaattgcgttcaaaatgagctcatttgtgatcaggcttaaaagttgcccaagctgaggtcgtttccccccagtcacaaagcagaatgtttttctcaagacttcataggcacttactggtccgtactatctttggaatataattagaagctttgaatccttgaaaagcaaacctgttctcttcatcaaaaatgctaaccacctgtgcccgtggatcaatatcacctggatgtagtgcttgatatttttcccaactcagaagaaaaccattatggtttagagaggaaatgcagaatggcagaatccaccagagaaattgcacttatcgaaacaggccaaggcctgcatgtgttcggataaatcatttagtattgtgtaaataaagctgcagcctttacttcggagggatggtgtgggattttggccgagggaagcaggacagagaaggagcaggaagctatgctaattttcctgtcagcttaagggatccgtctcagcaagaatcttgtattctgataacggaatgctgtacgtgctgaccacatctaagaaccattaaaaagcaaggaaacaaacaaacaacccttttctcattccgacacacgaatagtcatcgagtattacaccagcccctctggtggcttccttcaaaactgttgatcttagctaaagtgtataaccagttaccagctgcacttcgcacggccatcccgtccacaatgcagcagactcttcccaaggccacctagcaagcaaggttgatcggatcatctaaactggccgcctcctgaatatttcactgaatcctggcgttcatgttgaagcagacaaaatgagaaaggaggagggcattgctcacctctcaatagcttttttcgttcaagttctatgtctttatcagctcttgcctgtgattttaccccaattcaaccttgggagtgggaagaatatgaacagataacccttggcctaacagctccatcaaacctccttgagagcaactacctaggccaggctagtgagtgctttgtgaggaagctggtcagaaggttccctcaactccttcctggtcctcctggacactgcagaaaagacttaggggatccccagcagaggccaattgctctccttccttccctgccccaccaggaaaggaataacgtccacagacttgaagcagatagtgaagtagatctgtgagaggttctaggtacttagtgtgtagactttgacgaatatttctcaagttgggagcccttgttaaaaatgatgtttaagggagtggttggggggaagatgaaggcatggaggaggaagaagagaaggaagcccttgccatataaaattcatgcagactaaacagtttccctgacagaataaataaagtggatgctacccca

SEQ ID NO: 423701 - DNA, 5024 bp, Homo sapiens
gcggccgcgactattcggtacctgaaaacaacgatggcatggaaaacacttcccatttacctgttgttgctgctgtctgttttcgtgattcagcaagtttcatctcaagatttatcaagctgtgcagggagatgtggggaagggtattctagagatgccacctgcaactgtgattataactgtcaacactacatggagtgctgccctgatttcaagagagtctgcactgcggagctttcctgtaaaggccgctgctttgagtccttcgagagagggagggagtgtgactgcgacgcccaatgtaagaagtatgacaagtgctgtcccgattatgagagtttctgtgcagaagtgcataatcccacatcaccaccatcttcaaagaaagcacctccaccttcaggagcatctcaaaccatcaaatcaacaaccaaacgttcacccaaaccaccaaacaagaagaagactaagaaagttatagaatcagaggaaataacagaagaacattctgtttctgaaaatcaagagtcctcctcctcctcctcctcttcctcttcttcttcaacaatttggaaaatcaagtcttccaaaaattcagctgctaatagagaattacagaagaaactcaaagtaaaagataacaagaagaacagaactaaaaagaaacctacccccaaaccaccagttgtagatgaagctggaagtggattggacaatggtgacttcaaggtcacaactcctgacacgtctaccacccaacacaataaagtcagcacatctcccaagatcacaacagcaaaaccaataaatcccagacccagtcttccacctaattctgatacatctaaagagacgtctttgacagtgaataaagagacaacagttgaaactaaagaaactactacaacaaataaacagacttcaactgatggaaaagagaagactacttccgctaaagagacacaaagtatagagaaaacatctgctaaagatttagcacccacatctaaagtgctggctaaacctacacccaaagctgaaactacaaccaaaggccctgctctcaccactcccaaggagcccacgcccaccactcccaaggagcctgcatctaccacacccaaagagcccacacctaccaccatcaagtctgcacccaccacccccaaggagcctgcacccaccaccaccaagtctgcacccaccactcccaaggagcctgcacccaccaccaccaaggagcctgcacccaccactcccaaggagcctgcacccaccaccaccaaggagcctgcacccaccaccaccaagtctgcacccaccactcccaaggagcctgcacccaccacccccaagaagcctgccccaactacccccaaggagcctgcacccaccactcccaaggagcctacacccaccactcccaaggagcctgcacccaccaccaaggagcctgcacccaccactcccaaagagcctgcacccactgcccccaagaagcctgccccaactacccccaaggagcctgcacccaccactcccaaggagcctgcacccaccaccaccaaggagccttcacccaccactcccaaggagcctgcacccaccaccaccaagtctgcacccaccactaccaaggagcctgcacccaccactaccaagtctgcacccaccactcccaaggagccttcacccaccaccaccaaggagcctgcacccaccactcccaaggagcctgcacccaccacccccaagaagcctgccccaactacccccaaggagcctgcacccaccactcccaaggaacctgcacccaccaccaccaagaagcctgcacccaccgctcccaaagagcctgccccaactacccccaaggagactgcacccaccacccccaagaagctcacgcccaccacccccgagaagctcgcacccaccacccctgagaagcccgcacccaccacccctgaggagctcgcacccaccacccctgaggagcccacacccaccacccctgaggagcctgctcccaccactcccaaggcagcggctcccaacacccctaaggagcctgctccaactacccctaaggagcctgctccaactacccctaaggagcctgctccaactacccctaaggagactgctccaactacccctaaagggactgctccaactaccctcaaggaacctgcacccactactcccaagaagcctgcccccaaggagcttgcacccaccaccaccaaggagcccacatccaccacctctgacaagcccgctccaactacccctaaggggactgctccaactacccctaaggagcctgctccaactacccctaaggagcctgctccaactacccctaaggggactgctccaactaccctcaaggaacctgcacccactactcccaagaagcctgcccccaaggagcttgcacccaccaccaccaaggggcccacatccaccacctctgacaagcctgctccaactacacctaaggagactgctccaactacccccaaggagcctgcacccactacccccaagaagcctgctccaactactcctgagacacctcctccaaccacttcagaggtctctactccaactaccaccaaggagcctaccactatccacaaaagccctgatgaatcaactcctgagctttctgcagaacccacaccaaaagctcttgaaaacagtcccaaggaacctggtgtacctacaactaagactcctgcagcgactaaacctgaaatgactacaacagctaaagacaagacaacagaaagagacttacgtactacacctgaaactacaactgctgcacctaagatgacaaaagagacagcaactacaacagaaaaaactaccgaatccaaaataacagctacaaccacacaagtaacatctaccacaactcaagataccacaccattcaaaattactactcttaaaacaactactcttgcacccaaagtaactacaacaaaaaagacaattactaccactgagattatgaacaaacctgaagaaacagctaaaccaaaagacagagctactaattctaaagcgacaactcctaaacctcaaaagccaaccaaagcacccaaaaaacccacttctaccaaaaagccaaaaacaatgcctagagtgagaaaaccaaagacgacaccaactccccgcaagatgacatcaacaatgccagaattgaaccctacctcaagaatagcagaagccatgctccaaaccaccaccagacctaaccaaactccaaactccaaactagttgaagtaaatccaaagagtgaagatgcaggtggtgctgaaggagaaacacctcatatgcttctcaggccccatgtgttcatgcctgaagttactcccgacatggattacttaccgagagtacccaatcaaggcattatcatcaatcccatgctttccgatgagaccaatatatgcaatggtaagccagtagatggactgactactttgcgcaatgggacattagttgcattccgaggtcattatttctggatgctaagtccattcagtccaccatctccagctcgcagaattactgaagtttggggtattccttcccccattgatactgtttttactaggtgcaactgtgaaggaaaaactttcttctttaaggattctcagtactggcgttttaccaatgatataaaagatgcagggtaccccaaaccaattttcaaaggatttggaggactaactggacaaatagtggcagcgctttcaacagctaaatataagaactggcctgaatctgtgtattttttcaagagaggtggcagcattcagcagtatatttataaacaggaacctgtacagaagtgccctggaagaaggcctgctctaaattatccagtgtatggagaaacgacacaggttaggagacgtcgctttgaacgtgctataggaccttctcaaacacacaccatcagaattcaatattcacctgccagactggcttatcaagacaaaggtgtccttcataatgaagttaaagtgagtatactgtggagaggacttccaaatgtggttacctcagctatatcactgcccaacatcagaaaacctgacggctatgattactatgccttttctaaagatcaatactataacattgatgtgcctagtagaacagcaagagcaattactactcgttctgggcagaccttatccaaagtctggtacaactgtccttagactgatgagcaaaggaggagtcaactaatgaagaaatgaataataaattttgacactgaaaaacattttattaataaagaatattgacatgagtataccagtttatatataaaaatgtttttaaacttgacaatcattacactaaaacagatttgataatcttattcacagttgttattgtttacagaccatttaattaatatttcctctgtttattcctcctctccctcccattgcatggctcacacctgtaaaagaaaaaagaatcaaattgaatatatcttttaagaattcaaaactagtgtattcacttaccctagttcattataaaaaatatctaggcattgtggatataaaactgttgggtattctacaacttcaatggaaattattacaagcagattaatccctctttttgtgacacaagtacaatctaaaagttatattggaaaacatggaaatattaaaattttacacttttactagctaaaacataatcacaaagctttatcgtgttgtataaaaaaattaacaatataatggcaataggtagagatacaacaaatgaatataacactataacacttcatattttccaaatcttaatttggatttaaggaagaaatcaataaatataaaatataagcacatatttattatatatctaaggtatacaaatctgtctacatgaagtttacagattggtaaatatcacctgctcaacatgtaattatttaataaaactttggaacattaaaaaaataaattggaggctt

SEQ ID NO: 423702 - DNA, 5030 bp, Homo sapiens
gcggccgcgactattcggtacctgaaaacaacgatggcatggaaaacacttcccatttacctgttgttgctgctgtctgttttcgtgattcagcaagtttcatctcaagatttatcaagctgtgcagggagatgtggggaagggtattctagagatgccacctgcaactgtgattataactgtcaacactacatggagtgctgccctgatttcaagagagtctgcactgcggagctttcctgtaaaggccgctgctttgagtccttcgagagagggagggagtgtgactgcgacgcccaatgtaagaagtatgacaagtgctgtcccgattatgagagtttctgtgcagaagtgcataatcccacatcaccaccatcttcaaagaaagcacctccaccttcaggagcatctcaaaccatcaaatcaacaaccaaacgttcacccaaaccaccaaacaagaagaagactaagaaagttatagaatcagaggaaataacagaagaacattctgtttctgaaaatcaagagtcctcctcctcctcctcctcttcctcttcttcttcaacaatttggaaaatcaagtcttccaaaaattcagctgctaatagagaattacagaagaaactcaaagtaaaagataacaagaagaacagaactaaaaagaaacctacccccaaaccaccagttgtagatgaagctggaagtggattggacaatggtgacttcaaggtcacaactcctgacacgtctaccacccaacacaataaagtcagcacatctcccaagatcacaacagcaaaaccaataaatcccagacccagtcttccacctaattctgatacatctaaagagacgtctttgacagtgaataaagagacaacagttgaaactaaagaaactactacaacaaataaacagacttcaactgatggaaaagagaagactacttccgctaaagagacacaaagtatagagaaaacatctgctaaagatttagcacccacatctaaagtgctggctaaacctacacccaaagctgaaactacaaccaaaggccctgctctcaccactcccaaggagcccacgcccaccactcccaaggagcctgcatctaccacacccaaagagcccacacctaccaccatcaagtctgcacccaccacccccaaggagcctgcacccaccaccaccaagtctgcacccaccactcccaaggagcctgcacccaccaccaccaaggagcctgcacccaccactcccaaggagcctgcacccaccaccaccaaggagcctgcacccaccaccaccaagtctgcacccaccactcccaaggagcctgcacccaccacccccaagaagcctgccccaactacccccaaggagcctgcacccaccactcccaaggagcctacacccaccactcccaaggagcctgcacccaccaccaaggagcctgcacccaccactcccaaagagcctgcacccactgcccccaagaagcctgccccaactacccccaaggagcctgcacccaccactcccaaggagcctgcacccaccaccaccaaggagccttcacccaccactcccaaggagcctgcacccaccaccaccaagtctgcacccaccactaccaaggagcctgcacccaccactaccaagtctgcacccaccactcccaaggagccttcacccaccaccaccaaggagcctgcacccaccactcccaaggagcctgcacccaccacccccaagaagcctgccccaactacccccaaggagcctgcacccaccactcccaaggaacctgcacccaccaccaccaagaagcctgcacccaccgctcccaaagagcctgccccaactacccccaaggagactgcacccaccacccccaagaagctcacgcccaccacccccgagaagctcgcacccaccacccctgagaagcccgcacccaccacccctgaggagctcgcacccaccacccctgaggagcccacacccaccacccctgaggagcctgctcccaccactcccaaggcagcggctcccaacacccctaaggagcctgctccaactacccctaaggagcctgctccaactacccctaaggagcctgctccaactacccctaaggagactgctccaactacccctaaagggactgctccaactaccctcaaggaacctgcacccactactcccaagaagcctgcccccaaggagcttgcacccaccaccaccaaggagcccacatccaccacctctgacaagcccgctccaactacccctaaggggactgctccaactacccctaaggagcctgctccaactacccctaaggagcctgctccaactacccctaaggggactgctccaactaccctcaaggaacctgcacccactactcccaagaagcctgcccccaaggagcttgcacccaccaccaccaaggggcccacatccaccacctctgacaagcctgctccaactacacctaaggagactgctccaactacccccaaggagcctgcacccactacccccaagaagcctgctccaactactcctgagacacctcctccaaccacttcagaggtctctactccaactaccaccaaggagcctaccactatccacaaaagccctgatgaatcaactcctgagctttctgcagaacccacaccaaaagctcttgaaaacagtcccaaggaacctggtgtacctacaactaagactcctgcagcgactaaacctgaaatgactacaacagctaaagacaagacaacagaaagagacttacgtactacacctgaaactacaactgctgcacctaagatgacaaaagagacagcaactacaacagaaaaaactaccgaatccaaaataacagctacaaccacacaagtaacatctaccacaactcaagataccacaccattcaaaattactactcttaaaacaactactcttgcacccaaagtaactacaacaaaaaagacaattactaccactgagattatgaacaaacctgaagaaacagctaaaccaaaagacagagctactaattctaaagcgacaactcctaaacctcaaaagccaaccaaagcacccaaaaaacccacttctaccaaaaagccaaaaacaatgcctagagtgagaaaaccaaagacgacaccaactccccgcaagatgacatcaacaatgccagaattgaaccctacctcaagaatagcagaagccatgctccaaaccaccaccagacctaaccaaactccaaactccaaactagttgaagtaaatccaaagagtgaagatgcaggtggtgctgaaggagaaacacctcatatgcttctcaggccccatgtgttcatgcctgaagttactcccgacatggattacttaccgagagtacccaatcaaggcattatcatcaatcccatgctttccgatgagaccaatatatgcaatggtaagccagtagatggactgactactttgcgcaatgggacattagttgcattccgaggtcattatttctggatgctaagtccattcagtccaccatctccagctcgcagaattactgaagtttggggtattccttcccccattgatactgtttttactaggtgcaactgtgaaggaaaaactttcttctttaaggattctcagtactggcgttttaccaatgatataaaagatgcagggtaccccaaaccaattttcaaaggatttggaggactaactggacaaatagtggcagcgctttcaacagctaaatataagaactggcctgaatctgtgtattttttcaagagaggtggcagcattcagcagtatatttataaacaggaacctgtacagaagtgccctggaagaaggcctgctctaaattatccagtgtatggagaaacgacacaggttaggagacgtcgctttgaacgtgctataggaccttctcaaacacacaccatcagaattcaatattcacctgccagactggcttatcaagacaaaggtaacatttttattgtgttaaaaaaatccttaaacataagtagatgtaatacagtttcttatacagtaaggcttatgaaatatggatactgatcaaacagccctaataatttaagcttactgatgaaaaactcatccacttgccttagtgaataaccaaagaccaatactttctttttccttgtgggtaaggaaagcagtttgttcaggtttgttagttataaccaatactatttatcaagtacttcttaccaagaacattatataccagtctataaccctcaatagttctacatcagagggctaaaactgagattaaaactcagatgtctggctctttccaagatagtacattgccttttaatctggtatcttttattaaacatgccacttacaggtgtccttcataatgaagttaaagtgagtatactgtggagaggacttccaaatgtggttacctcagctatatcactgcccaacatcagaaaacctgacggctatgattactatgccttttctaaagaggtaaggtattaactaacagtttcccaaggaggtgatatcatttgtgaaaacatgaagataaagtaaaaatgctggctgcaatgatgactgaatgtgagaagttacactacggtacttattctaattgctgtggaaaagagttaagacttttgctttaatttcaattaaaatgatggcactgcaattcaattctgctctaaccttcatgagattacgataaaacatccagttactagagtaaacttgctactgacaatagtattttacttctatcatttgtggcatttaacagataccttgtttggcacaaggttataatgatttgcatcactgcagagtctgtaagatcagaaagaagttcctgagaaactaattttattaattaaattatattactcaggatgcttttctttgaaatgcccagaaatctaagttattctgcctgtaatttcataatatgaatgacattggcatgtattttt

SEQ ID NO: 423703 - DNA, 4852 bp, Homo sapiens
gcggccgcgactattcggtacctgaaaacaacgatggcatggaaaacacttcccatttacctgttgttgctgctgtctgttttcgtgattcagcaagtttcatctcaagatttatcaagctgtgcagggagatgtggggaagggtattctagagatgccacctgcaactgtgattataactgtcaacactacatggagtgctgccctgatttcaagagagtctgcactgcggagctttcctgtaaaggccgctgctttgagtccttcgagagagggagggagtgtgactgcgacgcccaatgtaagaagtatgacaagtgctgtcccgattatgagagtttctgtgcagaagtgcataatcccacatcaccaccatcttcaaagaaagcacctccaccttcaggagcatctcaaaccatcaaatcaacaaccaaacgttcacccaaaccaccaaacaagaagaagactaagaaagttatagaatcagaggaaataacagaagaacattctgtttctgaaaatcaagagtcctcctcctcctcctcctcttcctcttcttcttcaacaatttggaaaatcaagtcttccaaaaattcagctgctaatagagaattacagaagaaactcaaagtaaaagataacaagaagaacagaactaaaaagaaacctacccccaaaccaccagttgtagatgaagctggaagtggattggacaatggtgacttcaaggtcacaactcctgacacgtctaccacccaacacaataaagtcagcacatctcccaagatcacaacagcaaaaccaataaatcccagacccagtcttccacctaattctgatacatctaaagagacgtctttgacagtgaataaagagacaacagttgaaactaaagaaactactacaacaaataaacagacttcaactgatggaaaagagaagactacttccgctaaagagacacaaagtatagagaaaacatctgctaaagatttagcacccacatctaaagtgctggctaaacctacacccaaagctgaaactacaaccaaaggccctgctctcaccactcccaaggagcccacgcccaccactcccaaggagcctgcatctaccacacccaaagagcccacacctaccaccatcaagtctgcacccaccacccccaaggagcctgcacccaccaccaccaagtctgcacccaccactcccaaggagcctgcacccaccaccaccaaggagcctgcacccaccactcccaaggagcctgcacccaccaccaccaaggagcctgcacccaccaccaccaagtctgcacccaccactcccaaggagcctgcacccaccacccccaagaagcctgccccaactacccccaaggagcctgcacccaccactcccaaggagcctacacccaccactcccaaggagcctgcacccaccaccaaggagcctgcacccaccactcccaaagagcctgcacccactgcccccaagaagcctgccccaactacccccaaggagcctgcacccaccactcccaaggagcctgcacccaccaccaccaaggagccttcacccaccactcccaaggagcctgcacccaccaccaccaagtctgcacccaccactaccaaggagcctgcacccaccactaccaagtctgcacccaccactcccaaggagccttcacccaccaccaccaaggagcctgcacccaccactcccaaggagcctgcacccaccacccccaagaagcctgccccaactacccccaaggagcctgcacccaccactcccaaggaacctgcacccaccaccaccaagaagcctgcacccaccgctcccaaagagcctgccccaactacccccaaggagactgcacccaccacccccaagaagctcacgcccaccacccccgagaagctcgcacccaccacccctgagaagcccgcacccaccacccctgaggagctcgcacccaccacccctgaggagcccacacccaccacccctgaggagcctgctcccaccactcccaaggcagcggctcccaacacccctaaggagcctgctccaactacccctaaggagcctgctccaactacccctaaggagcctgctccaactacccctaaggagactgctccaactacccctaaagggactgctccaactaccctcaaggaacctgcacccactactcccaagaagcctgcccccaaggagcttgcacccaccaccaccaaggagcccacatccaccacctctgacaagcccgctccaactacccctaaggggactgctccaactacccctaaggggactgctccaactaccctcaaggaacctgcacccactactcccaagaagcctgcccccaaggagcttgcacccaccaccaccaaggggcccacatccaccacctctgacaagcctgctccaactacacctaaggagactgctccaactacccccaaggagcctgcacccactacccccaagaagcctgctccaactactcctgagacacctcctccaaccacttcagaggtctctactccaactaccaccaaggagcctaccactatccacaaaagccctgatgaatcaactcctgagctttctgcagaacccacaccaaaagctcttgaaaacagtcccaaggaacctggtgtacctacaactaagactcctgcagcgactaaacctgaaatgatacaaccacacaagtaacatctaccacaactcaagataccacaccattcaaaattactactcttaaaacaactactcttgcacccaaagtaactacaacaaaaaagacaattactaccactgagattatgaacaaacctgaagaaacagctaaaccaaaagacagagctactaattctaaagcgacaactcctaaacctcaaaagccaaccaaagcacccaaaaaacccacttctaccaaaaagccaaaaacaatgcctagagtgagaaaaccaaagacgacaccaactccccgcaagatgacatcaacaatgccagaattgaaccctacctcaagaatagcagaagccatgctccaaaccaccaccagacctaaccaaactccaaactccaaactagttgaagtaaatccaaagagtgaagatgcaggtggtgctgaaggagaaacacctcatatgcttctcaggccccatgtgttcatgcctgaagttactcccgacatggattacttaccgagagtacccaatcaaggcattatcatcaatcccatgctttccgatgagaccaatatatgcaatggtaagccagtagatggactgactactttgcgcaatgggacattagttgcattccgaggtcattatttctggatgctaagtccattcagtccaccatctccagctcgcagaattactgaagtttggggtattccttcccccattgatactgtttttactaggtgcaactgtgaaggaaaaactttcttctttaaggattctcagtactggcgttttaccaatgatataaaagatgcagggtaccccaaaccaattttcaaaggatttggaggactaactggacaaatagtggcagcgctttcaacagctaaatataagaactggcctgaatctgtgtattttttcaagagaggtggcagcattcagcagtatatttataaacaggaacctgtacagaagtgccctggaagaaggcctgctctaaattatccagtgtatggagaaacgacacaggttaggagacgtcgctttgaacgtgctataggaccttctcaaacacacaccatcagaattcaatattcacctgccagactggcttatcaagacaaaggtaacatttttattgtgttaaaaaaatccttaaacataagtagatgtaatacagtttcttatacagtaaggcttatgaaatatggatactgatcaaacagccctaataatttaagcttactgatgaaaaactcatccacttgccttagtgaataaccaaagaccaatactttctttttccttgtgggtaaggaaagcagtttgttcaggtttgttagttataaccaatactatttatcaagtacttcttaccaagaacattatataccagtctataaccctcaatagttctacatcagagggctaaaactgagattaaaactcagatgtctggctctttccaagatagtacattgccttttaatctggtatcttttattaaacatgccacttacaggtgtccttcataatgaagttaaagtgagtatactgtggagaggacttccaaatgtggttacctcagctatatcactgcccaacatcagaaaacctgacggctatgattactatgccttttctaaagaggtaaggtattaactaacagtttcccaaggaggtgatatcatttgtgaaaacatgaagataaagtaaaaatgctggctgcaatgatgactgaatgtgagaagttacactacggtacttattctaattgctgtggaaaagagttaagacttttgctttaatttcaattaaaatgatggcactgcaattcaattctgctctaaccttcatgagattacgataaaacatccagttactagagtaaacttgctactgacaatagtattttacttctatcatttgtggcatttaacagataccttgtttggcacaaggttataatgatttgcatcactgcagagtctgtaagatcagaaagaagttcctgagaaactaattttattaattaaattatattactcaggatgcttttctttgaaatgcccagaaatctaagttattctgcctgtaatttcataatatgaatgacattggcatgtattttt

SEQ ID NO: 423704 - DNA, 1753 bp, Homo sapiens
aaacttttattattgactttactgtcaaaagatatctttaatggctgaaatcaaatattttcagtgaaaaaaatcaatattgagggtagtattcttattgccctcaatttttattttcatttcttcacaggcaagtcacaattcatttgagttttcaggtcactgatagaatgtcatttactttcgcttcacaaatgtgcatgtcatccttgcacaagggccatgctaatctctgtatcattccagttttagtatatgtgctgccaaactgagcacttgtcactttcaattgaaattaaatatataactatgtaatttgctgcatctattcattcaacaagtatttcagtttaataattatttttataatacccttgactaatagccattattaatatcaatatattatatgaaaaatgagaacaaaactgtttcctatacattgtaaaagttgtttgtttcctatacattgtaaaagttgttttccaccttttctgagggtattaaaattaattttcattttccatgtgatattctaatacataacaggtggcagcattcagcagtatatttataaacaggaacctgtacagaagtgccctggaagaaggcctgctctaaattatccagtgtatggagaaacgacacaggttaggagacgtcgctttgaacgtgctataggaccttctcaaacacacaccatcagaattcaatattcacctgccagactggcttatcaagacaaaggtaacatttttattgtgttaaaaaaatccttaaacataagtagatgtaatacagtttcttatacagtaaggcttatgaaatatggatactgatcaaacagccctaataatttaagcttactgatgaaaaactcatccacttgccttagtgaataaccaaagaccaatactttctttttccttgtgggtaaggaaagcagtttgttcaggtttgttagttataaccaatactatttatcaagtacttcttaccaagaacattatataccagtctataaccctcaatagttctacatcagagggctaaaactgagattaaaactcagatgtctggctctttccaagatagtacattgccttttaatctggtatcttttattaaacatgccacttacaggtgtccttcataatgaagttaaagtgagtatactgtggagaggacttccaaatgtggttacctcagctatatcactgcccaacatcagaaaacctgacggctatgattactatgccttttctaaagaggtaaggtattaactaacagtttcccaaggaggtgatatcatttgtgaaaacatgaagataaagtaaaaatgctggctgcaatgatgactgaatgtgagaagttacactacggtacttattctaattgctgtggaaaagagttaagacttttgctttaatttcaattaaaatgatggcactgcaattcaattctgctctaaccttcatgagattacgataaaacatccagttactagagtaaacttgctactgacaatagtattttacttctatcatttgtggcatttaacagataccttgtttggcacaaggttataatgatttgcatcactgcagagtctgtaagatcagaaagaagttcctgagaaactaattttattaattaaattatattactcaggatgcttttctttgaaatgcccagaaatctaagttattctgcctgtaatttcataatatgaatgacattggcatgtattttt

SEQ ID NO: 423705 - DNA, 4974 bp, Homo sapiens
gcggccgcgactattcggtacctgaaaacaacgatggcatggaaaacacttcccatttacctgttgttgctgctgtctgttttcgtgattcagcaagtttcatctcaagatttatcaagctgtgcagggagatgtggggaagggtattctagagatgccacctgcaactgtgattataactgtcaacactacatggagtgctgccctgatttcaagagagtctgcactgcggagctttcctgtaaaggccgctgctttgagtccttcgagagagggagggagtgtgactgcgacgcccaatgtaagaagtatgacaagtgctgtcccgattatgagagtttctgtgcagaagtgcataatcccacatcaccaccatcttcaaagaaagcacctccaccttcaggagcatctcaaaccatcaaatcaacaaccaaacgttcacccaaaccaccaaacaagaagaagactaagaaagttatagaatcagaggaaataacagaagaacattctgtttctgaaaatcaagagtcctcctcctcctcctcctcttcctcttcttcttcaacaatttggaaaatcaagtcttccaaaaattcagctgctaatagagaattacagaagaaactcaaagtaaaagataacaagaagaacagaactaaaaagaaacctacccccaaaccaccagttgtagatgaagctggaagtggattggacaatggtgacttcaaggtcacaactcctgacacgtctaccacccaacacaataaagtcagcacatctcccaagatcacaacagcaaaaccaataaatcccagacccagtcttccacctaattctgatacatctaaagagacgtctttgacagtgaataaagagacaacagttgaaactaaagaaactactacaacaaataaacagacttcaactgatggaaaagagaagactacttccgctaaagagacacaaagtatagagaaaacatctgctaaagatttagcacccacatctaaagtgctggctaaacctacacccaaagctgaaactacaaccaaaggccctgctctcaccactcccaaggagcccacgcccaccactcccaaggagcctgcatctaccacacccaaagagcccacacctaccaccatcaagtctgcacccaccacccccaaggagcctgcacccaccaccaccaagtctgcacccaccactcccaaggagcctgcacccaccaccaccaaggagcctgcacccaccactcccaaggagcctgcacccaccaccaccaaggagcctgcacccaccaccaccaagtctgcacccaccactcccaaggagcctgcacccaccacccccaagaagcctgccccaactacccccaaggagcctgcacccaccactcccaaggagcctacacccaccactcccaaggagcctgcacccaccaccaaggagcctgcacccaccactcccaaagagcctgcacccactgcccccaagaagcctgccccaactacccccaaggagcctgcacccaccactcccaaggagcctgcacccaccaccaccaaggagccttcacccaccactcccaaggagcctgcacccaccaccaccaagtctgcacccaccactaccaaggagcctgcacccaccactaccaagtctgcacccaccactcccaaggagccttcacccaccaccaccaaggagcctgcacccaccactcccaaggagcctgcacccaccacccccaagaagcctgccccaactacccccaaggagcctgcacccaccactcccaaggaacctgcacccaccaccaccaagaagcctgcacccaccgctcccaaagagcctgccccaactacccccaaggagactgcacccaccacccccaagaagctcacgcccaccacccccgagaagctcgcacccaccacccctgagaagcccgcacccaccacccctgaggagctcgcacccaccacccctgaggagcccacacccaccacccctgaggagcctgctcccaccactcccaaggcagcggctcccaacacccctaaggagcctgctccaactacccctaaggagcctgctccaactacccctaaggagcctgctccaactacccctaaggagactgctccaactacccctaaagggactgctccaactaccctcaaggaacctgcacccactactcccaagaagcctgcccccaaggagcttgcacccaccaccaccaaggagcccacatccaccacctctgacaagcccgctccaactacccctaaggggactgctccaactacccctaaggagcctgctccaactacccctaaggagcctgctccaactacccctaaggggactgctccaactaccctcaaggaacctgcacccactactcccaagaagcctgcccccaaggagcttgcacccaccaccaccaaggggcccacatccaccacctctgacaagcctgctccaactacacctaaggagactgctccaactacccccaaggagcctgcacccactacccccaagaagcctgctccaactactcctgagacacctcctccaaccacttcagaggtctctactccaactaccaccaaggagcctaccactatccacaaaagccctgatgaatcaactcctgagctttctgcagaacccacaccaaaagctcttgaaaacagtcccaaggaacctggtgtacctacaactaagactcctgcagcgactaaacctgaaatgactacaacagctaaagacaagacaacagaaagagacttacgtactacacctgaaactacaactgctgcacctaagatgacaaaagagacagcaactacaacagaaaaaactaccgaatccaaaataacagctacaaccacacaagtaacatctaccacaactcaagataccacaccattcaaaattactactcttaaaacaactactcttgcacccaaagtaactacaacaaaaaagacaattactaccactgagattatgaacaaacctgaagaaacagctaaaccaaaagacagagctactaattctaaagcgacaactcctaaacctcaaaagccaaccaaagcacccaaaaaacccacttctaccaaaaagccaaaaacaatgcctagagtgagaaaaccaaagacgacaccaactccccgcaagatgacatcaacaatgccagaattgaaccctacctcaagaatagcagaagccatgctccaaaccaccaccagacctaaccaaactccaaactccaaactagttgaagtaaatccaaagagtgaagatgcaggtggtgctgaaggagaaacacctcatatgcttctcaggccccatgtgttcatgcctgaagttactcccgacatggattacttaccgagagtacccaatcaaggcattatcatcaatcccatgctttccgatgagaccaatatatgcaatggtaagccagtagatggactgactactttgcgcaatgggacattagttgcattccgaggtcattatttctggatgctaagtccattcagtccaccatctccagctcgcagaattactgaagtttggggtattccttcccccattgatactgtttttactaggtgcaactgtgaaggaaaaactttcttctttaaggattctcagtactggcgttttaccaatgatataaaagatgcagggtaccccaaaccaattttcaaaggatttggaggactaactggacaaatagtggcagcgctttcaacagctaaatataagaactggcctgaatctgtgtattttttcaagagaggtggcagcattcagcagtatatttataaacaggaacctgtacagaagtgccctggaagaaggcctgctctaaattatccagtgtatggagaaacgacacaggttaggagacgtcgctttgaacgtgctataggaccttctcaaacacacaccatcagaattcaatattcacctgccagactggcttatcaagacaaaggtaacatttttattgtgttaaaaaaatccttaaacataagtagatgtaatacagtttcttatacagtaaggcttatgaaatatggatactgatcaaacagccctaataatttaagcttactgatgaaaaactcatccacttgccttagtgaataaccaaagaccaatactttctttttccttgtgggtaaggaaagcagtttgttcaggtttgttagttataaccaatactatttatcaagtacttcttaccaagaacattatataccagtctataaccctcaatagttctacatcagagggctaaaactgagattaaaactcagatgtctggctctttccaagatagtacattgccttttaatctggtatcttttattaaacatgccacttacaggtgtccttcataatgaagttaaagtgagtatactgtggagaggacttccaaatgtggttacctcagctataggtaaggtattaactaacagtttcccaaggaggtgatatcatttgtgaaaacatgaagataaagtaaaaatgctggctgcaatgatgactgaatgtgagaagttacactacggtacttattctaattgctgtggaaaagagttaagacttttgctttaatttcaattaaaatgatggcactgcaattcaattctgctctaaccttcatgagattacgataaaacatccagttactagagtaaacttgctactgacaatagtattttacttctatcatttgtggcatttaacagataccttgtttggcacaaggttataatgatttgcatcactgcagagtctgtaagatcagaaagaagttcctgagaaactaattttattaattaaattatattactcaggatgcttttctttgaaatgcccagaaatctaagttattctgcctgtaatttcataatatgaatgacattggcatgtattttt

SEQ ID NO: 423706 - DNA, 1747 bp, Homo sapiens
aaacttttattattgactttactgtcaaaagatatctttaatggctgaaatcaaatattttcagtgaaaaaaatcaatattgagggtagtattcttattgccctcaatttttattttcatttcttcacaggcaagtcacaattcatttgagttttcaggtcactgatagaatgtcatttactttcgcttcacaaatgtgcatgtcatccttgcacaagggccatgctaatctctgtatcattccagttttagtatatgtgctgccaaactgagcacttgtcactttcaattgaaattaaatatataactatgtaatttgctgcatctattcattcaacaagtatttcagtttaataattatttttataatacccttgactaatagccattattaatatcaatatattatatgaaaaatgagaacaaaactgtttcctatacattgtaaaagttgtttgtttcctatacattgtaaaagttgttttccaccttttctgagggtattaaaattaattttcattttccatgtgatattctaatacataacaggtggcagcattcagcagtatatttataaacaggaacctgtacagaagtgccctggaagaaggcctgctctaaattatccagtgtatggagaaacgacacaggttaggagacgtcgctttgaacgtgctataggaccttctcaaacacacaccatcagaattcaatattcacctgccagactggcttatcaagacaaaggtgtccttcataatgaagttaaagtgagtatactgtggagaggacttccaaatgtggttacctcagctatatcactgcccaacatcagaaaacctgacggctatgattactatgccttttctaaagatcaatactataacattgatgtgcctagtagaacagcaagagcaattactactcgttctgggcagaccttatccaaagtctggtacaactgtccttagactgatgagcaaaggaggagtcaactaatgaagaaatgaataataaattttgacactgaaaaacattttattaataaagaatattgacatgagtataccagtttatatataaaaatgtttttaaacttgacaatcattacactaaaacagatttgataatcttattcacagttgttattgtttacagaccatttaattaatatttcctctgtttattcctcctctccctcccattgcatggctcacacctgtaaaagaaaaaagaatcaaattgaatatatcttttaagaattcaaaactagtgtattcacttaccctagttcattataaaaaatatctaggcattgtggatataaaactgttgggtattctacaacttcaatggaaattattacaagcagattaatccctctttttgtgacacaagtacaatctaaaagttatattggaaaacatggaaatattaaaattttacacttttactagctaaaacataatcacaaagctttatcgtgttgtataaaaaaattaacaatataatggcaataggtagagatacaacaaatgaatataacactataacacttcatattttccaaatcttaatttggatttaaggaagaaatcaataaatataaaatataagcacatatttattatatatctaaggtatacaaatctgtctacatgaagtttacagattggtaaatatcacctgctcaacatgtaattatttaataaaactttggaacattaaaaaaataaattggaggctt

SEQ ID NO: 423707 - DNA, 1502 bp, Homo sapiens
gggactgttgggaaggcatgattagttttgaaatgtgaggacatgagatttgggaggggccaggggcagaatgatatggtttgactgtgtccgcctacccaatctcatcttgaattgtagctcccacaattcccacacatcatgggagggatccagtgggaggtaactgaatcatgggggtgagtgtttcccatgctcttcctatgatagtgaataaatctcacatgatctgatggttttataaaagggagtttccctgcaaaaattatctttttgcctgctgccatgtaagacgtgcctttcgccctccaccaggattgtgaggcttcaccagctatgtggaactgtgagtccattaaacctctttcccctctaaattatccagtgtatggagaaacgacacaggttaggagacgtcgctttgaacgtgctataggaccttctcaaacacacaccatcagaattcaatattcacctgccagactggcttatcaagacaaaggtgtccttcataatgaagttaaagtgagtatactgtggagaggacttccaaatgtggttacctcagctatatcactgcccaacatcagaaaacctgacggctatgattactatgccttttctaaagatcaatactataacattgatgtgcctagtagaacagcaagagcaattactactcgttctgggcagaccttatccaaagtctggtacaactgtccttagactgatgagcaaaggaggagtcaactaatgaagaaatgaataataaattttgacactgaaaaacattttattaataaagaatattgacatgagtataccagtttatatataaaaatgtttttaaacttgacaatcattacactaaaacagatttgataatcttattcacagttgttattgtttacagaccatttaattaatatttcctctgtttattcctcctctccctcccattgcatggctcacacctgtaaaagaaaaaagaatcaaattgaatatatcttttaagaattcaaaactagtgtattcacttaccctagttcattataaaaaatatctaggcattgtggatataaaactgttgggtattctacaacttcaatggaaattattacaagcagattaatccctctttttgtgacacaagtacaatctaaaagttatattggaaaacatggaaatattaaaattttacacttttactagctaaaacataatcacaaagctttatcgtgttgtataaaaaaattaacaatataatggcaataggtagagatacaacaaatgaatataacactataacacttcatattttccaaatcttaatttggatttaaggaagaaatcaataaatataaaatataagcacatatttattatatatctaaggtatacaaatctgtctacatgaagtttacagattggtaaatatcacctgctcaacatgtaattatttaataaaactttggaacattaaaaaaataaattggaggctt

SEQ ID NO: 423708 - DNA, 3619 bp, Homo sapiens
gcggccgcgactattcggtacctgaaaacaacgatggcatggaaaacacttcccatttacctgttgttgctgctgtctgttttcgtgattcagcaagtttcatctcaagatttatcaagctgtgcagggagatgtggggaagggtattctagagatgccacctgcaactgtgattataactgtcaacactacatggagtgctgccctgatttcaagagagtctgcactgcggagctttcctgtaaaggccgctgctttgagtccttcgagagagggagggagtgtgactgcgacgcccaatgtaagaagtatgacaagtgctgtcccgattatgagagtttctgtgcagaagtgcataatcccacatcaccaccatcttcaaagaaagcacctccaccttcaggagcatctcaaaccatcaaatcaacaaccaaacgttcacccaaaccaccaaacaagaagaagactaagaaagttatagaatcagaggaaataacagaagaacattctgtttctgaaaatcaagagtcctcctcctcctcctcctcttcctcttcttcttcaacaatttggaaaatcaagtcttccaaaaattcagctgctaatagagaattacagaagaaactcaaagtaaaagataacaagaagaacagaactaaaaagaaacctacccccaaaccaccagttgtagatgaagctggaagtggattggacaatggtgacttcaaggtcacaactcctgacacgtctaccacccaacacaataaagtcagcacatctcccaagatcacaacagcaaaaccaataaatcccagacccagtcttccacctaattctgatacatctaaagagacgtctttgacagtgaataaagagacaacagttgaaactaaagaaactactacaacaaataaacagacttcaactgatggaaaagagaagactacttccgctaaagagacacaaagtatagagaaaacatctgctaaagatttagcacccacatctaaagtgctggctaaacctacacccaaagctgaaactacaaccaaaggccctgctctcaccactcccaaggagcccacgcccaccactcccaaggagcctgcatctaccacacccaaagagcccacacctaccaccatcaagtctgcacccaccacccccaaggagcctgcacccaccaccaccaagtctgcacccaccactcccaaggagcctgcacccaccaccaccaaggagcctgcacccaccactcccaaggagcctgcacccaccaccaccaaggagcctgcacccaccaccaccaagtctgcacccaccactcccaaggagcctgcacccaccacccccaagaagcctgccccaactacccccaaggagcctgcacccaccactcccaaggagcctacacccaccactcccaaggagcctgcacccaccaccaaggagcctgcacccaccactcccaaagagcctgcacccactgcccccaagaagcctgccccaactacccccaaggagcctgcacccaccactcccaaggagcctgcacccaccaccaccaaggagccttcacccaccactcccaaggagcctgcacccaccaccaccaagtctgcacccaccactaccaaggagcctgcacccaccactaccaagtctgcacccaccactcccaaggagccttcacccaccaccaccaaggagcctgcacccaccactcccaaggagcctgcacccaccacccccaagaagcctgccccaactacccccaaggagcctgcacccaccactcccaaggaacctgcacccaccaccaccaagaagcctgcacccaccgctcccaaagagcctgccccaactacccccaaggagactgcacccaccacccccaagaagctcacgcccaccacccccgagaagctcgcacccaccacccctgagaagcccgcacccaccacccctgaggagctcgcacccaccacccctgaggagcccacacccaccacccctgaggagcctgctcccaccactcccaaggcagcggctcccaacacccctaaggagcctgctccaactacccctaaggagcctgctccaactacccctaaggagcctgctccaactacccctaaggagactgctccaactacccctaaagggactgctccaactaccctcaaggaacctgcacccactactcccaagaagcctgcccccaaggagcttgcacccaccaccaccaaggagcccacatccaccacctctgacaagcccgctccaactacccctaaggggactgctccaactacccctaaggagcctgctccaactacccctaaggagcctgctccaactacccctaaggggactgctccaactaccctcaaggaacctgcacccactactcccaagaagcctgcccccaaggagcttgcacccaccaccaccaaggggcccacatccaccacctctgacaagcctgctccaactacacctaaggagactgctccaactacccccaaggagcctgcacccactacccccaagaagcctgctccaactactcctgagacacctcctccaaccacttcagaggtctctactccaactaccaccaaggagcctaccactatccacaaaagccctgatgaatcaactcctgagctttctgcagaacccacaccaaaagctcttgaaaacagtcccaaggaacctggtgtacctacaactaagactcctgcagcgactaaacctgaaatgactacaacagctaaagacaagacaacagaaagagacttacgtactacacctgaaactacaactgctgcacctaagatgacaaaagagacagcaactacaacagaaaaaactaccgaatccaaaataacagctacaaccacacaagtaacatctaccacaactcaagataccacaccattcaaaattactactcttaaaacaactactcttgcacccaaagtaactacaacaaaaaagacaattactaccactgagattatgaacaaacctgaagaaacagctaaaccaaaagacagagctactaattctaaagcgacaactcctaaacctcaaaagccaaccaaagcacccaaaaaacccacttctaccaaaaagccaaaaacaatgcctagagtgagaaaaccaaagacgacaccaactccccgcaagatgacatcaacaatgccagaattgaaccctacctcaagaatagcagaagccatgctccaaaccaccaccagacctaaccaaactccaaactccaaactagttgaagtaaatccaaagagtgaagatgcaggtggtgctgaaggagaaacacctcatatgcttctcaggccccatgtgttcatgcctgaagttactcccgacatggattacttaccgagagtacccaatcaaggcattatcatcaatcccatgctttccgatgagaccaatatatgcaatggtaagccagtagatggactgactactttgcgcaatgggacattagttgcattccgaggtcattattttcgcatgtaaagtacattaagttcgccgtattcagcttgtggacttgtcgcagtttgaggcatactcccatcgtggc

SEQ ID NO: 423709 - DNA, 3441 bp, Homo sapiens
gcggccgcgactattcggtacctgaaaacaacgatggcatggaaaacacttcccatttacctgttgttgctgctgtctgttttcgtgattcagcaagtttcatctcaagatttatcaagctgtgcagggagatgtggggaagggtattctagagatgccacctgcaactgtgattataactgtcaacactacatggagtgctgccctgatttcaagagagtctgcactgcggagctttcctgtaaaggccgctgctttgagtccttcgagagagggagggagtgtgactgcgacgcccaatgtaagaagtatgacaagtgctgtcccgattatgagagtttctgtgcagaagtgcataatcccacatcaccaccatcttcaaagaaagcacctccaccttcaggagcatctcaaaccatcaaatcaacaaccaaacgttcacccaaaccaccaaacaagaagaagactaagaaagttatagaatcagaggaaataacagaagaacattctgtttctgaaaatcaagagtcctcctcctcctcctcctcttcctcttcttcttcaacaatttggaaaatcaagtcttccaaaaattcagctgctaatagagaattacagaagaaactcaaagtaaaagataacaagaagaacagaactaaaaagaaacctacccccaaaccaccagttgtagatgaagctggaagtggattggacaatggtgacttcaaggtcacaactcctgacacgtctaccacccaacacaataaagtcagcacatctcccaagatcacaacagcaaaaccaataaatcccagacccagtcttccacctaattctgatacatctaaagagacgtctttgacagtgaataaagagacaacagttgaaactaaagaaactactacaacaaataaacagacttcaactgatggaaaagagaagactacttccgctaaagagacacaaagtatagagaaaacatctgctaaagatttagcacccacatctaaagtgctggctaaacctacacccaaagctgaaactacaaccaaaggccctgctctcaccactcccaaggagcccacgcccaccactcccaaggagcctgcatctaccacacccaaagagcccacacctaccaccatcaagtctgcacccaccacccccaaggagcctgcacccaccaccaccaagtctgcacccaccactcccaaggagcctgcacccaccaccaccaaggagcctgcacccaccactcccaaggagcctgcacccaccaccaccaaggagcctgcacccaccaccaccaagtctgcacccaccactcccaaggagcctgcacccaccacccccaagaagcctgccccaactacccccaaggagcctgcacccaccactcccaaggagcctacacccaccactcccaaggagcctgcacccaccaccaaggagcctgcacccaccactcccaaagagcctgcacccactgcccccaagaagcctgccccaactacccccaaggagcctgcacccaccactcccaaggagcctgcacccaccaccaccaaggagccttcacccaccactcccaaggagcctgcacccaccaccaccaagtctgcacccaccactaccaaggagcctgcacccaccactaccaagtctgcacccaccactcccaaggagccttcacccaccaccaccaaggagcctgcacccaccactcccaaggagcctgcacccaccacccccaagaagcctgccccaactacccccaaggagcctgcacccaccactcccaaggaacctgcacccaccaccaccaagaagcctgcacccaccgctcccaaagagcctgccccaactacccccaaggagactgcacccaccacccccaagaagctcacgcccaccacccccgagaagctcgcacccaccacccctgagaagcccgcacccaccacccctgaggagctcgcacccaccacccctgaggagcccacacccaccacccctgaggagcctgctcccaccactcccaaggcagcggctcccaacacccctaaggagcctgctccaactacccctaaggagcctgctccaactacccctaaggagcctgctccaactacccctaaggagactgctccaactacccctaaagggactgctccaactaccctcaaggaacctgcacccactactcccaagaagcctgcccccaaggagcttgcacccaccaccaccaaggagcccacatccaccacctctgacaagcccgctccaactacccctaaggggactgctccaactacccctaaggggactgctccaactaccctcaaggaacctgcacccactactcccaagaagcctgcccccaaggagcttgcacccaccaccaccaaggggcccacatccaccacctctgacaagcctgctccaactacacctaaggagactgctccaactacccccaaggagcctgcacccactacccccaagaagcctgctccaactactcctgagacacctcctccaaccacttcagaggtctctactccaactaccaccaaggagcctaccactatccacaaaagccctgatgaatcaactcctgagctttctgcagaacccacaccaaaagctcttgaaaacagtcccaaggaacctggtgtacctacaactaagactcctgcagcgactaaacctgaaatgatacaaccacacaagtaacatctaccacaactcaagataccacaccattcaaaattactactcttaaaacaactactcttgcacccaaagtaactacaacaaaaaagacaattactaccactgagattatgaacaaacctgaagaaacagctaaaccaaaagacagagctactaattctaaagcgacaactcctaaacctcaaaagccaaccaaagcacccaaaaaacccacttctaccaaaaagccaaaaacaatgcctagagtgagaaaaccaaagacgacaccaactccccgcaagatgacatcaacaatgccagaattgaaccctacctcaagaatagcagaagccatgctccaaaccaccaccagacctaaccaaactccaaactccaaactagttgaagtaaatccaaagagtgaagatgcaggtggtgctgaaggagaaacacctcatatgcttctcaggccccatgtgttcatgcctgaagttactcccgacatggattacttaccgagagtacccaatcaaggcattatcatcaatcccatgctttccgatgagaccaatatatgcaatggtaagccagtagatggactgactactttgcgcaatgggacattagttgcattccgaggtcattattttcgcatgtaaagtacattaagttcgccgtattcagcttgtggacttgtcgcagtttgaggcatactcccatcgtggc

SEQ ID NO: 423710 - DNA, 429 bp, Homo sapiens
tagctaggattagaggcctgcgtcactgcgcctgtctaatttttgtgtttttcttttagtagacacaaggtttcaccatgttggccaggccggtctcgaactcctgacctcaagtgatccatccaccatagcctcccaaagtgctgggattataagcgtgagccaccacgctcggcctgtacatgtttttttttaactgtctagatgatgccaatgtgcatccaagatgggatcagtgtctcagatctttgccactctaagcatcagcaggaaattcttagaagtgccaaattgcaggccccaacccagacctattgaatcagaatatggattttaacaatatccctaggcaactcacatacacatcaaagtttgagaagcactgactaggaccaccaagaaacggtctctccatgacatggcatcagt

SEQ ID NO: 423711 - DNA, 2237 bp, Homo sapiens
ttttcccccgctacagttctctatgtattgtgaatattcaatactgtgtaatgtctgcaagtatctttttccaatttgtggtttgtcttgtcattatccttatgttatcttttgataaaaagttacttcacttcagtgaagctgaatatatgaatcctttccttagcctttttatggcctttttaaaaagttctacactgaggccacagagacactctgccatattatattcaaaagacttcttagttttggtttcacatctaggtttttaataaatctggagttgatttgtgtatggaataatggtaatctgggaaatttttttttcccatagggacatccaattgtccaaccacctttactgaaaagtctatcttcatactattgatgtgcaatgcctcttctgtggtatgttaaagtccatatattcttgggtctgtttctcaaattctgtaacactggtctagataactacagcactaagatatagtctcactctttacagtctgatacctggaggggcacatcacccatttttgttgttgttcaagaatatcttgtctcttttttgctctttctgttcctctgtatgtttcagagtcagcttaacaagtactataaaaaatgcttgggattttgactgcaattacattggaactgcggtcgattacctgtttactgtatcctctaatccagtgatagtttatcgctccacttatcagggctactttaatatctctcaaaaaagttttttaaatgtcagagaggtcttgcatagcacttgctagattcttaagtacttaatgttttttcatgctatggcatctttttctaaattttactgtttatatatatataaatacaattgatttttatactgactttctatccaacaaccttgcctaccttttattaattctaaacatttatttctagattcttgtggattttatatttgtataatcatatctgtgcaaaataagtaagttttgtttcctctcatatgtaaatacaattgatttttatactgactttatatccaacaactttgccttttattaattctaaatatttatattcttatggattttatatttatataatcatatctgtggcaaaataagttttgtttcctctcaatcctcctatcgtttattttttcctgctttcctgtgctataatttctagtaaattactgaagcgggactaacttgtccctaatttcaaaaggaaagcattcagtgtatcactactaaatatatttactacaaatttcttgtagatatttttcaggttaaggaagttccccctttctatttcccagtttgctaacagtttttatcaggaaggaatattggattttatcaagtttgctgcactttctaaaataaccagtgttctcctttagtgtaaagttgaaaccaccttgttcctgatgtgtcatcctatttatgtagtgccaaatccactttgctaattatttttccgagattttgcatctgagtgagatgttcctcgaattttcctttcccatattttgccaagtattgttatcaaggttatcctggccttaaaaaataagttgaggaatgttcccttttttggcttgtgcaaaatagtttgtgtaaaagtgacctttcagtcattatttcttaaatgtttagtaaaattggccagagaagccacagctttcttcgtgaaaagattttgggctactgattgaaattctttagggcaggggttggcttataacctattttgctactgccttcaagctaagaatggtttttgcaatggttgttaaaaacaaaacaaaacaaaacaaaacaaaaaactatgtaaccaagactttaggtggcctgtaatgcctgaatatttactatctgacccagaagaaaattgctgattcttgttctataggcttgacaaatttctatctcattgttctatcaattagaaaaaagcatgtctaaatctcccattataataataatttgtctatttctccttgtagttttgtcaatttgtgcatttttactttgaaatgatgtcacttggtatataccattttaaatcgctattttttttttttttttttgagatggagtctatggatcatgtgcaatcatggacttcattggtgaagcattggcttagttttgacatttgctactactctgaagaactaaaactgcctcagtctcctaactacgttggattaaagggcctggttaaca

SEQ ID NO: 423712 - DNA, 401 bp, Homo sapiens
aaaaactatgtaaccaagactttaggtggcctgtaatgcctgaatatttactatctgacccagaagaaaattgctgattcttgttctataggcttgacaaatttctatctcattgttctatcaattagaaaaaagcatgtctaaatctcccattataataataatttgtctatttctccttgtagttttgtcaatttgtgcatttttactttgaaatgatgtcacttggtatataccattttaaatcgctattttttttttttttttttgagatggagtctcgctctgttgcacaggctggagtgcaatggcgtgatcttggctcactgtaatcttcgcctcccaggttcaagcaattctcctgcctcagcctcccgagtagctgggattacagtcacgtg

SEQ ID NO: 423713 - DNA, 1043 bp, Homo sapiens
cggaagggcggagttgccggcggccacttccgcttccgctggggaggtcctccatgcgcagtcatgagtcgcttcaagtttatcgatattggtatcaacttgactgaccctatgttcagaggaatttataggggggttcaaaagcatcaagatgacttacaggatgtaatagggagagctgtcgagattggtgttaaaaagtttatgattacaggtggaaatctacaagacagtaaagatgcactgcatttggcacaaacaaatggtatgtttttcagtacagttggatgtcatcctacaagatgtggtgaatttgaaaagaataaccctgatctttacttaaaggagttgctaaatcttgctgaaaacaataaagggaaagttgtggcaataggagaatgcggacttgattttgaccgactgcagttttgtcccaaagatactcaactcaaatattttgaaaaacagtttgaactgtcagaacaaacaaaattaccaatgtttcttcattgtcgaaactcacatgctgaatttttggacataatgaaaagaaatagagatcggtgtgtagggggagtggtgcattcatttgatggtaccaaggaagcagcagctgctttgattgacttggatctttatataggatttaatggttgctcactgaaaactgaagctaatttggaagttttgaagtcaattcctagtgaaaaattaatgattgagacagatgcaccttggtgtggagtcaaaagtacacatgctggatcaaaatatataagaactgcatttcctaccaaaaagaagtgggaaagtgggcactgcttaaaagacagaaatgaaccctgccatataattcaaatattggagataatgtcagcagtgagagatgaggatccactggaattagccaatacactatataacaatactattaaagtattttttcctggaatataattggtatatgtcttccactttccatcatgtatgtaaaatttcatagtaaaacttcctgatagtttcaataaagaaattatctgcaa

SEQ ID NO: 423714 - DNA, 1155 bp, Homo sapiens
cggaagggcggagttgccggcggccacttccgcttccgctggggaggtcctccatgcgcagtcatgagtcgcttcaagtttatcgatattggtatcaacttgactgaccctatgttcagaggaatttataggggggttcaaaagcatcaagatgacttacaggatgtaatagggagagctgtcgagattggtgttaaaaagtttatgattacaggtggaaatctacaagacagtaaagatgcactgcatttggcacaaacaaatggtatgtttttcagtacagttggatgtcatcctacaagatgtggtgaatttgaaaagaataaccctgatctttacttaaaggagttgctaaatcttgctgaaaacaataaagggaaagttgtggcaataggagaatgcggacttgattttgaccgactgcagttttgtcccaaagatactcaactcaaatattttgaaaaacagtttgaactgtcagaacaaacaaaattaccaatgtttcttcattgtcgaaactcacatgctgaatttttggacataatgaaaagaaatagagatcggtgtgtagggggagtggtgcattcatttgatggtaccaaggaagcagcagctgctttgattgacttggatctttatataggatttaatggttgccttatgtatacatatacacgtcatatctgactatggacgaacggtttattctgtgacagtcatacatctctgcagtcaaagaaaccgaggctcaaagaaattaggaaacagctcactgaaaactgaagctaatttggaagttttgaagtcaattcctagtgaaaaattaatgattgagacagatgcaccttggtgtggagtcaaaagtacacatgctggatcaaaatatataagaactgcatttcctaccaaaaagaagtgggaaagtgggcactgcttaaaagacagaaatgaaccctgccatataattcaaatattggagataatgtcagcagtgagagatgaggatccactggaattagccaatacactatataacaatactattaaagtattttttcctggaatataattggtatatgtcttccactttccatcatgtatgtaaaatttcatagtaaaacttcctgatagtttcaataaagaaattatctgcaa

SEQ ID NO: 423715 - DNA, 901 bp, Homo sapiens
  misc_feature (782)..(782): n is a, c, g, or t
  misc_feature (820)..(820): n is a, c, g, or t
  misc_feature (830)..(830): n is a, c, g, or t
  misc_feature (851)..(851): n is a, c, g, or t
  misc_feature (853)..(854): n is a, c, g, or t
cggaagggcggagttgccggcggccacttccgcttccgctggggaggtcctccatgcgcagtcatgagtcgcttcaagtttatcgatattggtatcaacttgactgaccctatgttcagaggaatttataggggggttcaaaagcatcaagatgacttacaggatgtaatagggagagctgtcgagattggtgttaaaaagtttatgattacaggtggaaatctacaagacagtaaagatgcactgcatttggcacaaacaaatggtatgtttttcagtacagttggatgtcatcctacaagatgtggtgaatttgaaaagaataaccctgatctttacttaaaggagttgctaaatcttgctgaaaacaataaagggaaagttgtggcaataggagaatgcggacttgattttgaccgactgcagttttgtcccaaagatactcaactcaaatattttgaaaaacagtttgaactgtcagaacaaacaaaattaccaatgtttcttcattgtcgaaactcacatgctgaatttttggacataatgaaaagaaatagagatcggtgtgtagggggagtggtgcattcatttgatggtaccaaggaagcagcagctgctttgattgacttggatctttatataggatttaatggttgctcactgaaaactgaagctaatttggaagttttgaagtcaattcctagtgaaaaattaatgattgagacagatgcccttggtgtggagtcaaagtcccttgtgggtcaaattttagaatggttctnccaagaaggggaggggggttaaagaagaagaccggctnttaattgggnagggggggaaagaggccgggngnnacaataaaaaaattgggagggggtggcccggtttaaaggtgattaaa

SEQ ID NO: 423716 - DNA, 905 bp, Homo sapiens
  misc_feature (742)..(742): n is a, c, g, or t
  misc_feature (779)..(779): n is a, c, g, or t
  misc_feature (784)..(784): n is a, c, g, or t
  misc_feature (789)..(789): n is a, c, g, or t
  misc_feature (791)..(791): n is a, c, g, or t
cggaagggcggagttgccggcggccacttccgcttccgctggggaggtcctccatgcgcagtcatgagtcgcttcaagtttatcgatattggtatcaacttgactgaccctatgttcagaggaatttataggggggttcaaaagcatcaagatgacttacaggatgtaatagggagagctgtcgagattggtgttaaaaagtttatgattacaggtggaaatctacaagacagtaaagatgcactgcatttggcacaaacaaatggtatcctcatatttcttttaccaaaaaaaaaatgaattaagtaattttgaagaagtctttctgaaaactgcttcaggtatgtttttcagtacagttggatgtcatcctacaagatgtggtgaatttgaaaagaataaccctgatctttacttaaaggagttgctaaatcttgctgaaaacaataaagggaaagttgtggcaataggagaatgcggacttgattttgaccgactgcagttttgtcccaaagatactcaactcaaatattttgaaaaacagtttgaactgtcagaacaaacaaaattaccaatgtttcttcattgtcgaaactcacatgctgaatttttggacataatgaaaagaaatagagatcggtgtgtagggggagtggtgcattcatttgatggtaccaaggaagcagcagctgctttgattgacttggatctttatataggatttaatggttgccactgaaantggaagtaattggaagttgaagcccatcctaggaaantatgntgggnanatgcctcttggtgggggccaagtccattttggtcgaatattaacggtgtttttcccacagaggagggggcgtgtaaagaagagccgcataattggagaggagagagcgggagca

SEQ ID NO: 423717 - DNA, 414 bp, Homo sapiens
  misc_feature (1)..(1): n is a, c, g, or t
nacgcacgtcgtctatagtgagtcgtactcactgaaaactgaagctaatttggaagttttgaagtcaattcctagtgaaaaattaatgattgagacagatgcaccttggtgtggagtcaaaagtacacatgctggatcaaaatatataagaactgcatttcctaccaaaaagaagtgggaaagtgggcactgcttaaaagacagaaatgaaccctgccatataattcaaatattggagataatgtcagcagtgagagatgaggatccactggaattagccaatacactatataacaatactattaaagtattttttcctggaatataattggtatatgtcttccactttccatcatgtatgtaaaatttcatagtaaaacttcctgatagtttcaataaagaaattatctgcaa

SEQ ID NO: 423718 - DNA, 897 bp, Homo sapiens
  misc_feature (580)..(580): n is a, c, g, or t
  misc_feature (584)..(584): n is a, c, g, or t
  misc_feature (595)..(595): n is a, c, g, or t
  misc_feature (598)..(598): n is a, c, g, or t
  misc_feature (600)..(600): n is a, c, g, or t
  misc_feature (602)..(602): n is a, c, g, or t
  misc_feature (607)..(607): n is a, c, g, or t
  misc_feature (609)..(609): n is a, c, g, or t
  misc_feature (611)..(611): n is a, c, g, or t
  misc_feature (618)..(618): n is a, c, g, or t
  misc_feature (622)..(622): n is a, c, g, or t
  misc_feature (625)..(625): n is a, c, g, or t
  misc_feature (630)..(630): n is a, c, g, or t
  misc_feature (632)..(632): n is a, c, g, or t
  misc_feature (639)..(639): n is a, c, g, or t
  misc_feature (644)..(644): n is a, c, g, or t
  misc_feature (646)..(646): n is a, c, g, or t
  misc_feature (648)..(648): n is a, c, g, or t
  misc_feature (650)..(650): n is a, c, g, or t
  misc_feature (778)..(778): n is a, c, g, or t
  misc_feature (816)..(816): n is a, c, g, or t
  misc_feature (826)..(826): n is a, c, g, or t
  misc_feature (847)..(847): n is a, c, g, or t
  misc_feature (849)..(850): n is a, c, g, or t
cggaagggcggagttgccggcggccacttccgcttccgctggggaggtcctccatgcgcagtcatgagtcgcttcaagtttatcgatattggtatcaacttgactgaccctatgttcagaggaatttataggggggttcaaaagcatcaagatgacttacaggatgtaatagggagagctgtcgagattggtgttaaaaagtttatgattacaggtggaaatctacaagacagtaaagatgcactgcatttggcacaaacaaatggtatgtttttcagtacagttggatgtcatcctacaagatgtggtgaatttgaaaagaataaccctgatctttacttaaaggagttgctaaatcttgctgaaaacaataaagggaaagttgtggcaataggagaatgcggacttgattttgaccgactgcagttttgtcccaaagatactcaactcaaatattttgaaaaacagtttgaactgtcagaacaaacaaaattaccaatgtttcttcattgtcgaaactcacatgctgaatttttggacataatgaaaagaaatagagatcggtgtgtagggggagtgnggtncatcatttganggncncnaggangnancagctgntttnatngactngnatcttanatagnantnantggttgctcactgaaactgaagctattggagtttgagtcattcctagtgaaaattatgttggacgatgccttgatgcccttggtgtggagtcaaagtcccttgtgggtcaaattttagaatggttctnccaagaaggggaggggggttaaagaagaagaccggctnttaattgggnagggggggaaagaggccgggngnnacaataaaaaaattgggagggggtggcccggtttaaaggtgattaaa

SEQ ID NO: 423719 - DNA, 874 bp, Homo sapiens
  misc_feature (778)..(778): n is a, c, g, or t
  misc_feature (780)..(780): n is a, c, g, or t
  misc_feature (809)..(809): n is a, c, g, or t
  misc_feature (843)..(843): n is a, c, g, or t
cggacgcgtgggtcgccacgcgtcggacccacgcgtcggccacgcgtcgcctccatgcgcagtcatgagtcgcttcaagtttatcgatattggtatcaacttgactgaccctatgttcagaggaatttataggggggttcaaaagcatcaagtttatgattacaggtggaaatctacaagacagtaaagatgcactgcatttggcacaaacaaatggtatgtttttcagtacagttggatgtcatcctacaagatgtggtgaatttgaaaagaataaccctgatctttacttaaaggagttgctaaatcttgctgaaaacaataaagggaaagttgtggcaataggagaatgcggacttgattttgaccgactgcagttttgtcccaaagatactcaactcaaatattttgaaaaacagtttgaactgtcagaacaaacaaaattaccaatgtttcttcattgtcgaaactcacatgctgaatttttggacataatgaaaagaaatagagatcggtgtgtagggggagtggtgcattcatttgatggtaccaaggaagcagcagctgctttgattgacttggatctttatataggatttaatggttgctcactgaaaactgaagctaatttggaagttttgaagtcaattcctagtgaaaaattaatgattgagacagatgcccttggtgtggggtccaaagtacactgctggtccaatttttagaactgctttcctaccaaagagatgggatgggctgttaaagaagaaatgactcncntattaatttgggaaggcggggggagaggnccggattgcaacaattaaaaaaagattcggaaangatgtgccagtttaagtgaaatcgggttaaa

SEQ ID NO: 423720 - DNA, 955 bp, Homo sapiens
cggaagggcggagttgccggcggccacttccgcttccgctggggaggtcctccatgcgcagtcatgagtcgcttcaagtttatcggtaagaggagcgttttccacgcccttgggtctttctgacttgtcccgggcgtcggtcaccaaggtcacaggacccaggaattgcgccctccggcattatattggtatcaacttgactgaccctatgttcagaggaatttataggggggttcaaaagcatcaagatgacttacaggatgtaatagggagagctgtcgagattggtgttaaaaagtttatgattacaggtggaaatctacaagacagtaaagatgcactgcatttggcacaaacaaatggtatgtttttcagtacagttggatgtcatcctacaagatgtggtgaatttgaaaagaataaccctgatctttacttaaaggagttgctaaatcttgctgaaaacaataaagggaaagttgtggcaataggagaatgcggacttgattttgaccgactgcagttttgtcccaaagatactcaactcaaatattttgaaaaacagtttgaactgtcagaacaaacaaaattaccaatgtttcttcattgtcgaaactcacatgctgaatttttggacataatgaaaagaaatagagatcggtgtgtagggggagtggtgcattcatttgatggtaccaaggaagcagcagctgctttgattgacttggatctttatataggatttaatggttgggttgctcactgaaactgaagctattggagtttgagtcattcctagtgaaaattatgttggacgatgccttggggggcagttcattggggtaaatttgacggtctcaaaagggggggggtaaaaaagacgtaaaaggagaagggaggggggggccaaaaaatgggggtgtcgtaagataaaagcgcggcgtgatgggagtga

SEQ ID NO: 423721 - DNA, 816 bp, Homo sapiens
cggaagggcggagttgccggcggccacttccgcttccgctggggaggtcctccatgcgcagtcatgagtcgcttcaagtttatcgatgacttacaggatgtaatagggagagctgtcgagattggtgttaaaaagtttatgattacaggtggaaatctacaagacagtaaagatgcactgcatttggcacaaacaaatgatattttgaaaaacagtttgaactgtcagaacaaacaaaattaccaatgtttcttcattgtcgaaactcacatgctgaatttttggacataatgaaaagaaatagagatcggtgtgtagggggagtggtgcattcatttgatggtaccaaggaagcagcagctgctttgattgacttggatctttatataggatttaatggttgctcactgaaaactgaagctaatttggaagttttgaagtcaattcctagtgaaaaattaatgattgagacagatgcaccttggtgtggagtcaaaagtacacatgctggatcaaaatatataagaactgcatttcctaccaaaaagaagtgggaaagtgggcactgcttaaaagacagaaatgaaccctgccatataattcaaatattggagataatgtcagcagtgagagatgaggatccactggaattagccaatacactatataacaatactattaaagtattttttcctggaatataattggtatatgtcttccactttccatcatgtatgtaaaatttcatagtaaaacttcctgatagtttcaataaagaaattatctgcaagttgtctaaagaaatactatatatcg

SEQ ID NO: 423722 - DNA, 480 bp, Homo sapiens
catttccactcagttaatgctataattggtgaacataatacagatggctgctttaataatttacttgaacctggttcttagctctagttatatgcaagacagtccataaatctgtttccagttactggcagtaagtttttctattgatattgctgaaaaacttaataactgttaagctttattatattaaaggtgtgccaatattttcctttgtgtggaaaaatattatatagctttagaactaaatgtatacttggagatttaaccatttttgtttttgttttgttttagtcaaatattggagataatgtcagcagtgagagatgaggatccactggaattagccaatacactatataacaatactattaaagtattttttcctggaatataattggtatatgtcttccactttccatcatgtatgtaaaatttcatagtaaaacttcctgatagtttcaataaagaaattatctgcaa

SEQ ID NO: 423723 - DNA, 1068 bp, Homo sapiens
cggaagggcggagttgccggcggccacttccgcttccgctggggaggtcctccatgcgcagtcatgagtcgcttcaagtttatcgatattggtatcaacttgactgaccctatgttcagaggaatttataggggggttcaaaagcatcaagatgacttacaggatgtaatagggagagctgtcgagattggtgttaaaaagtttatgattacaggtggaaatctacaagacagtaaagatgcactgcatttggcacaaacaaatggtatgtttttcagtacagttggatgtcatcctacaagatgtggtgaatttgaaaagaataaccctgatctttacttaaaggagttgctaaatcttgctgaaaacaataaagggaaagttgtggcaataggagaatgcggacttgattttgaccgactgcagttttgtcccaaagatactcaactcaaatattttgaaaaacagtttgaactgtcagaacaaacaaaattaccaatgtttcttcattgtcgaaactcacatgctgaatttttggacataatgaaaagaaatagagatcggtgtgtagggggagtggtgcattcatttgatggtaccaaggaagcagcagctgctttgattgacttggatctttatataggatttaatggttgctcactgaaaactgaagctaatttggaagttttgaagtcaattcctagtgaaaaattaatgattgagacagatgcaccttggtgtggagtcaaaagtacacatgctggatcaaaatatataagaactgcatttcctaccaaaaagaagtgggaaagtgggcactgcttaaaagacagaaatgaaccctgccatataattcaaatattggagataatgtcagcagtgagagatgaggatccactggaattagccaatacactatataacaatactattaaagtattttttcctggaatataattggtatatgtcttccactttccatcatgtatgtaaaatttcatagtaaaacttcctgatagtttcaataaagaaattatctgcaaaaaaaaaaatggtgtaagaagtcgg

SEQ ID NO: 423724 - DNA, 1113 bp, Homo sapiens
cggaagggcggagttgccggcggccacttccgcttccgctggggaggtcctccatgcgcagtcatgagtcgcttcaagtttatcgatattggtatcaacttgactgaccctatgttcagaggaatttataggggggttcaaaagcatcaagatgacttacaggatgtaatagggagagctgtcgagattggtgttaaaaagtttatgattacaggtggaaatctacaagacagtaaagatgcactgcatttggcacaaacaaatggtatgtttttcagtacagttggatgtcatcctacaagatgtggtgaatttgaaaagaataaccctgatctttacttaaaggagttgctaaatcttgctgaaaacaataaagggaaagttgtggcaataggagaatgcggacttgattttgaccgactgcagttttgtcccaaagatactcaactcaaatattttgaaaaacagtttgaactgtcagaacaaacaaaattaccaatgtttcttcattgtcgaaactcacatgctgaatttttggacataatgaaaagaaatagagatcggtgtgtagggggagtggtgcattcatttgatggtaccaaggaagcagcagctgctttgattgacttggatctttatataggatttaatggttgctcactgaaaactgaagctaatttggaagttttgaagtcaattcctagtgaaaaattaatgattgagacagatgcaccttggtgtggagtcaaaagtacacatgctggatcaaaatatataagaactgcatttcctaccaaaaagaagtgggaaagtgggcactgcttaaaagacagaaatgaaccctgccatataattcaaatattggagataatgtcagcagtgagagatgaggatccactggaattagccaatacactatataacaatactattaaagtattttttcctggaatataattggtatatgtcttccactttccatcatgtatgtaaaatttcatagtaaaacttcctgatagtttcaataaagaaattatctgcaaaaaaaaaatcaaattcaaacattcaattcctcttttgatgcatcctctctcaaatcttttaacaaaataa

SEQ ID NO: 423725 - DNA, 1316 bp, Homo sapiens
cggaagggcggagttgccggcggccacttccgcttccgctggggaggtcctccatgcgcagtcatgagtcgcttcaagtttatcgatattggtatcaacttgactgaccctatgttcagaggaatttataggggggttcaaaagcatcaagatgacttacaggatgtaatagggagagctgtcgagattggtgttaaaaagtttatgattacaggtggaaatctacaagacagtaaagatgcactgcatttggcacaaacaaatggtatgtttttcagtacagttggatgtcatcctacaagatgtggtgaatttgaaaagaataaccctgatctttacttaaaggagttgctaaatcttgctgaaaacaataaagggaaagttgtggcaataggagaatgcggacttgattttgaccgactgcagttttgtcccaaagatactcaactcaaatattttgaaaaacagtttgaactgtcagaacaaacaaaattaccaatgtttcttcattgtcgaaactcacatgctgaatttttggacataatgaaaagaaatagagatcggtgtgtagggggagtggtgcattcatttgatggtaccaaggaagcagcagctgctttgattgacttggatctttatataggatttaatggttgctcactgaaaactgaagctaatttggaagttttgaagtcaattcctagtgaaaaattaatgattgagacagatgcaccttggtgtggagtcaaaagtacacatgctggatcaaaatatataagaactgcatttcctaccaaaaagaagtgggaaagtgggcactgcttaaaagacagaaatgaaccctgccatataattcaaatattggagataatgtcagcagtgagagatgaggatccactggaattagccaatacactatataacaatactattaaagtattttttcctggaatataattggtatatgtcttccactttccatcatgtatgtaaaatttcatagtaaaacttcctgatagtttcaataaagaaattatctgcaaaaaaaaaaaaaaaaaaaaaaaaaaaaaaaaaaaaaaaaaaaaaaaaaaaaaaaaaaaaaaaaaaaaaaaaaaaaaaataataaaaaaactaaaaataaccaataaaattactaataccaataaccttaaccaaaaccacctcatataaaaaccttacacaaacctaactactccttctttttcaaattattccacctctccacactcccaatcctcatcttaacccttctttactttcttaactatttaatcttttatataactctcttttcc

SEQ ID NO: 423726 - DNA, 858 bp, Homo sapiens
cggaagggcggagttgccggcggccacttccgcttccgctggggaggtcctccatgcgcagtcatgagtcgcttcaagtttatcgatattggtatcaacttgactgaccctatgttcagaggaatttataggggggttcaaaagcatcaagatgacttacaggatgtaatagggagagctgtcgagattggtgttaaaaagtttatgattacaggtggaaatctacaagacagtaaagatgcactgcatttggcacaaacaaatggtatgtttttcagtacagttggatgtcatcctacaagatgtggtgaatttgaaaagaataaccctgatctttacttaaaggagttgctaaatcttgctgaaaacaataaagggaaagttgtggcaataggagaatgcggacttgattttgaccgactgcagttttgtcccaaagatactcaactcaaatattttgaaaaacagtttgaactgtcagaacaaacaaaattaccaatgtttcttcattgtcgaaactcacatgctgaatttttggacataatgaaaagaaatagagatcggtgtgtagggggagtggtgcattcatttgatggtaccaaggaagcagcagctgctttgattgacttggatctttatataggatttaatggttgggttgctcactgaaactgaagctattggagtttgagtcattcctagtgaaaattatgttggacgatgccttggggggcagttcattggggtaaatttgacggtctcaaaagggggggggtaaaaaagacgtaaaaggagaagggaggggggggccaaaaaatgggggtgtcgtaagataaaagcgcggcgtgatgggagtga

SEQ ID NO: 423727 - DNA, 1119 bp, Homo sapiens
cggaagggcggagttgccggcggccacttccgcttccgctggggaggtcctccatgcgcagtcatgagtcgcttcaagtttatcgatattggtatcaacttgactgaccctatgttcagaggaatttataggggggttcaaaagcatcaagatgacttacaggatgtaatagggagagctgtcgagattggtgttaaaaagtttatgattacaggtggaaatctacaagacagtaaagatgcactgcatttggcacaaacaaatggtatcctcatatttcttttaccaaaaaaaaaatgaattaagtaattttgaagaagtctttctgaaaactgcttcaggtatgtttttcagtacagttggatgtcatcctacaagatgtggtgaatttgaaaagaataaccctgatctttacttaaaggagttgctaaatcttgctgaaaacaataaagggaaagttgtggcaataggagaatgcggacttgattttgaccgactgcagttttgtcccaaagatactcaactcaaatattttgaaaaacagtttgaactgtcagaacaaacaaaattaccaatgtttcttcattgtcgaaactcacatgctgaatttttggacataatgaaaagaaatagagatcggtgtgtagggggagtggtgcattcatttgatggtaccaaggaagcagcagctgctttgattgacttggatctttatataggatttaatggttgctcactgaaaactgaagctaatttggaagttttgaagtcaattcctagtgaaaaattaatgattgagacagatgcaccttggtgtggagtcaaaagtacacatgctggatcaaaatatataagaactgcatttcctaccaaaaagaagtgggaaagtgggcactgcttaaaagacagaaatgaaccctgccatataattcaaatattggagataatgtcagcagtgagagatgaggatccactggaattagccaatacactatataacaatactattaaagtattttttcctggaatataattggtatatgtcttccactttccatcatgtatgtaaaatttcatagtaaaacttcctgatagtttcaataaagaaattatctgcaa

SEQ ID NO: 423728 - DNA, 1069 bp, Homo sapiens
cggaagggcggagttgccggcggccacttccgcttccgctggggaggtcctccatgcgcagtcatgagtcgcttcaagtttatcgatattggtatcaacttgactgaccctatgttcagaggaatttataggggggttcaaaagcatcaagtttatgattacaggtggaaatctacaagacagtaaagatgcactgcatttggcacaaacaaatggtatcctcatatttcttttaccaaaaaaaaaatgaattaagtaattttgaagaagtctttctgaaaactgcttcaggtatgtttttcagtacagttggatgtcatcctacaagatgtggtgaatttgaaaagaataaccctgatctttacttaaaggagttgctaaatcttgctgaaaacaataaagggaaagttgtggcaataggagaatgcggacttgattttgaccgactgcagttttgtcccaaagatactcaactcaaatattttgaaaaacagtttgaactgtcagaacaaacaaaattaccaatgtttcttcattgtcgaaactcacatgctgaatttttggacataatgaaaagaaatagagatcggtgtgtagggggagtggtgcattcatttgatggtaccaaggaagcagcagctgctttgattgacttggatctttatataggatttaatggttgctcactgaaaactgaagctaatttggaagttttgaagtcaattcctagtgaaaaattaatgattgagacagatgcaccttggtgtggagtcaaaagtacacatgctggatcaaaatatataagaactgcatttcctaccaaaaagaagtgggaaagtgggcactgcttaaaagacagaaatgaaccctgccatataattcaaatattggagataatgtcagcagtgagagatgaggatccactggaattagccaatacactatataacaatactattaaagtattttttcctggaatataattggtatatgtcttccactttccatcatgtatgtaaaatttcatagtaaaacttcctgatagtttcaataaagaaattatctgcaa

SEQ ID NO: 423729 - DNA, 966 bp, Homo sapiens
cggaagggcggagttgccggcggccacttccgcttccgctggggaggtcctccatgcgcagtcatgagtcgcttcaagtttatcgatattggtatcaacttgactgaccctatgttcagaggaatttataggggggttcaaaagcatcaagatgacttacaggatgtaatagggagagctgtcgagattggtgttaaaaagtttatgattacaggtggaaatctacaagacagtaaagatgcactgcatttggcacaaacaaatggtatgtttttcagtacagttggatgtcatcctacaagatgtggtgaatttgaaaagaataaccctgatctttacttaaaggagttgctaaatcttgctgaaaacaataaagggaaagttgtggcaataggagaatgcggacttgattttgaccgactgcagttttgtcccaaagatactcaactcaaatattttgaaaaacagtttgaactgtcagaacaaacaaaattaccaatgtttcttcattgtcgaaactcacatgctgaatttttggacataatgaaaagaaatagagatcggtgtgtagggggagtgctcactgaaaactgaagctaatttggaagttttgaagtcaattcctagtgaaaaattaatgattgagacagatgcaccttggtgtggagtcaaaagtacacatgctggatcaaaatatataagaactgcatttcctaccaaaaagaagtgggaaagtgggcactgcttaaaagacagaaatgaaccctgccatataattcaaatattggagataatgtcagcagtgagagatgaggatccactggaattagccaatacactatataacaatactattaaagtattttttcctggaatataattggtatatgtcttccactttccatcatgtatgtaaaatttcatagtaaaacttcctgatagtttcaataaagaaattatctgcaa

SEQ ID NO: 423730 - DNA, 1140 bp, Homo sapiens
cggaagggcggagttgccggcggccacttccgcttccgctggggaggtcctccatgcgcagtcatgagtcgcttcaagtttatcggtaagaggagcgttttccacgcccttgggtctttctgacttgtcccgggcgtcggtcaccaaggtcacaggacccaggaattgcgccctccggcattatattggtatcaacttgactgaccctatgttcagaggaatttataggggggttcaaaagcatcaagatgacttacaggatgtaatagggagagctgtcgagattggtgttaaaaagtttatgattacaggtggaaatctacaagacagtaaagatgcactgcatttggcacaaacaaatggtatgtttttcagtacagttggatgtcatcctacaagatgtggtgaatttgaaaagaataaccctgatctttacttaaaggagttgctaaatcttgctgaaaacaataaagggaaagttgtggcaataggagaatgcggacttgattttgaccgactgcagttttgtcccaaagatactcaactcaaatattttgaaaaacagtttgaactgtcagaacaaacaaaattaccaatgtttcttcattgtcgaaactcacatgctgaatttttggacataatgaaaagaaatagagatcggtgtgtagggggagtggtgcattcatttgatggtaccaaggaagcagcagctgctttgattgacttggatctttatataggatttaatggttgctcactgaaaactgaagctaatttggaagttttgaagtcaattcctagtgaaaaattaatgattgagacagatgcaccttggtgtggagtcaaaagtacacatgctggatcaaaatatataagaactgcatttcctaccaaaaagaagtgggaaagtgggcactgcttaaaagacagaaatgaaccctgccatataattcaaatattggagataatgtcagcagtgagagatgaggatccactggaattagccaatacactatataacaatactattaaagtattttttcctggaatataattggtatatgtcttccactttccatcatgtatgtaaaatttcatagtaaaacttcctgatagtttcaataaagaaattatctgcaa

SEQ ID NO: 423731 - DNA, 1216 bp, Homo sapiens
cggaagggcggagttgccggcggccacttccgcttccgctggggaggtcctccatgcgcagtcatgagtcgcttcaagtttatcggtaagaggagcgttttccacgcccttgggtctttctgacttgtcccgggcgtcggtcaccaaggtcacaggacccaggaattgcgccctccggcattatattggtatcaacttgactgaccctatgttcagaggaatttataggggggttcaaaagcatcaagatgacttacaggatgtaatagggagagctgtcgagattggtgttaaaaagtttatgattacaggtggaaatctacaagacagtaaagatgcactgcatttggcacaaacaaatggtatcctcatatttcttttaccaaaaaaaaaatgaattaagtaattttgaagaagtctttctgaaaactgcttcaggtatgtttttcagtacagttggatgtcatcctacaagatgtggtgaatttgaaaagaataaccctgatctttacttaaaggagttgctaaatcttgctgaaaacaataaagggaaagttgtggcaataggagaatgcggacttgattttgaccgactgcagttttgtcccaaagatactcaactcaaatattttgaaaaacagtttgaactgtcagaacaaacaaaattaccaatgtttcttcattgtcgaaactcacatgctgaatttttggacataatgaaaagaaatagagatcggtgtgtagggggagtggtgcattcatttgatggtaccaaggaagcagcagctgctttgattgacttggatctttatataggatttaatggttgctcactgaaaactgaagctaatttggaagttttgaagtcaattcctagtgaaaaattaatgattgagacagatgcaccttggtgtggagtcaaaagtacacatgctggatcaaaatatataagaactgcatttcctaccaaaaagaagtgggaaagtgggcactgcttaaaagacagaaatgaaccctgccatataattcaaatattggagataatgtcagcagtgagagatgaggatccactggaattagccaatacactatataacaatactattaaagtattttttcctggaatataattggtatatgtcttccactttccatcatgtatgtaaaatttcatagtaaaacttcctgatagtttcaataaagaaattatctgcaa

SEQ ID NO: 423732 - DNA, 994 bp, Homo sapiens
cggacgcgtgggtcgccacgcgtcggacccacgcgtcggccacgcgtcgcctccatgcgcagtcatgagtcgcttcaagtttatcgatattggtatcaacttgactgaccctatgttcagaggaatttataggggggttcaaaagcatcaagtttatgattacaggtggaaatctacaagacagtaaagatgcactgcatttggcacaaacaaatggtatgtttttcagtacagttggatgtcatcctacaagatgtggtgaatttgaaaagaataaccctgatctttacttaaaggagttgctaaatcttgctgaaaacaataaagggaaagttgtggcaataggagaatgcggacttgattttgaccgactgcagttttgtcccaaagatactcaactcaaatattttgaaaaacagtttgaactgtcagaacaaacaaaattaccaatgtttcttcattgtcgaaactcacatgctgaatttttggacataatgaaaagaaatagagatcggtgtgtagggggagtggtgcattcatttgatggtaccaaggaagcagcagctgctttgattgacttggatctttatataggatttaatggttgctcactgaaaactgaagctaatttggaagttttgaagtcaattcctagtgaaaaattaatgattgagacagatgcaccttggtgtggagtcaaaagtacacatgctggatcaaaatatataagaactgcatttcctaccaaaaagaagtgggaaagtgggcactgcttaaaagacagaaatgaaccctgccatataattcaaatattggagataatgtcagcagtgagagatgaggatccactggaattagccaatacactatataacaatactattaaagtattttttcctggaatataattggtatatgtcttccactttccatcatgtatgtaaaatttcatagtaaaacttcctgatagtttcaataaagaaattatctgcaa

SEQ ID NO: 423733 - DNA, 977 bp, Homo sapiens
cggaagggcggagttgccggcggccacttccgcttccgctggggaggtcctccatgcgcagtcatgagtcgcttcaagtttatcgatgacttacaggatgtaatagggagagctgtcgagattggtgttaaaaagtttatgattacaggtggaaatctacaagacagtaaagatgcactgcatttggcacaaacaaatggtatgtttttcagtacagttggatgtcatcctacaagatgtggtgaatttgaaaagaataaccctgatctttacttaaaggagttgctaaatcttgctgaaaacaataaagggaaagttgtggcaataggagaatgcggacttgattttgaccgactgcagttttgtcccaaagatactcaactcaaatattttgaaaaacagtttgaactgtcagaacaaacaaaattaccaatgtttcttcattgtcgaaactcacatgctgaatttttggacataatgaaaagaaatagagatcggtgtgtagggggagtggtgcattcatttgatggtaccaaggaagcagcagctgctttgattgacttggatctttatataggatttaatggttgctcactgaaaactgaagctaatttggaagttttgaagtcaattcctagtgaaaaattaatgattgagacagatgcaccttggtgtggagtcaaaagtacacatgctggatcaaaatatataagaactgcatttcctaccaaaaagaagtgggaaagtgggcactgcttaaaagacagaaatgaaccctgccatataattcaaatattggagataatgtcagcagtgagagatgaggatccactggaattagccaatacactatataacaatactattaaagtattttttcctggaatataattggtatatgtcttccactttccatcatgtatgtaaaatttcatagtaaaacttcctgatagtttcaataaagaaattatctgcaa

SEQ ID NO: 423734 - DNA, 1153 bp, Homo sapiens
cggaagggcggagttgccggcggccacttccgcttccgctggggaggtcctccatgcgcagtcatgagtcgcttcaagtttatcgatcataggtgacagtgatgtgacacgattcagtgagcccaataactgaggcttcaacttaagagttgtggttttctcctggttacaaacagtgccgttttctactcttactttgttttgaaaacgaaaagtcaatatttgaagaactcttaaataataaaatattggtatcaacttgactgaccctatgttcagaggaatttataggggggttcaaaagcatcaagtttatgattacaggtggaaatctacaagacagtaaagatgcactgcatttggcacaaacaaatggtatgtttttcagtacagttggatgtcatcctacaagatgtggtgaatttgaaaagaataaccctgatctttacttaaaggagttgctaaatcttgctgaaaacaataaagggaaagttgtggcaataggagaatgcggacttgattttgaccgactgcagttttgtcccaaagatactcaactcaaatattttgaaaaacagtttgaactgtcagaacaaacaaaattaccaatgtttcttcattgtcgaaactcacatgctgaatttttggacataatgaaaagaaatagagatcggtgtgtagggggagtggtgcattcatttgatggtaccaaggaagcagcagctgctttgattgacttggatctttatataggatttaatggttgctcactgaaaactgaagctaatttggaagttttgaagtcaattcctagtgaaaaattaatgattgagacagatgcaccttggtgtggagtcaaaagtacacatgctggatcaaaatatataagaactgcatttcctaccaaaaagaagtgggaaagtgggcactgcttaaaagacagaaatgaaccctgccatataattcaaatattggagataatgtcagcagtgagagatgaggatccactggaattagccaatacactatataacaatactattaaagtattttttcctggaatataattggtatatgtcttccactttccatcatgtatgtaaaatttcatagtaaaacttcctgatagtttcaataaagaaattatctgcaa

SEQ ID NO: 423735 - DNA, 1053 bp, Homo sapiens
cggaagggcggagttgccggcggccacttccgcttccgctggggaggtcctccatgcgcagtcatgagtcgcttcaagtttatcgatgacttacaggatgtaatagggagagctgtcgagattggtgttaaaaagtttatgattacaggtggaaatctacaagacagtaaagatgcactgcatttggcacaaacaaatggtatcctcatatttcttttaccaaaaaaaaaatgaattaagtaattttgaagaagtctttctgaaaactgcttcaggtatgtttttcagtacagttggatgtcatcctacaagatgtggtgaatttgaaaagaataaccctgatctttacttaaaggagttgctaaatcttgctgaaaacaataaagggaaagttgtggcaataggagaatgcggacttgattttgaccgactgcagttttgtcccaaagatactcaactcaaatattttgaaaaacagtttgaactgtcagaacaaacaaaattaccaatgtttcttcattgtcgaaactcacatgctgaatttttggacataatgaaaagaaatagagatcggtgtgtagggggagtggtgcattcatttgatggtaccaaggaagcagcagctgctttgattgacttggatctttatataggatttaatggttgctcactgaaaactgaagctaatttggaagttttgaagtcaattcctagtgaaaaattaatgattgagacagatgcaccttggtgtggagtcaaaagtacacatgctggatcaaaatatataagaactgcatttcctaccaaaaagaagtgggaaagtgggcactgcttaaaagacagaaatgaaccctgccatataattcaaatattggagataatgtcagcagtgagagatgaggatccactggaattagccaatacactatataacaatactattaaagtattttttcctggaatataattggtatatgtcttccactttccatcatgtatgtaaaatttcatagtaaaacttcctgatagtttcaataaagaaattatctgcaa

SEQ ID NO: 423736 - DNA, 1166 bp, Homo sapiens
cggaagggcggagttgccggcggccacttccgcttccgctggggaggtcctccatgcgcagtcatgagtcgcttcaagtttatcggtaagaggagcgttttccacgcccttgggtctttctgacttgtcccgggcgtcggtcaccaaggtcacaggacccaggaattgcgccctccggcattatattggtatcaacttgactgaccctatgttcagaggaatttataggggggttcaaaagcatcaagtttatgattacaggtggaaatctacaagacagtaaagatgcactgcatttggcacaaacaaatggtatcctcatatttcttttaccaaaaaaaaaatgaattaagtaattttgaagaagtctttctgaaaactgcttcaggtatgtttttcagtacagttggatgtcatcctacaagatgtggtgaatttgaaaagaataaccctgatctttacttaaaggagttgctaaatcttgctgaaaacaataaagggaaagttgtggcaataggagaatgcggacttgattttgaccgactgcagttttgtcccaaagatactcaactcaaatattttgaaaaacagtttgaactgtcagaacaaacaaaattaccaatgtttcttcattgtcgaaactcacatgctgaatttttggacataatgaaaagaaatagagatcggtgtgtagggggagtggtgcattcatttgatggtaccaaggaagcagcagctgctttgattgacttggatctttatataggatttaatggttgctcactgaaaactgaagctaatttggaagttttgaagtcaattcctagtgaaaaattaatgattgagacagatgcaccttggtgtggagtcaaaagtacacatgctggatcaaaatatataagaactgcatttcctaccaaaaagaagtgggaaagtgggcactgcttaaaagacagaaatgaaccctgccatataattcaaatattggagataatgtcagcagtgagagatgaggatccactggaattagccaatacactatataacaatactattaaagtattttttcctggaatataattggtatatgtcttccactttccatcatgtatgtaaaatttcatagtaaaacttcctgatagtttcaataaagaaattatctgcaa

SEQ ID NO: 423737 - DNA, 1026 bp, Homo sapiens
cggaagggcggagttgccggcggccacttccgcttccgctggggaggtcctccatgcgcagtcatgagtcgcttcaagtttatcggtaagaggagcgttttccacgcccttgggtctttctgacttgtcccgggcgtcggtcaccaaggtcacaggacccaggaattgcgccctccggcattatattggtatcaacttgactgaccctatgttcagaggaatttataggggggttcaaaagcatcaaggtatgtttttcagtacagttggatgtcatcctacaagatgtggtgaatttgaaaagaataaccctgatctttacttaaaggagttgctaaatcttgctgaaaacaataaagggaaagttgtggcaataggagaatgcggacttgattttgaccgactgcagttttgtcccaaagatactcaactcaaatattttgaaaaacagtttgaactgtcagaacaaacaaaattaccaatgtttcttcattgtcgaaactcacatgctgaatttttggacataatgaaaagaaatagagatcggtgtgtagggggagtggtgcattcatttgatggtaccaaggaagcagcagctgctttgattgacttggatctttatataggatttaatggttgctcactgaaaactgaagctaatttggaagttttgaagtcaattcctagtgaaaaattaatgattgagacagatgcaccttggtgtggagtcaaaagtacacatgctggatcaaaatatataagaactgcatttcctaccaaaaagaagtgggaaagtgggcactgcttaaaagacagaaatgaaccctgccatataattcaaatattggagataatgtcagcagtgagagatgaggatccactggaattagccaatacactatataacaatactattaaagtattttttcctggaatataattggtatatgtcttccactttccatcatgtatgtaaaatttcatagtaaaacttcctgatagtttcaataaagaaattatctgcaa

SEQ ID NO: 423738 - DNA, 943 bp, Homo sapiens
ttgctaattgacttcccttgattctcctgggtccgtctgtgtcgaaacctagtggctccagaaggtaatagtgcaaaagctcgcgtgtgacctctagcccaacagacagagcatggcacatgacaatctcgcgtactaaactcacatgagatatgaaaaaacagcgtatgtttttcagtacagttggatgtcatcctacaagatgtggtgaatttgaaaagaataaccctgatctttacttaaaggagttgctaaatcttgctgaaaacaataaagggaaagttgtggcaataggagaatgcggacttgattttgaccgactgcagttttgtcccaaagatactcaactcaaatattttgaaaaacagtttgaactgtcagaacaaacaaaattaccaatgtttcttcattgtcgaaactcacatgctgaatttttggacataatgaaaagaaatagagatcggtgtgtagggggagtggtgcattcatttgatggtaccaaggaagcagcagctgctttgattgacttggatctttatataggatttaatggttgctcactgaaaactgaagctaatttggaagttttgaagtcaattcctagtgaaaaattaatgattgagacagatgcaccttggtgtggagtcaaaagtacacatgctggatcaaaatatataagaactgcatttcctaccaaaaagaagtgggaaagtgggcactgcttaaaagacagaaatgaaccctgccatataattcaaatattggagataatgtcagcagtgagagatgaggatccactggaattagccaatacactatataacaatactattaaagtattttttcctggaatataattggtatatgtcttccactttccatcatgtatgtaaaatttcatagtaaaacttcctgatagtttcaataaagaaattatctgcaa

SEQ ID NO: 423739 - DNA, 436 bp, Homo sapiens
tcgaaagacatatgtatgattgatgtaggtaaagaaagaaacaaatctgctcactgaaaactgaagctaatttggaagttttgaagtcaattcctagtgaaaaattaatgattgagacagatgcaccttggtgtggagtcaaaagtacacatgctggatcaaaatatataagaactgcatttcctaccaaaaagaagtgggaaagtgggcactgcttaaaagacagaaatgaaccctgccatataattcaaatattggagataatgtcagcagtgagagatgaggatccactggaattagccaatacactatataacaatactattaaagtattttttcctggaatataattggtatatgtcttccactttccatcatgtatgtaaaatttcatagtaaaacttcctgatagtttcaataaagaaattatctgcaa

SEQ ID NO: 423740 - DNA, 510 bp, Homo sapiens
gtggaggttgcagtgagccaagatcgcgccattgcaccccagcctgggcaacaagagcaaaactccatctcaaaaaaaaaaaaaaaagtatcctctaacagaaaattcatcagtattttaaaaattcttttaaatagtgccataaaattactaagctttcctcatgtttttgcctaagaatatatctattcctaaaccccttcctggagcttctgcactaatgctagtgcagagacagcaacactgccactctaaagagagaaattctcggcagctaacgttttgcatcatgtcactggagatgatgacaggttgtaattgtgaaaaataatatgaaaataaaaattatagcgactaccacctttgaaaccctgaggtccaaaaacttacagggatctatatttttgcctacaaagtcttattaatgtcacttagaattttaaagagtaattattataataataaacttatacctgtatgtccccaggtgcattcatttgatggtaccaa

SEQ ID NO: 423741 - DNA, 528 bp, Homo sapiens
tacgatgtttgcaaaatgtgtaattctttattaaaaaatattcaaaaccagtttcacattcagtagagatagaaatttgtttaacttatgcaaacctcactacatgcatagcgaaaaagattttgaaaactgaaaaaaaaactgtttaacttaaatgttttcatgttgttatacaattgtatttaaggtttaggtcttttttttaaagcatgctgcacaccaacaatgttagcagaaaaaaggaatagaagtgagtcttagaaggtatttaagatgcaattcaagattttatcttgtgcttttcttagaactgttttctgttgaaataactgtgccattttggaagctgaatcacggtttatcatttagaggttatatattagataatggtcataaaaaatttttaaaaatgtaaaccccttacgagacactttctttgcttaactagatgcaccttggtgtggagtcaaaagtacacatgctggatcaaaatatataagaactgcatttcctaccaaaaagaagtgg

SEQ ID NO: 423742 - DNA, 497 bp, Homo sapiens
  misc_feature (1)..(1): n is a, c, g, or t
nccccactactccacggttggctccacaccaaggtgcattcatttgatggtaccaaggaagcagcagctgctttgattgacttggatctttatataggatttaatggttgctcactgaaaactgaagctaatttggaagttttgaagtcaattcctagtgaaaaattaatgattgagacagatgcaccttggtgtggagtcaaaagtacacatgctggatcaaaatatataagaactgcatttcctaccaaaaagaagtgggaaagtgggcactgcttaaaagacagaaatgaaccctgccatataattcaaatattggagataatgtcagcagtgagagatgaggatccactggaattagccaatacactatataacaatactattaaagtattttttcctggaatataattggtatatgtcttccactttccatcatgtatgtaaaatttcatagtaaaacttcctgatagtttcaataaagaaattatctgcaa

SEQ ID NO: 423743 - DNA, 2637 bp, Homo sapiens
gagccagttctgggaggcggggggaaggaggttggtggcgactccctcgctcgccctcactgccggcggtcccaactccaggcaccatgttccccgcgggcccccccagccacagcctcctccggctccccctgctgcagttgctgctactggtggtgcaggccgtggggagggggctgggccgcgccagcccggccgggggccccctggaagatgtggtcatcgagaggtaccacatccccagggcctgtccccgggaagtgcagatgggggattttgtgcgctaccactacaacggcacttttgaagatggcaagaagtttgattcaagctatgatcgcaacaccttggtggccatcgtggtgggtgtggggcgcctcatcactggcatggaccgaggcctcatgggcatgtgtgtcaacgagcggcgacgcctcattgtgcctccccacctgggctatgggagcatcggcctggcggggctcattccaccggatgccaccctctacttcgatgtggttctgctggatgtgtggaacaaggaagacaccgtgcaggtgagcacattgctgcgcccgccccactgcccccgcatggtccaggacggcgactttgtccgctaccactacaatggcaccctgctggacggcacctccttcgacaccagctacagtaagggcggcacttatgacacctacgtcggctctggttggctgatcaagggcatggaccaggggctgctgggcatgtgtcctggagagagaaggaagattatcatccctccattcctggcctatggcgagaaaggctatgggacagtgatccccccacaggcctcgctggtctttcacgtcctcctgattgacgtgcacaacccgaaggacgctgtccagctagagacgctggagctcccccccggctgtgtccgcagagccggggccggggacttcatgcgctaccactacaatggctccttgatggacggcaccctcttcgattccagctactcccgcaaccacacctacaatacctatatcgggcagggttacatcatccccgggatggaccaggggctgcagggtgcctgcatgggggaacgccggagaattaccatccccccgcacctcgcctatggggagaatggaactggagacaagatccctggctctgccgtgctaatcttcaacgtccatgtcattgacttccacaaccctgcggatgtggtggaaatcaggacactgtcccggccatctgagacctgcaatgagaccaccaagcttggggactttgttcgataccattacaactgttctttgctggacggcacccagctgttcacctcgcatgactacggggccccccaggaggcgactctcggggccaacaaggtgatcgaaggcctggacacgggcctgcagggcatgtgtgtgggagagaggcggcagctcatcgtgcccccgcacctggcccacggggagagtggagcccggggagtcccaggcagtgctgtgctgctgtttgaggtggagctggtgtcccgggaggatgggctgcccacaggctacctgtttgtgtggcacaaggaccctcctgccaacctgtttgaagacatggacctcaacaaggatggcgaggtccctccggaggagttctccaccttcatcaaggctcaagtgagtgagggcaaaggacgcctcatgcctgggcaggaccctgagaaaaccataggagacatgttccagaaccaggaccgcaaccaggacggcaagatcacagtcgacgagctcaagctgaagtcagatgaggacgaggagcgggtccacgaggagctctgaggggcagggagcctggccaggcctgagacacagaggcccactgcgagggggacagtggcggtgggactgacctgctgacagtcaccctccctctgctgggatgaggtccaggagccaactaaaacaatggcagaggagacatctctggtgttcccaccaccctagatgaaaatccacagcacagacctctaccgtgtttctcttccatccctaaaccacttccttaaaatgtttggatttgcaaagccaatttggggcctgtggagcctggggttggatagggccatggctggtcccccaccatacctcccctccacatcactgacacagctgagcttgttatccatctccccaaactttctctttctttgtacttcttgtcatccccactcccagcccctattcctctatgtgacagctggctaggacccctctgccttcctccccaatcctgactggctcctagggaaggggaaggctcctggagggcagccctacctctcccatgccctttgccctcctccctcgcctccagtggaggctgagctgaccctgggctgctggaggccagactgggctgtagttagcttttcatccctaaagaaggctttccctaaggaaccatagaagagaggaagaaaacaaagggcatgtgtgagggaagctgcttgggtgggtgttagggctatgaaatcttggatttggggctgaggggtgggagggagggcagagctctgcacactcaaaggctaaactggtgtcagtccttttttcctttgttccaaataaaagattaaaccaa

SEQ ID NO: 423744 - DNA, 2557 bp, Homo sapiens
aagctttggtacttaacgtgtaaacggcgcgtcatccctgcggcccacagcccgtccttggtgctgtcgtgtgcagcgtgggagggggcttgggggctgggccgcgccagcccggccgggggccccctggaagatgtggtcatcgagaggtaccacatccccagggcctgtccccgggaagtgcagatgggggattttgtgcgctaccactacaacggcacttttgaagatggcaagaagtttgattcaagctatgatcgcaacaccttggtggccatcgtggtgggtgtggggcgcctcatcactggcatggaccgaggcctcatgggcatgtgtgtcaacgagcggcgacgcctcattgtgcctccccacctgggctatgggagcatcggcctggcggggctcattccaccggatgccaccctctacttcgatgtggttctgctggatgtgtggaacaaggaagacaccgtgcaggtgagcacattgctgcgcccgccccactgcccccgcatggtccaggacggcgactttgtccgctaccactacaatggcaccctgctggacggcacctccttcgacaccagctacagtaagggcggcacttatgacacctacgtcggctctggttggctgatcaagggcatggaccaggggctgctgggcatgtgtcctggagagagaaggaagattatcatccctccattcctggcctatggcgagaaaggctatgggacagtgatccccccacaggcctcgctggtctttcacgtcctcctgattgacgtgcacaacccgaaggacgctgtccagctagagacgctggagctcccccccggctgtgtccgcagagccggggccggggacttcatgcgctaccactacaatggctccttgatggacggcaccctcttcgattccagctactcccgcaaccacacctacaatacctatatcgggcagggttacatcatccccgggatggaccaggggctgcagggtgcctgcatgggggaacgccggagaattaccatccccccgcacctcgcctatggggagaatggaactggagacaagatccctggctctgccgtgctaatcttcaacgtccatgtcattgacttccacaaccctgcggatgtggtggaaatcaggacactgtcccggccatctgagacctgcaatgagaccaccaagcttggggactttgttcgataccattacaactgttctttgctggacggcacccagctgttcacctcgcatgactacggggccccccaggaggcgactctcggggccaacaaggtgatcgaaggcctggacacgggcctgcagggcatgtgtgtgggagagaggcggcagctcatcgtgcccccgcacctggcccacggggagagtggagcccggggagtcccaggcagtgctgtgctgctgtttgaggtggagctggtgtcccgggaggatgggctgcccacaggctacctgtttgtgtggcacaaggaccctcctgccaacctgtttgaagacatggacctcaacaaggatggcgaggtccctccggaggagttctccaccttcatcaaggctcaagtgagtgagggcaaaggacgcctcatgcctgggcaggaccctgagaaaaccataggagacatgttccagaaccaggaccgcaaccaggacggcaagatcacagtcgacgagctcaagctgaagtcagatgaggacgaggagcgggtccacgaggagctctgaggggcagggagcctggccaggcctgagacacagaggcccactgcgagggggacagtggcggtgggactgacctgctgacagtcaccctccctctgctgggatgaggtccaggagccaactaaaacaatggcagaggagacatctctggtgttcccaccaccctagatgaaaatccacagcacagacctctaccgtgtttctcttccatccctaaaccacttccttaaaatgtttggatttgcaaagccaatttggggcctgtggagcctggggttggatagggccatggctggtcccccaccatacctcccctccacatcactgacacagctgagcttgttatccatctccccaaactttctctttctttgtacttcttgtcatccccactcccagcccctattcctctatgtgacagctggctaggacccctctgccttcctccccaatcctgactggctcctagggaaggggaaggctcctggagggcagccctacctctcccatgccctttgccctcctccctcgcctccagtggaggctgagctgaccctgggctgctggaggccagactgggctgtagttagcttttcatccctaaagaaggctttccctaaggaaccatagaagagaggaagaaaacaaagggcatgtgtgagggaagctgcttgggtgggtgttagggctatgaaatcttggatttggggctgaggggtgggagggagggcagagctctgcacactcaaaggctaaactggtgtcagtccttttttcctttgttccaaataaaagattaaaccaa

SEQ ID NO: 423745 - DNA, 2820 bp, Homo sapiens
gagccagttctgggaggcggggggaaggaggttggtggcgactccctcgctcgccctcactgccggcggtcccaactccaggcaccatgttccccgcgggcccccccagccacagcctcctccggctccccctgctgcagttgctgctactggtggtgcaggccgtggggagggggctgggccgcgccagcccggccgggggccccctggaagatgtggtcatcgagaggtaccacatccccagggcctgtccccgggaagtgcagatgggggattttgtgcgctaccactacaacggcacttttgaagatggcaagaagtttgattcaagctatgatcgcaacaccttggtggccatcgtggtgggtgtggggcgcctcatcactggcatggaccgaggcctcatgggcatgtgtgtcaacgagcggcgacgcctcattgtgcctccccacctgggctatgggagcatcggcctggcggggctcattccaccggatgccaccctctacttcgatgtggttctgctggatgtgtggaacaaggaagacaccgtgcaggtgagcacattgctgcgcccgccccactgcccccgcatggtccaggacggcgactttgtccgctaccactacaatggcaccctgctggacggcacctccttcgacaccagctacagtaagggcggcacttatgacacctacgtcggctctggttggctgatcaagggcatggaccaggggctgctgggcatgtgtcctggagagagaaggaagattatcatccctccattcctggcctatggcgagaaaggctatgggacagtgatccccccacaggcctcgctggtctttcacgtcctcctgattgacgtgcacaacccgaaggacgctgtccagctagagacgctggagctcccccccggctgtgtccgcagagccggggccggggacttcatgcgctaccactacaatggctccttgatggacggcaccctcttcgattccagctactcccgcaaccacacctacaatacctatatcgggcagggttacatcatccccgggatggaccaggggctgcagggtgcctgcatgggggaacgccggagaattaccatccccccgcacctcgcctatggggagaatggaactgactccatcggtttcctccagggcagcgccccacttcgccccttccgcagtggagaagggcagccaagtttggggagggagggtggttatggaaaaacagaaccagcatacccccaggacccagctgtgctgggagcctcagtgtcctcacctgtcaagtgggcaagccatgctgatccgcagggagacaagatccctggctctgccgtgctaatcttcaacgtccatgtcattgacttccacaaccctgcggatgtggtggaaatcaggacactgtcccggccatctgagacctgcaatgagaccaccaagcttggggactttgttcgataccattacaactgttctttgctggacggcacccagctgttcacctcgcatgactacggggccccccaggaggcgactctcggggccaacaaggtgatcgaaggcctggacacgggcctgcagggcatgtgtgtgggagagaggcggcagctcatcgtgcccccgcacctggcccacggggagagtggagcccggggagtcccaggcagtgctgtgctgctgtttgaggtggagctggtgtcccgggaggatgggctgcccacaggctacctgtttgtgtggcacaaggaccctcctgccaacctgtttgaagacatggacctcaacaaggatggcgaggtccctccggaggagttctccaccttcatcaaggctcaagtgagtgagggcaaaggacgcctcatgcctgggcaggaccctgagaaaaccataggagacatgttccagaaccaggaccgcaaccaggacggcaagatcacagtcgacgagctcaagctgaagtcagatgaggacgaggagcgggtccacgaggagctctgaggggcagggagcctggccaggcctgagacacagaggcccactgcgagggggacagtggcggtgggactgacctgctgacagtcaccctccctctgctgggatgaggtccaggagccaactaaaacaatggcagaggagacatctctggtgttcccaccaccctagatgaaaatccacagcacagacctctaccgtgtttctcttccatccctaaaccacttccttaaaatgtttggatttgcaaagccaatttggggcctgtggagcctggggttggatagggccatggctggtcccccaccatacctcccctccacatcactgacacagctgagcttgttatccatctccccaaactttctctttctttgtacttcttgtcatccccactcccagcccctattcctctatgtgacagctggctaggacccctctgccttcctccccaatcctgactggctcctagggaaggggaaggctcctggagggcagccctacctctcccatgccctttgccctcctccctcgcctccagtggaggctgagctgaccctgggctgctggaggccagactgggctgtagttagcttttcatccctaaagaaggctttccctaaggaaccatagaagagaggaagaaaacaaagggcatgtgtgagggaagctgcttgggtgggtgttagggctatgaaatcttggatttggggctgaggggtgggagggagggcagagctctgcacactcaaaggctaaactggtgtcagtccttttttcctttgttccaaataaaagattaaaccaa

SEQ ID NO: 423746 - DNA, 2303 bp, Homo sapiens
ccggtgtttatcgatgccacgtctgatctgaggtcgcgggcgcctcatcactggcatggaccgaggcctcatgggcatgtgtgtcaacgagcggcgacgcctcattgtgcctccccacctgggctatgggagcatcggcctggcggggctcattccaccggatgccaccctctacttcgatgtggttctgctggatgtgtggaacaaggaagacaccgtgcaggtgagcacattgctgcgcccgccccactgcccccgcatggtccaggacggcgactttgtccgctaccactacaatggcaccctgctggacggcacctccttcgacaccagctacagtaagggcggcacttatgacacctacgtcggctctggttggctgatcaagggcatggaccaggggctgctgggcatgtgtcctggagagagaaggaagattatcatccctccattcctggcctatggcgagaaaggctatgggacagtgatccccccacaggcctcgctggtctttcacgtcctcctgattgacgtgcacaacccgaaggacgctgtccagctagagacgctggagctcccccccggctgtgtccgcagagccggggccggggacttcatgcgctaccactacaatggctccttgatggacggcaccctcttcgattccagctactcccgcaaccacacctacaatacctatatcgggcagggttacatcatccccgggatggaccaggggctgcagggtgcctgcatgggggaacgccggagaattaccatccccccgcacctcgcctatggggagaatggaactggagacaagatccctggctctgccgtgctaatcttcaacgtccatgtcattgacttccacaaccctgcggatgtggtggaaatcaggacactgtcccggccatctgagacctgcaatgagaccaccaagcttggggactttgttcgataccattacaactgttctttgctggacggcacccagctgttcacctcgcatgactacggggccccccaggaggcgactctcggggccaacaaggtgatcgaaggcctggacacgggcctgcagggcatgtgtgtgggagagaggcggcagctcatcgtgcccccgcacctggcccacggggagagtggagcccggggagtcccaggcagtgctgtgctgctgtttgaggtggagctggtgtcccgggaggatgggctgcccacaggctacctgtttgtgtggcacaaggaccctcctgccaacctgtttgaagacatggacctcaacaaggatggcgaggtccctccggaggagttctccaccttcatcaaggctcaagtgagtgagggcaaaggacgcctcatgcctgggcaggaccctgagaaaaccataggagacatgttccagaaccaggaccgcaaccaggacggcaagatcacagtcgacgagctcaagctgaagtcagatgaggacgaggagcgggtccacgaggagctctgaggggcagggagcctggccaggcctgagacacagaggcccactgcgagggggacagtggcggtgggactgacctgctgacagtcaccctccctctgctgggatgaggtccaggagccaactaaaacaatggcagaggagacatctctggtgttcccaccaccctagatgaaaatccacagcacagacctctaccgtgtttctcttccatccctaaaccacttccttaaaatgtttggatttgcaaagccaatttggggcctgtggagcctggggttggatagggccatggctggtcccccaccatacctcccctccacatcactgacacagctgagcttgttatccatctccccaaactttctctttctttgtacttcttgtcatccccactcccagcccctattcctctatgtgacagctggctaggacccctctgccttcctccccaatcctgactggctcctagggaaggggaaggctcctggagggcagccctacctctcccatgccctttgccctcctccctcgcctccagtggaggctgagctgaccctgggctgctggaggccagactgggctgtagttagcttttcatccctaaagaaggctttccctaaggaaccatagaagagaggaagaaaacaaagggcatgtgtgagggaagctgcttgggtgggtgttagggctatgaaatcttggatttggggctgaggggtgggagggagggcagagctctgcacactcaaaggctaaactggtgtcagtccttttttcctttgttccaaataaaagattaaaccaa

SEQ ID NO: 423747 - DNA, 3065 bp, Homo sapiens
gagccagttctgggaggcggggggaaggaggttggtggcgactccctcgctcgccctcactgccggcggtcccaactccaggcaccatgttccccgcgggcccccccagccacagcctcctccggctccccctgctgcagttgctgctactggtggtgcaggccgtggggagggggctgggccgcgccagcccggccgggggccccctggaagatgtggtcatcgagaggtaccacatccccagggcctgtccccgggaagtgcagatgggggattttgtgcgctaccactacaacggcacttttgaagatggcaagaagtttgattcaagctatgatcgcaacaccttggtggccatcgtggtgggtgtggggcgcctcatcactggcatggaccgaggcctcatgggcatgtgtgtcaacgagcggcgacgcctcattgtgcctccccacctgggctatgggagcatcggcctggcggggctcattccaccggatgccaccctctacttcgatgtggttctgctggatgtgtggaacaaggaagacaccgtgcaggtgagcacattgctgcgcccgccccactgcccccgcatggtccaggacggcgactttgtccgctaccactacaatggcaccctgctggacggcacctccttcgacaccagctacagtaagggcggcacttatgacacctacgtcggctctggttggctgatcaagggcatggaccaggggctgctgggcatgtgtcctggagagagaaggaagattatcatccctccattcctggcctatggcgagaaaggctatgggacagtgatccccccacaggcctcgctggtctttcacgtcctcctgattgacgtgcacaacccgaaggacgctgtccagctagagacgctggagctcccccccggctgtgtccgcagagccggggccggggacttcatgcgctaccactacaatggctccttgatggacggcaccctcttcgattccagctactcccgcaaccacacctacaatacctatatcgggcagggttacatcatccccgggatggaccaggggctgcagggtgcctgcatgggggaacgccggagaattaccatccccccgcacctcgcctatggggagaatggaactgactccatcggtttcctccagggcagcgccccacttcgccccttccgcagtggagaagggcagccaagtttggggagggagggtggttatggaaaaacagaaccagcatacccccaggacccagctgtgctgggagcctcagtgtcctcacctgtcaagtgggcaagccatgctgatccgcagggtaagttactgggagtttgcaagacggtgagtggaaaagggctttcttactggaaagctgccttcccctgccccctgccccagtgaaagtttgttagaattgactctggacaaacatcccgtcccatcctcctttggatcctcagggtcgggaaggggtatcaggtctggggacctccatggagagacctcaagtagcctctcctagtgctctgagctgaccacactcccccattctggcctcaggagacaagatccctggctctgccgtgctaatcttcaacgtccatgtcattgacttccacaaccctgcggatgtggtggaaatcaggacactgtcccggccatctgagacctgcaatgagaccaccaagcttggggactttgttcgataccattacaactgttctttgctggacggcacccagctgttcacctcgcatgactacggggccccccaggaggcgactctcggggccaacaaggtgatcgaaggcctggacacgggcctgcagggcatgtgtgtgggagagaggcggcagctcatcgtgcccccgcacctggcccacggggagagtggagcccggggagtcccaggcagtgctgtgctgctgtttgaggtggagctggtgtcccgggaggatgggctgcccacaggctacctgtttgtgtggcacaaggaccctcctgccaacctgtttgaagacatggacctcaacaaggatggcgaggtccctccggaggagttctccaccttcatcaaggctcaagtgagtgagggcaaaggacgcctcatgcctgggcaggaccctgagaaaaccataggagacatgttccagaaccaggaccgcaaccaggacggcaagatcacagtcgacgagctcaagctgaagtcagatgaggacgaggagcgggtccacgaggagctctgaggggcagggagcctggccaggcctgagacacagaggcccactgcgagggggacagtggcggtgggactgacctgctgacagtcaccctccctctgctgggatgaggtccaggagccaactaaaacaatggcagaggagacatctctggtgttcccaccaccctagatgaaaatccacagcacagacctctaccgtgtttctcttccatccctaaaccacttccttaaaatgtttggatttgcaaagccaatttggggcctgtggagcctggggttggatagggccatggctggtcccccaccatacctcccctccacatcactgacacagctgagcttgttatccatctccccaaactttctctttctttgtacttcttgtcatccccactcccagcccctattcctctatgtgacagctggctaggacccctctgccttcctccccaatcctgactggctcctagggaaggggaaggctcctggagggcagccctacctctcccatgccctttgccctcctccctcgcctccagtggaggctgagctgaccctgggctgctggaggccagactgggctgtagttagcttttcatccctaaagaaggctttccctaaggaaccatagaagagaggaagaaaacaaagggcatgtgtgagggaagctgcttgggtgggtgttagggctatgaaatcttggatttggggctgaggggtgggagggagggcagagctctgcacactcaaaggctaaactggtgtcagtccttttttcctttgttccaaataaaagattaaaccaa

SEQ ID NO: 423748 - DNA, 2694 bp, Homo sapiens
gagccagttctgggaggcggggggaaggaggttggtggcgactccctcgctcgccctcactgccggcggtcccaactccaggcaccatgttccccgcgggcccccccagccacagcctcctccggctccccctgctgcagttgctgctactggtggtgcaggccgtggggagggggctgggccgcgccagcccggccgggggccccctggaagatgtggtcatcgagaggtaccacatccccagggcctgtccccgggaagtgcagatgggggattttgtgcgctaccactacaacggcacttttgaagatggcaagaagtttgattcaagctatgatcgcaacaccttggtggccatcgtggtgggtgtggggcgcctcatcactggcatggaccgaggcctcatgggcatgtgtgtcaacgagcggcgacgcctcattgtgcctccccacctgggctatgggagcatcggcctggcggggctcattccaccggatgccaccctctacttcgatgtggttctgctggatgtgtggaacaaggaagacaccgtgcaggtgagcacattgctgcgcccgccccactgcccccgcatggtccaggacggcgactttgtccgctaccactacaatggcaccctgctggacggcacctccttcgacaccagctacagtaagggcggcacttatgacacctacgtcggctctggttggctgatcaagggcatggaccaggggctgctgggcatgtgtcctggagagagaaggaagattatcatccctccattcctggcctatggcgagaaaggctatgggacagtgatccccccacaggcctcgctggtctttcacgtcctcctgattgacgtgcacaacccgaaggacgctgtccagctagagacgctggagctcccccccggctgtgtccgcagagccggggccggggacttcatgcgctaccactacaatggctccttgatggacggcaccctcttcgattccagctactcccgcaaccacacctacaatacctatatcgggcagggttacatcatccccgggatggaccaggggctgcagggtgcctgcatgggggaacgccggagaattaccatccccccgcacctcgcctatggggagaatggaactggagacaagatccctggctctgccgtgctaatcttcaacgtccatgtcattgacttccacaaccctgcggatgtggtggaaatcaggacactgtcccggccatctgagacctgcaatgagaccaccaagcttggggactttgttcgataccattacaactgttctttgctggacggcacccagctgttcacctcaggggaaactgacgcagggagccatgagccctcgaggccacactttagggggcagaggcatgactacggggccccccaggaggcgactctcggggccaacaaggtgatcgaaggcctggacacgggcctgcagggcatgtgtgtgggagagaggcggcagctcatcgtgcccccgcacctggcccacggggagagtggagcccggggagtcccaggcagtgctgtgctgctgtttgaggtggagctggtgtcccgggaggatgggctgcccacaggctacctgtttgtgtggcacaaggaccctcctgccaacctgtttgaagacatggacctcaacaaggatggcgaggtccctccggaggagttctccaccttcatcaaggctcaagtgagtgagggcaaaggacgcctcatgcctgggcaggaccctgagaaaaccataggagacatgttccagaaccaggaccgcaaccaggacggcaagatcacagtcgacgagctcaagctgaagtcagatgaggacgaggagcgggtccacgaggagctctgaggggcagggagcctggccaggcctgagacacagaggcccactgcgagggggacagtggcggtgggactgacctgctgacagtcaccctccctctgctgggatgaggtccaggagccaactaaaacaatggcagaggagacatctctggtgttcccaccaccctagatgaaaatccacagcacagacctctaccgtgtttctcttccatccctaaaccacttccttaaaatgtttggatttgcaaagccaatttggggcctgtggagcctggggttggatagggccatggctggtcccccaccatacctcccctccacatcactgacacagctgagcttgttatccatctccccaaactttctctttctttgtacttcttgtcatccccactcccagcccctattcctctatgtgacagctggctaggacccctctgccttcctccccaatcctgactggctcctagggaaggggaaggctcctggagggcagccctacctctcccatgccctttgccctcctccctcgcctccagtggaggctgagctgaccctgggctgctggaggccagactgggctgtagttagcttttcatccctaaagaaggctttccctaaggaaccatagaagagaggaagaaaacaaagggcatgtgtgagggaagctgcttgggtgggtgttagggctatgaaatcttggatttggggctgaggggtgggagggagggcagagctctgcacactcaaaggctaaactggtgtcagtccttttttcctttgttccaaataaaagattaaaccaa

SEQ ID NO: 423749 - DNA, 1471 bp, Homo sapiens
gagaagggaaccccacgtctgcacagctgggcccctgcactctgctgcgtggcccaagtcaccagtgggagtaactccggaactgagggcttgttctgggcccacctcagagggagaggggtgtgcgctggcaggggacagggtggctgctgacctgggcatctgctctcccccaggcatgactacggggccccccaggaggcgactctcggggccaacaaggtgatcgaaggcctggacacgggcctgcagggcatgtgtgtgggagagaggcggcagctcatcgtgcccccgcacctggcccacggggagagtggagcccggggagtcccaggcagtgctgtgctgctgtttgaggtggagctggtgtcccgggaggatgggctgcccacaggctacctgtttgtgtggcacaaggaccctcctgccaacctgtttgaagacatggacctcaacaaggatggcgaggtccctccggaggagttctccaccttcatcaaggctcaagtgagtgagggcaaaggacgcctcatgcctgggcaggaccctgagaaaaccataggagacatgttccagaaccaggaccgcaaccaggacggcaagatcacagtcgacgagctcaagctgaagtcagatgaggacgaggagcgggtccacgaggagctctgaggggcagggagcctggccaggcctgagacacagaggcccactgcgagggggacagtggcggtgggactgacctgctgacagtcaccctccctctgctgggatgaggtccaggagccaactaaaacaatggcagaggagacatctctggtgttcccaccaccctagatgaaaatccacagcacagacctctaccgtgtttctcttccatccctaaaccacttccttaaaatgtttggatttgcaaagccaatttggggcctgtggagcctggggttggatagggccatggctggtcccccaccatacctcccctccacatcactgacacagctgagcttgttatccatctccccaaactttctctttctttgtacttcttgtcatccccactcccagcccctattcctctatgtgacagctggctaggacccctctgccttcctccccaatcctgactggctcctagggaaggggaaggctcctggagggcagccctacctctcccatgccctttgccctcctccctcgcctccagtggaggctgagctgaccctgggctgctggaggccagactgggctgtagttagcttttcatccctaaagaaggctttccctaaggaaccatagaagagaggaagaaaacaaagggcatgtgtgagggaagctgcttgggtgggtgttagggctatgaaatcttggatttggggctgaggggtgggagggagggcagagctctgcacactcaaaggctaaactggtgtcagtccttttttcctttgttccaaataaaagattaaaccaa

SEQ ID NO: 423750 - DNA, 1295 bp, Homo sapiens
ggactagaagtacaaagaaagagaaagtttggggagatggataacaagctcagctgtgtcagtgatgtggaggggaggcatgtgtgtgggagagaggcggcagctcatcgtgcccccgcacctggcccacggggagagtggagcccggggagtcccaggcagtgctgtgctgctgtttgaggtggagctggtgtcccgggaggatgggctgcccacaggctacctgtttgtgtggcacaaggaccctcctgccaacctgtttgaagacatggacctcaacaaggatggcgaggtccctccggaggagttctccaccttcatcaaggctcaagtgagtgagggcaaaggacgcctcatgcctgggcaggaccctgagaaaaccataggagacatgttccagaaccaggaccgcaaccaggacggcaagatcacagtcgacgagctcaagctgaagtcagatgaggacgaggagcgggtccacgaggagctctgaggggcagggagcctggccaggcctgagacacagaggcccactgcgagggggacagtggcggtgggactgacctgctgacagtcaccctccctctgctgggatgaggtccaggagccaactaaaacaatggcagaggagacatctctggtgttcccaccaccctagatgaaaatccacagcacagacctctaccgtgtttctcttccatccctaaaccacttccttaaaatgtttggatttgcaaagccaatttggggcctgtggagcctggggttggatagggccatggctggtcccccaccatacctcccctccacatcactgacacagctgagcttgttatccatctccccaaactttctctttctttgtacttcttgtcatccccactcccagcccctattcctctatgtgacagctggctaggacccctctgccttcctccccaatcctgactggctcctagggaaggggaaggctcctggagggcagccctacctctcccatgccctttgccctcctccctcgcctccagtggaggctgagctgaccctgggctgctggaggccagactgggctgtagttagcttttcatccctaaagaaggctttccctaaggaaccatagaagagaggaagaaaacaaagggcatgtgtgagggaagctgcttgggtgggtgttagggctatgaaatcttggatttggggctgaggggtgggagggagggcagagctctgcacactcaaaggctaaactggtgtcagtccttttttcctttgttccaaataaaagattaaaccaa

SEQ ID NO: 423751 - DNA, 2531 bp, Homo sapiens
gagccagttctgggaggcggggggaaggaggttggtggcgactccctcgctcgccctcactgccggcggtcccaactccaggcaccatgttccccgcgggcccccccagccacagcctcctccggctccccctgctgcagttgctgctactggtggtgcaggccgtggggagggggctgggccgcgccagcccggccgggggccccctggaagatgtggtcatcgagaggtaccacatccccagggcctgtccccgggaagtgcagatgggggattttgtgcgctaccactacaacggcacttttgaagatggcaagaagtttgattcaagctatgatcgcaacaccttggtggccatcgtggtgggtgtggggcgcctcatcactggcatggaccgaggcctcatgggcatgtgtgtcaacgagcggcgacgcctcattgtgcctccccacctgggctatgggagcatcggcctggcggggctcattccaccggatgccaccctctacttcgatgtggttctgctggatgtgtggaacaaggaagacaccgtgcaggtgagcacattgctgcgcccgccccactgcccccgcatggtccaggacggcgactttgtccgctaccactacaatggcaccctgctggacggcacctccttcgacaccagctacagtaagggcggcacttatgacacctacgtcggctctggttggctgatcaagggcatggaccaggggctgctgggcatgtgtcctggagagagaaggaagattatcatccctccattcctggcctatggcgagaaaggctatgggacagtgatccccccacaggcctcgctggtctttcacgtcctcctgattgacgtgcacaacccgaaggacgctgtccagctagagacgctggagctcccccccggctgtgtccgcagagccggggccggggacttcatgcgctaccactacaatggctccttgatggacggcaccctcttcgattccagctactcccgcaaccacacctacaatacctatatcgggcagggttacatcatccccgggatggaccaggggctgcagggtgcctgcatgggggaacgccggagaattaccatccccccgcacctcgcctatggggagaatggaactggagacaagatccctggctctgccgtgctaatcttcaacgtccatgtcattgacttccacaaccctgcggatgtggtggaaatcaggacactgtcccggccatctgagacctgcaatgagaccaccaagcttggggactttgttcgataccattacaactgttctttgctggacggcacccagctgttcacctcgcatgactacggggccccccaggaggcgactctcggggccaacaaggtgatcgaaggcctggacacgggcctgcagggcatgtgtgtgggagagaggcggcagctcatcgtgcccccgcacctggcccacggggagagtggagcccggggagtcccaggcagtgctgtgctgctgtttgaggtggagctggtgtcccgggaggatgggctgcccacaggctacctgtttgtgtggcacaaggaccctcctgccaacctgtttgaagacatggacctcaacaaggatggcgaggtccctccggaggagttctccaccttcatcaaggctcaagtgagtgagggcaaaggacgcctcatgcctgggcaggaccctgagaaaaccataggagacatgttccagaaccaggaccgcaaccaggacggcaagatcacagtcgacgagctcaagctgaagtcagatgaggacgaggagcgggtccacgaggagctctggtccaggagccaactaaaacaatggcagaggagacatctctggtgttcccaccaccctagatgaaaatccacagcacagacctctaccgtgtttctcttccatccctaaaccacttccttaaaatgtttggatttgcaaagccaatttggggcctgtggagcctggggttggatagggccatggctggtcccccaccatacctcccctccacatcactgacacagctgagcttgttatccatctccccaaactttctctttctttgtacttcttgtcatccccactcccagcccctattcctctatgtgacagctggctaggacccctctgccttcctccccaatcctgactggctcctagggaaggggaaggctcctggagggcagccctacctctcccatgccctttgccctcctccctcgcctccagtggaggctgagctgaccctgggctgctggaggccagactgggctgtagttagcttttcatccctaaagaaggctttccctaaggaaccatagaagagaggaagaaaacaaagggcatgtgtgagggaagctgcttgggtgggtgttagggctatgaaatcttggatttggggctgaggggtgggagggagggcagagctctgcacactcaaaggctaaactggtgtcagtccttttttcctttgttccaaataaaagattaaaccaa

SEQ ID NO: 423752 - DNA, 2861 bp, Homo sapiens
gagccagttctgggaggcggggggaaggaggttggtggcgactccctcgctcgccctcactgccggcggtcccaactccaggcaccatgttccccgcgggcccccccagccacagcctcctccggctccccctgctgcagttgctgctactggtggtgcaggccgtggggagggggctgggccgcgccagcccggccgggggccccctggaagatgtggtcatcgagaggtaccacatccccagggcctgtccccgggaagtgcagatgggggattttgtgcgctaccactacaacggcacttttgaagatggcaagaagtttgattcaagctatgatcgcaacaccttggtggccatcgtggtgggtgtggggcgcctcatcactggcatggaccgaggcctcatgggcatgtgtgtcaacgagcggcgacgcctcattgtgcctccccacctgggctatgggagcatcggcctggcggggctcattccaccggatgccaccctctacttcgatgtggttctgctggatgtgtggaacaaggaagacaccgtgcaggtgagcacattgctgcgcccgccccactgcccccgcatggtccaggacggcgactttgtccgctaccactacaatggcaccctgctggacggcacctccttcgacaccagctacagtaagggcggcacttatgacacctacgtcggctctggttggctgatcaagggcatggaccaggggctgctgggcatgtgtcctggagagagaaggaagattatcatccctccattcctggcctatggcgagaaaggctatgggacagtgatccccccacaggcctcgctggtctttcacgtcctcctgattgacgtgcacaacccgaaggacgctgtccagctagagacgctggagctcccccccggctgtgtccgcagagccggggccggggacttcatgcgctaccactacaatggctccttgatggacggcaccctcttcgattccagctactcccgcaaccacacctacaatacctatatcgggcagggttacatcatccccgggatggaccaggggctgcagggtgcctgcatgggggaacgccggagaattaccatccccccgcacctcgcctatggggagaatggaactggagacaagatccctggctctgccgtgctaatcttcaacgtccatgtcattgacttccacaaccctgcggatgtggtggaaatcaggacactgtcccggccatctgagacctgcaatgagaccaccaagcttggggactttgttcgataccattacaactgttctttgctggacggcacccagctgttcacctcgcatgactacggggccccccaggaggcgactctcggggccaacaaggtgatcgaaggcctggacacgggcctgcagggcatgtgtgtgggagagaggcggcagctcatcgtgcccccgcacctggcccacggggagagtggagcccggggagtcccaggcagtgctgtgctgctgtttgaggtggagctggtgtcccgggaggatgggctgcccacaggctacctgtttgtgtggcacaaggaccctcctgccaacctgtttgaagacatggacctcaacaaggatggcgaggtccctccggaggagttctccaccttcatcaaggctcaagtgagtgagggcaaaggacgcctcatgcctgggcaggaccctgagaaaaccataggagacatgttccagaaccaggaccgcaaccaggacggcaagatcacagtcgacgagctcaagctgaagtcagatgaggacgaggagcgggtccacgaggagctctgaggggcagggagcctggccaggcctgagacacagaggcccactgcgagggggacagtggcggtgggactgacctgctgacagtcaccctccctctgctgggatgaggtccaggagccaactaaaacaatggcagaggagacatctctggtgttcccaccaccctagatgaaaatccacagcacagacctctaccgtgtttctcttccatccctaaaccacttccttaaaatgtttggatttgcaaagccaatttggggcctgtggagcctggggttggatagggccatggctggtcccccaccatacctcccctccacatcactgacacagctgagcttgttatccatctccccaaactttctctttctttgtacttcttgtcatccccactcccagcccctattcctctatgtgacagctggctaggacccctctgccttcctccccaatcctgactggctcctagggaaggggaaggctcctggagggcagccctacctctcccatgccctttgccctcctccctcgcctccagtggaggctgagctgaccctgggctgctggaggccagactgggctgtagttagcttttcatccctaaagaaggctttccctaaggaaccatagaagagaggaagaaaacaaagggcatgtgtgagggaagctgcttgggtgggtgttagggctatgaaatcttggatttggggctgaggggtgggagggagggcagagctctgcacactcaaaggctaaactggtgtcagtccttttttcctttgttccaaataaaagattaaaccaaaaaccagaaaccagggaacgaaaagaaaaactgtggtgggcgaggcaggccctggaaaggctttcaaacccatccggtgggcgcccggcccagtggggttacgggaccggtgcccaagggtgcccagagaaccgcgcaggcagggtgggtctcccaataaaagccggggaccgcggcggaaaaccaggctcgaggcaacgcctcacaggcaggcgatagccgcg

SEQ ID NO: 423753 - DNA, 2393 bp, Homo sapiens
gagccagttctgggaggcggggggaaggaggttggtggcgactccctcgctcgccctcactgccggcggtcccaactccaggcaccatgttccccgcgggcccccccagccacagcctcctccggctccccctgctgcagttgctgctactggtggtgcaggccgtggggagggggctgggccgcgccagcccggccgggggccccctggaagatgtggtcatcgagaggtaccacatccccagggcctgtccccgggaagtgcagatgggggattttgtgcgctaccactacaacggcacttttgaagatggcaagaagtttgattcaagctatgatcgcaacaccttggtggccatcgtggtgggtgtggggcgcctcatcactggcatggaccgaggcctcatgggcatgtgtgtcaacgagcggcgacgcctcattgtgcctccccacctgggctatgggagcatcggcctggcggggctcattccaccggatgccaccctctacttcgatgtggttctgctggatgtgtggaacaaggaagacaccgtgcaggtgagcacattgctgcgcccgccccactgcccccgcatggtccaggacggcgactttgtccgctaccactacaatggcaccctgctggacggcacctccttcgacaccagctacagtaagggcggcacttatgacacctacgtcggctctggttggctgatcaagggcatggaccaggggctgctgggcatgtgtcctggagagagaaggaagattatcatccctccattcctggcctatggcgagaaaggctatgggacagtgatccccccacaggcctcgctggtctttcacgtcctcctgattgacgtgcacaacccgaaggacgctgtccagctagagacgctggagctcccccccggctgtgtccgcagagccggggccggggacttcatgcgctaccactacaatggctccttgatggacggcaccctcttcgattccagctactcccgcaaccacacctacaatacctatatcgggcagggttacatcatccccgggatggaccaggggctgcagggtgcctgcatgggggaacgccggagaattaccatccccccgcacctcgcctatggggagaatggaactggagacaagatccctggctctgccgtgctaatcttcaacgtccatgtcattgacttccacaaccctgcggatgtggtggaaatcaggacactgtcccggccatctgagacctgcaatgagaccaccaagcttggggactttgttcgataccattacaactgttctttgctggacggcacccagctgttcacctcgcatgactacggggccccccaggaggcgactctcggggccaacaaggtgatcgaaggcctggacacgggcctgcagggcatgtgtgtgggagagaggcggcagctcatcgtgcccccgcacctggcccacggggagagtggagcccggggagtcccaggcagtgctgtgctgctgtttgaggtggagctggtgtcccgggaggatgggctgcccacaggctacctgtttgtgtggcacaaggaccctcctgccaacctgtttgaagacatggacctcaacaaggatggcgaggtccctccggaggagttctccaccttcatcaaggctcaagtgagtgagggcaaaggacgcctcatgcctgggcaggaccctgagaaaaccataggagacatgttccagaaccaggaccgcaaccaggacggcaagatcacagtcgacgagctcaagctgaagtcagatgaggacgaggagcgggtccacgaggagctctgaggggcagggagcctggccaggcctgagacacagaggcccactgcgagggggacagtggcggtgggactgacctgctgacagtcaccctccctctgctgggatgaggtccaggagccaactaaaacaatggcagaggagacatctctggtgttcccaccaccctagatgaaaatccacagcacagacctctaccgtgtttctcttccatccctaaaccacttccttaaaatgtttggatttgcaaagccaatttggggcctgtggagcctggggttggatagggccatggctggtcccccaccatacctcccctccacatcactgacacagctgagcttgttatccatctccccaaactttctctttctttgtacttcttgtcatccccactcccagcccctattcctctattgagggaagctgcttgggtgggtgttagggctatgaaatcttggatttggggctgaggggtgggagggagggcagagctctgcacactcaaaggctaaactggtgtcagtccttttttcctttgttccaaataaaagattaaaccaa

SEQ ID NO: 423754 - DNA, 1981 bp, Homo sapiens
gagccagttctgggaggcggggggaaggaggttggtggcgactccctcgctcgccctcactgccggcggtcccaactccaggcaccatgttccccgcgggcccccccagccacagcctcctccggctccccctgctgcagttgctgctactggtggtgcaggccgtggggagggggctgggccgcgccagcccggccgggggccccctggaagatgtggtcatcgagaggtaccacatccccagggcctgtccccgggaagtgcagatgggggattttgtgcgctaccactacaacggcacttttgaagatggcaagaagtttgattcaagctatgatcgcaacaccttggtggccatcgtggtgggtgtggggcgcctcatcactggcatggaccgaggcctcatgggcatgtgtgtcaacgagcggcgacgcctcattgtgcctccccacctgggctatgggagcatcggcctggcggggctcattccaccggatgccaccctctacttcgatgtggttctgctggatgtgtggaacaaggaagacaccgtgcaggtgagcacattgctgcgcccgccccactgcccccgcatggtccaggacggcgactttgtccgctaccactacaatggcaccctgctggacggcacctccttcgacaccagctacagtaagggcggcacttatgacacctacgtcggctctggttggctgatcaagggcatggaccaggggctgctgggcatgtgtcctggagagagaaggaagattatcatccctccattcctggcctatggcgagaaaggctatgggacagtgatccccccacaggcctcgctggtctttcacgtcctcctgattgacgtgcacaacccgaaggacgctgtccagctagagacgctggagctcccccccggctgtgtccgcagagccggggccggggacttcatgcgctaccactacaatggctccttgatggacggcaccctcttcgattccagctactcccgcaaccacacctacaatacctatatcgggcagggttacatcatccccgggatggaccaggggctgcagggtgcctgcatgggggaacgccggagaattaccatccccccgcacctcgcctatggggagaatggaactggagacaagatccctggctctgccgtgctaatcttcaacgtccatgtcattgacttccacaaccctgcggatgtggtggaaatcaggacactgtcccggccatctgagacctgcaatgagaccaccaagcttggggactttgttcgataccattacaactgttctttgctggacggcacccagctgttcacctcgcatgactacggggccccccaggaggcgactctcggggccaacaaggtgatcgaaggcctggacacgggcctgcagggcatgtgtgtgggagagaggcggcagctcatcgtgcccccgcacctggcccacggggagagtggagcccggggagtcccaggcagtgctgtgctgctgtttgaggtggagctggtgtcccgggaggatgggctgcccacaggctacctgtttgtgtggcacaaggaccctcctgccaacctgtttgaagacatggacctcaacaaggatggcgaggtccctccggaggagttctccaccttcatcaaggctcaagtgagtgagggcaaaggacgcctcatgcctgggcaggaccctgagaaaaccataggagacatgttccagaaccaggaccgcaaccaggacggcaagatcacagtcgacgagctcaagctgaagtcagatgaggacgaggagcgggtccacgaggagctctgtgagggaagctgcttgggtgggtgttagggctatgaaatcttggatttggggctgaggggtgggagggagggcagagctctgcacactcaaaggctaaactggtgtcagtccttttttcctttgttccaaataaaagattaaaccaa

SEQ ID NO: 423755 - DNA, 1903 bp, Homo sapiens
gagccagttctgggaggcggggggaaggaggttggtggcgactccctcgctcgccctcactgccggcggtcccaactccaggcaccatgttccccgcgggcccccccagccacagcctcctccggctccccctgctgcagttgctgctactggtggtgcaggccgtggggagggggctgggccgcgccagcccggccgggggccccctggaagatgtggtcatcgagaggtaccacatccccagggcctgtccccgggaagtgcagatgggggattttgtgcgctaccactacaacggcacttttgaagatggcaagaagtttgattcaagctatgatcgcaacaccttggtggccatcgtggtgggtgtggggcgcctcatcactggcatggaccgaggcctcatgggcatgtgtgtcaacgagcggcgacgcctcattgtgcctccccacctgggctatgggagcatcggcctggcggggctcattccaccggatgccaccctctacttcgatgtggttctgctggatgtgtggaacaaggaagacaccgtgcaggtgagcacattgctgcgcccgccccactgcccccgcatggtccaggacggcgactttgtccgctaccactacaatggcaccctgctggacggcacctccttcgacaccagctacagtaagggcggcacttatgacacctacgtcggctctggttggctgatcaagggcatggaccaggggctgctgggcatgtgtcctggagagagaaggaagattatcatccctccattcctggcctatggcgagaaaggctatgggacagtgatccccccacaggcctcgctggtctttcacgtcctcctgattgacgtgcacaacccgaaggacgctgtccagctagagacgctggagctcccccccggctgtgtccgcagagccggggccggggacttcatgcgctaccactacaatggctccttgatggacggcaccctcttcgattccagctactcccgcaaccacacctacaatacctatatcgggcagggttacatcatccccgggatggaccaggggctgcagggtgcctgcatgggggaacgccggagaattaccatccccccgcacctcgcctatggggagaatggaactggagacaagatccctggctctgccgtgctaatcttcaacgtccatgtcattgacttccacaaccctgcggatgtggtggaaatcaggacactgtcccggccatctgagacctgcaatgagaccaccaagcttggggactttgttcgataccattacaactgttctttgctggacggcacccagctgttcacctcgcatgactacggggccccccaggaggcgactctcggggccaacaaggtgatcgaaggcctggacacgggcctgcagggcatgtgtgtgggagagaggcggcagctcatcgtgcccccgcacctggcccacggggagagtggagcccggggagtcccaggcagtgctgtgctgctgtttgaggtggagctggtgtcccgggaggatgggctgcccacaggctacctgtttgtgtggcacaaggaccctcctgccaacctgtttgaagacatggacctcaacaaggatggcgaggtccctccggaggagttctccaccttcatcaaggctcaagtgagtgagggcaaaggacgcctcatgcctgggcaggaccctgagaaaaccatagaagagaggaagaaaacaaagggcatgtgtgagggaagctgcttgggtgggtgttagggctatgaaatcttggatttggggctgaggggtgggagggagggcagagctctgcacactcaaaggctaaactggtgtcagtccttttttcctttgttccaaataaaagattaaaccaa

SEQ ID NO: 423756 - DNA, 1831 bp, Homo sapiens
gagccagttctgggaggcggggggaaggaggttggtggcgactccctcgctcgccctcactgccggcggtcccaactccaggcaccatgttccccgcgggcccccccagccacagcctcctccggctccccctgctgcagttgctgctactggtggtgcaggccgtggggagggggctgggccgcgccagcccggccgggggccccctggaagatgtggtcatcgagaggtaccacatccccagggcctgtccccgggaagtgcagatgggggattttgtgcgctaccactacaacggcacttttgaagatggcaagaagtttgattcaagctatgatcgcaacaccttggtggccatcgtggtgggtgtggggcgcctcatcactggcatggaccgaggcctcatgggcatgtgtgtcaacgagcggcgacgcctcattgtgcctccccacctgggctatgggagcatcggcctggcggggctcattccaccggatgccaccctctacttcgatgtggttctgctggatgtgtggaacaaggaagacaccgtgcaggtgagcacattgctgcgcccgccccactgcccccgcatggtccaggacggcgactttgtccgctaccactacaatggcaccctgctggacggcacctccttcgacaccagctacagtaagggcggcacttatgacacctacgtcggctctggttggctgatcaagggcatggaccaggggctgctgggcatgtgtcctggagagagaaggaagattatcatccctccattcctggcctatggcgagaaaggctatgggacagtgatccccccacaggcctcgctggtctttcacgtcctcctgattgacgtgcacaacccgaaggacgctgtccagctagagacgctggagctcccccccggctgtgtccgcagagccggggccggggacttcatgcgctaccactacaatggctccttgatggacggcaccctcttcgattccagctactcccgcaaccacacctacaatacctatatcgggcagggttacatcatccccgggatggaccaggggctgcagggtgcctgcatgggggaacgccggagaattaccatccccccgcacctcgcctatggggagaatggaactgactccatcggtttcctccagggcagcgccccacttcgccccttccgcagtggagaagggcagccaagtttggggagggagggtggttatggaaaaacagaaccagcatacccccaggacccagctgtgctgggagcctcagtgtcctcacctgtcaagtgggcaagccatgctgatccgcagggtaagttactgggagtttgcaagacggtgagtggaaaagggctttcttactggaaagctgccttcccctgccccctgccccagtgaaagtttgttagaattgactctggacaaacatcccgtcccatcctcctttggatcctcagggtcgggaaggggtatcaggtctggggacctccatggagagacctcaagtagcctctcctagtgctctgagctgaccacactcccccattctggcctcaggagacaagatccctggctctgccgtgctaatcttcaacgtccatgtcattgacttccacaaccctgcggatgtggtggaaatcaggacactgtcccggccatctgagacctgcaatgagaccaccaagcttggggactttgttcgataccattacaactgttctttgctggacggcacccagctgttcacctcgtgggtccgggggggggccgggactgggcaggtgggtgggcacaggcatggggagtcctcc

SEQ ID NO: 423757 - DNA, 384 bp, Homo sapiens
tccctgctttttcctgggcacacatgcaggctgttccctacctgagaccagtcacagactatccccatgccacgcctccaccccagcccccaccaggaccccagcaccagtgcctttcccagcccttcctgagttacagggtgcgggggagcctgggaaaaaagaagaaaaagaaagcactcactggcctccacccggggcccctgcccctcccaaggccatgaccctcactgcccgctcccccggctctcccctgccccagttctccaccttcatcaaggctcaagtgagtgagggcaaaggacgcctcatgcctgggcaggaccctgagaaaaccataggagacatgttccagaaccaggaccgcaaccaggacggcaagat

SEQ ID NO: 423758 - DNA, 1250 bp, Homo sapiens
gagccagttctgggaggcggggggaaggaggttggtggcgactccctcgctcgccctcactgccggcggtcccaactccaggcaccatgttccccgcgggcccccccagccacagcctcctccggctccccctgctgcagttgctgctactggtggtgcaggccgtggggagggggctgggccgcgccagcccggccgggggccccctggaagatgtggtcatcgagaggtaccacatccccagggcctgtccccgggaagtgcagatgggggattttgtgcgctaccactacaacggcacttttgaagatggcaagaagtttgattcaagctatgatcgcaacaccttggtggccatcgtggtgggtgtggggcgcctcatcactggcatggaccgaggcctcatgggcatgtgtgtcaacgagcggcgacgcctcattgtgcctccccacctgggctatgggagcatcggcctggcggggctcattccaccggatgccaccctctacttcgatgtggttctgctggatgtgtggaacaaggaagacaccgtgcaggtgagcacattgctgcgcccgccccactgcccccgcatggtccaggacggcgactttgtccgctaccactacaatggcaccctgctggacggcacctccttcgacaccagctacagtaagggcggcacttatgacacctacgtcggctctggttggctgatcaagggcatggaccaggggctgctgggcatgtgtcctggagagagaaggaagattatcatccctccattcctggcctatggcgagaaaggctatggtgagggtgggcaaggacacaaggggaaattccgcagaagagggaaaaaccaggcctccacatacagttgctcaggttgtatactgcacgagggcatccaaccaaggactcaaggtgggatgaaatctacccttggtgctactaagaaggggtgctttggccgggcgtggtggctcacgcttgtaatcccagcactttgggaagccaaggcgggaggatcacgaggtcaggagatcgagaccacggtgaaaccccgtctctactaaaaatacaaaaaaattagccgggcgtggtgggggcgcctgtagtcccagctactcggagaggctgaggcaggaaaatgacgtgaacccgggaggcggagcttgcagtgagccgagatcgtgccactgcactccagcctgggtgacagagcgagactctgtctcaaaaaaaaa

SEQ ID NO: 423759 - DNA, 3610 bp, Homo sapiens
tacaaattgttattgaattattttattgaatgatgacacccaaactgagctagaacataattctggctctgctagtacatcttctgtgtgatcttggacaagtcactctactttcctttcaattttcttttctcacagggagataatcataaaaacgactgtaaagtacagcacttcatagagtgctttttgtttaaagagctgacaataaatacgagtctcaaggtctaggaaagcctccctcacaacctgagctgcttgaggacaagggattttcttttgaatcagcagtaccttatttgtgtatctgtgatagagttcctggtacataagagtctcaataaatatgtgaatttatgaatattaggcagattgcaaccttgacaggccactgcctcttaaatctcctttctgtgatcttttaatatttaacatctaaaaggccgccgctacttgctttgggataagtatccccggtatgtactttaaaatgcccaagcctagagaaatgattcttgtcttaagggcaccatttcgctctcccaccgtaaagcgccccaggcttgggatctgggtcccaaggctacagggaagagtttggaacgggaagctcatcttccggccctctgattggccggctcgcactccactcaccggcgcgcagctctgattggcctcggcggcacccctcgtcccgcgactactttgtgtgctggggcggcgcgctccggtcctcccgctcagctggcggtctgggctgctctggggcagcccttcggtccactgctctgcatcgcgggcgccgggaattttccgagtccgagcgggttgctgcttttgctcagaggacatccatgaccctaatggtctttttgttcaagataaagtgattttttgcctttgttgattaactggacaaattcagcatgtagagcgcatgaagtacaggacaataaagcttcctacacatatcaccaggaggatctctttgaaagattcactgcaggactaccagagagaataatttgtctgaagcatcatgtgttgaaacaacagaagtctattcacctgtgcactaactagaaacagagttacaatgttttcaattctttgagctccaggactccagggaagtgagttgaaaatctgaaaatgcggccatggactggttcctggcgttggattatgctcattctttttgcctgggggaccttgctgttttatataggtggtcacttggtacgagataatgaccatcctgatcactctagccgagaactgtccaagattctggcaaagcttgaacgcttaaaacagcagaatgaagacttgaggcgaatggccgaatctctccggataccagaaggccctattgatcaggggccagctataggaagagtacgcgttttagaagagcagcttgttaaggccaaagaacagattgaaaattacaagaaacagaccagaaatggtctggggaaggatcatgaaatcctgaggaggaggattgaaaatggagctaaagagctctggtttttcctacagagtgaattgaagaaattaaagaacttagaaggaaatgaactccaaagacatgcagatgaatttcttttggatttaggacatcatgaaaggtctataatgacggatctatactacctcagtcagacagatggagcaggtgattggcgggaaaaagaggccaaagatctgacagaactggttcagcggagaataacatatcttcagaatcccaaggactgcagcaaagccaaaaagctggtgtgtaatatcaacaaaggctgtggctatggctgtcagctccatcatgtggtctactgcttcatgattgcatatggcacccagcgaacactcatcttggaatctcagaattggcgctatgctactggtggatgggagactgtatttaggcctgtaagtgagacatgcacagacagatctggcatctccactggacactggtcaggtgaagtgaaggacaaaaatgttcaagtggtcgagcttcccattgtagacagtcttcatccccgtcctccatatttacccttggctgtaccagaagacctcgcagatcgacttgtacgagtgcatggtgaccctgcagtgtggtgggtgtctcagtttgtcaaatacttgatccgcccacagccttggctagaaaaagaaatagaagaagccaccaagaagcttggcttcaaacatccagttattggagtccatgtcagacgcacagacaaagtgggaacagaagctgccttccatcccattgaagagtacatggtgcatgttgaagaacattttcagcttcttgcacgcagaatgcaagtggacaaaaaaagagtgtatttggccacagatgacccttctttattaaaggaggcaaaaacaaagtaccccaattatgaatttattagtgataactctatttcctggtcagctggactgcacaatcgatacacagaaaattcacttcgtggagtgatcctggatatacattttctctctcaggcagacttcctagtgtgtactttttcatcccaggtctgtcgagttgcttatgaaattatgcaaacactacatcctgatgcctctgcaaacttccattctttagatgacatctactattttgggggccagaatgcccacaatcaaattgccatttatgctcaccaaccccgaactgcagatgaaattcccatggaacctggagatatcattggtgtggctggaaatcattgggatggctattctaaaggtgtcaacaggaaattgggaaggacgggcctatatccctcctacaaagttcgagagaagatagaaacggtcaagtaccccacatatcctgaggctgagaaataaagctcagatggaagagataaacgaccaaactcagttcgaccaaactcagttcaaaccatttgagccaaactgtagatgaagagggctctgatctaacaaaataaggttatatgagtagatactctcagcaccaagagcagctgggaactgacataggcttcaattggtggaattcctctttaacaagggctgcaatgccctcatacccatgcacagtacaataatgtactcacatataacatgcaaacaggttgttttctactttgcccctttcagtatgtccccataagacaaacactgccatattgtgtaatttaagtgacacagacattttgtgtgagacttaaaacatggtgcctatatctgagagacctgtgtgaactattgagaagatcggaacagctccttactctgaggaagttgattcttatttgatggtggtattgtgaccactgaattcactccagtcaacagattcagaatgagaatggacgtttggtttttttttgtttttgtttttgttttttcctttataaggttgtctgtttttttttttttaaataattgcatcagttcattgacctcatcattaataagtgaagaatacatcagaaaataaaatattcactctccattagaaaattttgtaaaacaatgccatgaacaaattctttagtactcaatgtttctggacattctctttgataacaaaaaataaattttaaaaagg

SEQ ID NO: 423760 - DNA, 3717 bp, Homo sapiens
tacaaattgttattgaattattttattgaatgatgacacccaaactgagctagaacataattctggctctgctagtacatcttctgtgtgatcttggacaagtcactctactttcctttcaattttcttttctcacagggagataatcataaaaacgactgtaaagtacagcacttcatagagtgctttttgtttaaagagctgacaataaatacgagtctcaaggtctaggaaagcctccctcacaacctgagctgcttgaggacaagggattttcttttgaatcagcagtaccttatttgtgtatctgtgatagagttcctggtacataagagtctcaataaatatgtgaatttatgaatattaggcagattgcaaccttgacaggccactgcctcttaaatctcctttctgtgatcttttaatatttaacatctaaaaggccgccgctacttgctttgggataagtatccccggtatgtactttaaaatgcccaagcctagagaaatgattcttgtcttaagggcaccatttcgctctcccaccgtaaagcgccccaggcttgggatctgggtcccaaggctacagggaagagtttggaacgggaagctcatcttccggccctctgattggccggctcgcactccactcaccggcgcgcagctctgattggcctcggcggcacccctcgtcccgcgactactttgtgtgctggggcggcgcgctccggtcctcccgctcagctggcggtctgggctgctctggggcagcccttcggtccactgctctgcatcgcgggcgccgggaattttccgagtccgagcgggttgctgcttttgctcagaggacatccatgaccctaatggtctttttgttcaagataaagtgattttttgcctttgttgattaactggacaaattcagcatgtagagcgcatgaagtacaggacaataaagcttcctacacatatcaccaggaggatctctttgaaagattcactgcaggactaccagagagaataatttgtctgaagcatcatgtgttgaaacaacagaagtctattcacctgtgcactaactagaaacagagttacaatgttttcaattctttgagctccaggactccagggaagtgagttgaaaatctgaaaatgcggccatggactggttcctggcgttggattatgctcattctttttgcctgggggaccttgctgttttatataggtggtcacttggtacgagataatgaccatcctgatcactctagccgagaactgtccaagattctggcaaagcttgaacgcttaaaacagcagaatgaagacttgaggcgaatggccgaatctctccggataccagaaggccctattgatcaggggccagctataggaagagtacgcgttttagaagagcagcttgttaaggccaaagaacagattgaaaattacaagaaacagaccagaaatggtctggggaaggatcatgaaatcctgaggaggaggattgaaaatggagctaaagagctctggtttttcctacagagtgaattgaagaaattaaagaacttagaaggaaatgaactccaaagacatgcagatgaatttcttttggatttaggacatcatgaaaggtctataatgacggatctatactacctcagtcagacagatggagcaggtgattggcgggaaaaagaggccaaagatctgacagaactggttcagcggagaataacatatcttcagaatcccaaggactgcagcaaagccaaaaagctggtgtgtaatatcaacaaaggctgtggctatggctgtcagctccatcatgtggtctactgcttcatgattgcatatggcacccagcgaacactcatcttggaatctcagaattggcgctatgctactggtggatgggagactgtatttaggcctgtaagtgagacatgcacagacagatctggcatctccactggacactggtcaggtgaagtgaaggacaaaaatgttcaagtggtcgagcttcccattgtagacagtcttcatccccgtcctccatatttacccttggctgtaccagaagacctcgcagatcgacttgtacgagtgcatggtgaccctgcagtgtggtgggtgtctcagtttgtcaaatacttgatccgcccacagccttggctagaaaaagaaatagaagaagccaccaagaagcttggcttcaaacatccagttattggagtccatgtcagacgcacagacaaagtgggaacagaagctgccttccatcccattgaagagtacatggtgcatgttgaagaacattttcagcttcttgcacgcagaatgcaagtggacaaaaaaagagtgtatttggccacagatgacccttctttattaaaggaggcaaaaacaaagtaccccaattatgaatttattagtgataactctatttcctggtcagctggactgcacaatcgatacacagaaaattcacttcgtggagtgatcctggatatacattttctctctcaggcagacttcctagtgtgtactttttcatcccaggtctgtcgagttgcttatgaaattatgcaaacactacatcctgatgcctctgcaaacttccattctttagatgacatctactattttgggggccagaatgcccacaatcaaattgccatttatgctcaccaaccccgaactgcagatgaaattcccatggaacctggagatatcattggtgtggctggaaatcattgggatggctattctaaaggtgtcaacaggaaattgggaaggacgggcctatatccctcctacaaagttcgagagaagatagaaacggtcaagtaccccacatatcctgaggctgagaaataaagctcagatggaagagataaacgaccaaactcagttcgaccaaactcagttcaaaccatttgagccaaactgtagatgaagagggctctgatctaacaaaataaggttatatgagtagatactctcagcaccaagagcagctgggaactgacataggcttcaattggtggaattcctctttaacaagggctgcaatgccctcatacccatgcacagtacaataatgtactcacatataacatgcaaacaggttgttttctactttgcccctttcagtatgtccccataagacaaacactgccatattgtgtaatttaagtgacacagacattttgtgtgagacttaaaacatggtgcctatatctgagagacctgtgtgaactattgagaagatcggaacagctccttactctgaggaagttgattcttatttgatggtggtattgtgaccactgaattcactccagtcaacagattcagaatgagaatggacgtttggtttttttttgtttttgtttttgttttttcctttataaggttgtctgtttttttttttttaaataattgcatcagttcattgacctcatcattaataagtgaagaatacatcagaaaataaaatattcactctccattagaaaattttgtaaaacaatgccatgaacaaattctttagtactcaatgtttctggacattctctttgataacaaaaaataaattttaaaaaggaattttgtaaaagtttctagaattttatatcattggatgatatgttgatcagccttatgtggaagaactgtgataaaaagaggagctttttagtttttcaaaaaaaa

SEQ ID NO: 423761 - DNA, 1429 bp, Homo sapiens
tacaaattgttattgaattattttattgaatgatgacacccaaactgagctagaacataattctggctctgctagtacatcttctgtgtgatcttggacaagtcactctactttcctttcaattttcttttctcacagggagataatcataaaaacgactgtaaagtacagcacttcatagagtgctttttgtttaaagagctgacaataaatacgagtctcaaggtctaggaaagcctccctcacaacctgagctgcttgaggacaagggattttcttttgaatcagcagtaccttatttgtgtatctgtgatagagttcctggtacataagagtctcaataaatatgtgaatttatgaatattaggcagattgcaaccttgacaggccactgcctcttaaatctcctttctgtgatcttttaatatttaacatctaaaaggccgccgctacttgctttgggataagtatccccggtatgtactttaaaatgcccaagcctagagaaatgattcttgtcttaagggcaccatttcgctctcccaccgtaaagcgccccaggcttgggatctgggtcccaaggctacagggaagagtttggaacgggaagctcatcttccggccctctgattggccggctcgcactccactcaccggcgcgcagctctgattggcctcggcggcacccctcgtcccgcgactactttgtgtgctggggcggcgcgctccggtcctcccgctcagctggcggtctgggctgctctggggcagcccttcggtccactgctctgcatcgcgggcgccgggaattttccgagtccgagcgggtaggacgcatcctagggcaaagcctctcccctctccccgtgctgttctctttcccgtactaaataaacttccgcctcagaggggctgtcgcagctgcgggtcgggagaggccgggcatcgaactcaggccctcgtggggggggtctttctcttcgagtgaatgtggaaacagctcttacaagataaagtagggcttcgctgagtctcctgggggagcgatgccattgtaggatcgcgctggaagcagcagtcaagcggccaaatgcgggctgcaggggctgagcagcagcagcgcgcacccctaaaagtagcaaggagccagcttcaaaacctctagtgcgggtgccccctagggccgccgactgagctggcacgggccggtccattcccggcgctgtagggagcacagcattctctggaggcgagtctcctcccgggatccaggatccgctcgcgccccgctcagcctccggccttcaggcggtagagggcggcctacgcctgtgtgcgagccggagccggcgtgcgcagccgctgccctgctggaactgtgccgtcccgctgtggcccgcggctctgctaggcggtggatgctgctgct

SEQ ID NO: 423762 - DNA, 1002 bp, Homo sapiens
  misc_feature (4)..(4): n is a, c, g, or t
  misc_feature (958)..(958): n is a, c, g, or t
  misc_feature (1002)..(1002): n is a, c, g, or t
ggcncgacccgagcagccggttccctcctctccaggccccctcctcattccacccccgccgcctggcccagcgacccgtcccttcgtctccccgcggaatggggccggcactgctcagggtcgcgcgccctggacccagctcgctctcggtctcgcgctgtcagcgactgcccggctcgcgccgcctcgcgctctgcctcagtcagtggcgccgaaggctccgttaagcggcggcggcggttcctgtttccgtttcttcctctccgttcggtcgggagtagcatcctccactcagccacccttcccactcccccatcgtggggcagctgcggctgagggctgtggctttggcagctgcgacggggagcggcggagaccgcctctgctcccgcctggggttgctgcttttgctcagaggacatccatgaccctaatggtctttttgttcaagataaagtgattttttgcctttgttgattaactggacaaattcagcatgtagagcgcatgaagtacaggacaataaagcttcctacacatatcaccaggaggatctctttgaaagattcactgcaggactaccagagagaataatttgtctgaagcatcatgtgttgaaacaacagaagtctattcacctgtgcactaactagaaacagagttacaatgttttcaattctttgagctccaggactccagggaagtgagttgaaaatctgaaaatgcggccatggactggttcctggcgttggattatgctcattctttttgcctgggggaccttgctgttttatataggtggtcacttggtacgagataatgaccatcctgatcactctagccgagaactgtccaagattctggcaaagcttgaacgcttaaaaaccaaacagaaattgaaagaactttgaaaggcgaaatgggcccgaaattcctcctccccggggattaccccaanaaaaagggccccttaattttggaattcaaagggggggcccaaan

SEQ ID NO: 423763 - DNA, 2852 bp, Homo sapiens
  misc_feature (4)..(4): n is a, c, g, or t
ggcncgacccgagcagccggttccctcctctccaggccccctcctcattccacccccgccgcctggcccagcgacccgtcccttcgtctccccgcggaatggggccggcactgctcagggtcgcgcgccctggacccagctcgctctcggtctcgcgctgtcagcgactgcccggctcgcgccgcctcgcgctctgcctcagtcagtggcgccgaaggctccgttaagcggcggcggcggttcctgtttccgtttcttcctctccgttcggtcgggagtagcatcctccactcagccacccttcccactcccccatcgtggggcagctgcggctgagggctgtggctttggcagctgcgacggggagcggcggagaccgcctctgctcccgcctggggttgctgcttttgctcagaggacatccatgaccctaatggtctttttgttcaagataaagtgattttttgcctttgttgattaactggacaaattcaggataccagaaggccctattgatcaggggccagctataggaagagtacgcgttttagaagagcagcttgttaaggccaaagaacagattgaaaattacaagaaacagaccagaaatggtctggggaaggatcatgaaatcctgaggaggaggattgaaaatggagctaaagagctctggtttttcctacagagtgaattgaagaaattaaagaacttagaaggaaatgaactccaaagacatgcagatgaatttcttttggatttaggacatcatgaaaggattctgatggcaattactgtctcattagtgaacaataaaagaaaaattgttgtattagcacaacctactactgtgaagaggaaaagaattaccccatacaagtctataatgacggatctatactacctcagtcagacagatggagcaggtgattggcgggaaaaagaggccaaagatctgacagaactggttcagcggagaataacatatcttcagaatcccaaggactgcagcaaagccaaaaagctggtgtgtaatatcaacaaaggctgtggctatggctgtcagctccatcatgtggtctactgcttcatgattgcatatggcacccagcgaacactcatcttggaatctcagaattggcgctatgctactggtggatgggagactgtatttaggcctgtaagtgagacatgcacagacagatctggcatctccactggacactggtcaggtgaagtgaaggacaaaaatgttcaagtggtcgagcttcccattgtagacagtcttcatccccgtcctccatatttacccttggctgtaccagaagacctcgcagatcgacttgtacgagtgcatggtgaccctgcagtgtggtgggtgtctcagtttgtcaaatacttgatccgcccacagccttggctagaaaaagaaatagaagaagccaccaagaagcttggcttcaaacatccagttattggagtccatgtcagacgcacagacaaagtgggaacagaagctgccttccatcccattgaagagtacatggtgcatgttgaagaacattttcagcttcttgcacgcagaatgcaagtggacaaaaaaagagtgtatttggccacagatgacccttctttattaaaggaggcaaaaacaaagtaccccaattatgaatttattagtgataactctatttcctggtcagctggactgcacaatcgatacacagaaaattcacttcgtggagtgatcctggatatacattttctctctcaggcagacttcctagtgtgtactttttcatcccaggtctgtcgagttgcttatgaaattatgcaaacactacatcctgatgcctctgcaaacttccattctttagatgacatctactattttgggggccagaatgcccacaatcaaattgccatttatgctcaccaaccccgaactgcagatgaaattcccatggaacctggagatatcattggtgtggctggaaatcattgggatggctattctaaaggtgtcaacaggaaattgggaaggacgggcctatatccctcctacaaagttcgagagaagatagaaacggtcaagtaccccacatatcctgaggctgagaaataaagctcagatggaagagataaacgaccaaactcagttcgaccaaactcagttcaaaccatttgagccaaactgtagatgaagagggctctgatctaacaaaataaggttatatgagtagatactctcagcaccaagagcagctgggaactgacataggcttcaattggtggaattcctctttaacaagggctgcaatgccctcatacccatgcacagtacaataatgtactcacatataacatgcaaacaggttgttttctactttgcccctttcagtatgtccccataagacaaacactgccatattgtgtaatttaagtgacacagacattttgtgtgagacttaaaacatggtgcctatatctgagagacctgtgtgaactattgagaagatcggaacagctccttactctgaggaagttgattcttatttgatggtggtattgtgaccactgaattcactccagtcaacagattcagaatgagaatggacgtttggtttttttttgtttttgtttttgttttttcctttataaggttgtctgtttttttttttttaaataattgcatcagttcattgacctcatcattaataagtgaagaatacatcagaaaataaaatattcactctccattagaaaattttgtaaaacaatgccatgaacaaattctttagtactcaatgtttctggacattctctttgataacaaaaaataaattttaaaaagg

SEQ ID NO: 423764 - DNA, 3556 bp, Homo sapiens
tacaaattgttattgaattattttattgaatgatgacacccaaactgagctagaacataattctggctctgctagtacatcttctgtgtgatcttggacaagtcactctactttcctttcaattttcttttctcacagggagataatcataaaaacgactgtaaagtacagcacttcatagagtgctttttgtttaaagagctgacaataaatacgagtctcaaggtctaggaaagcctccctcacaacctgagctgcttgaggacaagggattttcttttgaatcagcagtaccttatttgtgtatctgtgatagagttcctggtacataagagtctcaataaatatgtgaatttatgaatattaggcagattgcaaccttgacaggccactgcctcttaaatctcctttctgtgatcttttaatatttaacatctaaaaggccgccgctacttgctttgggataagtatccccggtatgtactttaaaatgcccaagcctagagaaatgattcttgtcttaagggcaccatttcgctctcccaccgtaaagcgccccaggcttgggatctgggtcccaaggctacagggaagagtttggaacgggaagctcatcttccggccctctgattggccggctcgcactccactcaccggcgcgcagctctgattggcctcggcggcacccctcgtcccgcgactactttgtgtgctggggcggcgcgctccggtcctcccgctcagctggcggtctgggctgctctggggcagcccttcggtccactgctctgcatcgcgggcgccgggaattttccgagtccgagcgggttgctgcttttgctcagaggacatccatgaccctaatggtctttttgttcaagataaagtgattttttgcctttgttgattaactggacaaattcagcatgtagagcgcatgaagtacaggacaataaagcttcctacacatatcaccaggaggatctctttgaaagattcactgcaggactaccagagagaataatttgtctgaagcatcatgtgttgaaacaacagaagtctattcacctgtgcactaactagaaacagagttacaatgttttcaattctttgagctccaggactccagggaagtgagttgaaaatctgaaaatgcggccatggactggttcctggcgttggattatgctcattctttttgcctgggggaccttgctgttttatataggtggtcacttggtacgagataatgaccatcctgatcactctagccgagaactgtccaagattctggcaaagcttgaacgcttaaaacagcagaatgaagacttgaggcgaatggccgaatctctccggataccagaaggccctattgatcaggggccagctataggaagagtacgcgttttagaagagcagcttgttaaggccaaagaacagattgaaaattacaagaaacagaccagaaatggtctggggaaggatcatgaaatcctgaggaggaggattgaaaatggagctaaagagctctggtttttcctacagagtgaattgaagaaattaaagaacttagaaggaaatgaactccaaagacatgcagatgaatttcttttggatttaggacatcatgaaaggtctataatgacggatctatactacctcagtcagacagatggagcaggtgattggcgggaaaaagaggccaaagatctgacagaactggttcagcggagaataacatatcttcagaatcccaaggactgcagcaaagccaaaaagctggtgtgtaatatcaacaaaggctgtggctatggctgtcagctccatcatgtggtctactgcttcatgattgcatatggcacccagcgaacactcatcttggaatctcagaattggcgctatgctactggtggatgggagactgtatttaggcctgtaagtgagacatgcacagacagatctggcatctccactggacactggtcaggtgaagtgaaggacaaaaatgttcaagtggtcgagcttcccattgtagacagtcttcatccccgtcctccatatttacccttggctgtaccagaagacctcgcagatcgacttgtacgagtgcatggtgaccctgcagtgtggtgggtgtctcagtttgtcaaatacttgatccgcccacagccttggctagaaaaagaaatagaagaagccaccaagaagcttggcttcaaacatccagttattggagtccatgtcagacgcacagacaaagtgggaacagaagctgccttccatcccattgaagagtacatggtgcatgttgaagaacattttcagcttcttgcacgcagaatgcaagtggacaaaaaaagagtgtatttggccacagatgacccttctttattaaaggaggcaaaaacaaagtaccccaattatgaatttattagtgataactctatttcctggtcagctggactgcacaatcgatacacagaaaattcacttcgtggagtgatcctggatatacattttctctctcaggcagacttcctagtgtgtactttttcatcccaggtctgtcgagttgcttatgaaattatgcaaacactacatcctgatgcctctgcaaacttccattctttagatgacatctactattttgggggccagaatgcccacaatcaaattgccatttatgctcaccaaccccgaactgcagatgaaattcccatggaacctggagatatcattggtgtggctggaaatcattgggatggctattctaaaggtgtcaacaggaaattgggaaggacgggcctatatccctcctacaaagttcgagagaagatagaaacggtcaagtaccccacatatcctgaggctgagaaataaagctcagatggaagagataaacgaccaaactcagttcgaccaaactcagttcaaaccatttgagccaaactgtagatgaagagggctctgatctaacaaaataaggttatatgagtagatactctcagcaccaagagcagctgggaactgacataggcttcaattggtggaattcctctttaacaagggctgcaatgccctcatacccatgcacagtacaataatgtactcacatataacatgcaaacaggttgttttctactttgcccctttcagtatgtccccataagacaaacactgccatattgtgtaatttaagtgacacagacattttgtgtgagacttaagctccttactctgaggaagttgattcttatttgatggtggtattgtgaccactgaattcactccagtcaacagattcagaatgagaatggacgtttggtttttttttgtttttgtttttgttttttcctttataaggttgtctgtttttttttttttaaataattgcatcagttcattgacctcatcattaataagtgaagaatacatcagaaaataaaatattcactctccattagaaaattttgtaaaacaatgccatgaacaaattctttagtactcaatgtttctggacattctctttgataacaaaaaataaattttaaaaagg

SEQ ID NO: 423765 - DNA, 3186 bp, Homo sapiens
tacaaattgttattgaattattttattgaatgatgacacccaaactgagctagaacataattctggctctgctagtacatcttctgtgtgatcttggacaagtcactctactttcctttcaattttcttttctcacagggagataatcataaaaacgactgtaaagtacagcacttcatagagtgctttttgtttaaagagctgacaataaatacgagtctcaaggtctaggaaagcctccctcacaacctgagctgcttgaggacaagggattttcttttgaatcagcagtaccttatttgtgtatctgtgatagagttcctggtacataagagtctcaataaatatgtgaatttatgaatattaggcagattgcaaccttgacaggccactgcctcttaaatctcctttctgtgatcttttaatatttaacatctaaaaggccgccgctacttgctttgggataagtatccccggtatgtactttaaaatgcccaagcctagagaaatgattcttgtcttaagggcaccatttcgctctcccaccgtaaagcgccccaggcttgggatctgggtcccaaggctacagggaagagtttggaacgggaagctcatcttccggccctctgattggccggctcgcactccactcaccggcgcgcagctctgattggcctcggcggcacccctcgtcccgcgactactttgtgtgctggggcggcgcgctccggtcctcccgctcagctggcggtctgggctgctctggggcagcccttcggtccactgctctgcatcgcgggcgccgggaattttccgagtccgagcgggttgctgcttttgctcagaggacatccatgaccctaatggtctttttgttcaagataaagtgattttttgcctttgttgattaactggacaaattcagcatgtagagcgcatgaagtacaggacaataaagcttcctacacatatcaccaggaggatctctttgaaagattcactgcaggactaccagagagaataatttgtctgaagcatcatgtgttgaaacaacagaagtctattcacctgtgcactaactagaaacagagttacaatgttttcaattctttgagctccaggactccagggaagtgagttgaaaatctgaaaatgcggccatggactggttcctggcgttggattatgctcattctttttgcctgggggaccttgctgttttatataggtggtcacttggtacgagataatgaccatcctgatcactctagccgagaactgtccaagattctggcaaagcttgaacgcttaaaacagcagaatgaagacttgaggcgaatggccgaatctctccggataccagaaggccctattgatcaggggccagctataggaagagtacgcgttttagaagagcagcttgttaaggccaaagaacagattgaaaattacaagaaacagaccagaaatggtctggggaaggatcatgaaatcctgaggaggaggattgaaaatggagctaaagagctctggtttttcctacagagtgaattgaagaaattaaagaacttagaaggaaatgaactccaaagacatgcagatgaatttcttttggatttaggacatcatgaaaggtctataatgacggatctatactacctcagtcagacagatggagcaggtgattggcgggaaaaagaggccaaagatctgacagaactggttcagcggagaataacatatcttcagaatcccaaggactgcagcaaagccaaaaagctggtgtgtaatatcaacaaaggctgtggctatggctgtcagctccatcatgtggtctactgcttcatgattgcatatggcacccagcgaacactcatcttggaatctcagaattggcgctatgctactggtggatgggagactgtatttaggcctgtaagtgagacatgcacagacagatctggcatctccactggacactggtcaggtaccccaattatgaatttattagtgataactctatttcctggtcagctggactgcacaatcgatacacagaaaattcacttcgtggagtgatcctggatatacattttctctctcaggcagacttcctagtgtgtactttttcatcccaggtctgtcgagttgcttatgaaattatgcaaacactacatcctgatgcctctgcaaacttccattctttagatgacatctactattttgggggccagaatgcccacaatcaaattgccatttatgctcaccaaccccgaactgcagatgaaattcccatggaacctggagatatcattggtgtggctggaaatcattgggatggctattctaaaggtgtcaacaggaaattgggaaggacgggcctatatccctcctacaaagttcgagagaagatagaaacggtcaagtaccccacatatcctgaggctgagaaataaagctcagatggaagagataaacgaccaaactcagttcgaccaaactcagttcaaaccatttgagccaaactgtagatgaagagggctctgatctaacaaaataaggttatatgagtagatactctcagcaccaagagcagctgggaactgacataggcttcaattggtggaattcctctttaacaagggctgcaatgccctcatacccatgcacagtacaataatgtactcacatataacatgcaaacaggttgttttctactttgcccctttcagtatgtccccataagacaaacactgccatattgtgtaatttaagtgacacagacattttgtgtgagacttaaaacatggtgcctatatctgagagacctgtgtgaactattgagaagatcggaacagctccttactctgaggaagttgattcttatttgatggtggtattgtgaccactgaattcactccagtcaacagattcagaatgagaatggacgtttggtttttttttgtttttgtttttgttttttcctttataaggttgtctgtttttttttttttaaataattgcatcagttcattgacctcatcattaataagtgaagaatacatcagaaaataaaatattcactctccattagaaaattttgtaaaacaatgccatgaacaaattctttagtactcaatgtttctggacattctctttgataacaaaaaataaattttaaaaagg

SEQ ID NO: 423766 - DNA, 1455 bp, Homo sapiens
atcctaatcctaaacttcaaattctttaagggcacaaactatgtcttactcattttggtatcatgagtgcctagcttggaccactgtgtatgtagctcttaataaatgtttgttaaaattaactaattcatattcttaaattcttttgtactatatagagatagagagattttaattgtaataatctttcgtgagtttttcttctttatttgaaaaaggatccagacacagagatgaagaatgacttgtaccatcttctgagaacaaatggactgaaagcttgtgactagaatccactacttttcaacctcttactcctagagcccatccttttggccaagggcttttagattgctgtgaaggagagtgtttatatactaacaatttcttttaaattctttcccaaggtctgtcgagttgcttatgaaattatgcaaacactacatcctgatgcctctgcaaacttccattctttagatgacatctactattttgggggccagaatgcccacaatcaaattgccatttatgctcaccaaccccgaactgcagatgaaattcccatggaacctggagatatcattggtgtggctggaaatcattgggatggctattctaaaggtgtcaacaggaaattgggaaggacgggcctatatccctcctacaaagttcgagagaagatagaaacggtcaagtaccccacatatcctgaggctgagaaataaagctcagatggaagagataaacgaccaaactcagttcgaccaaactcagttcaaaccatttgagccaaactgtagatgaagagggctctgatctaacaaaataaggttatatgagtagatactctcagcaccaagagcagctgggaactgacataggcttcaattggtggaattcctctttaacaagggctgcaatgccctcatacccatgcacagtacaataatgtactcacatataacatgcaaacaggttgttttctactttgcccctttcagtatgtccccataagacaaacactgccatattgtgtaatttaagtgacacagacattttgtgtgagacttaaaacatggtgcctatatctgagagacctgtgtgaactattgagaagatcggaacagctccttactctgaggaagttgattcttatttgatggtggtattgtgaccactgaattcactccagtcaacagattcagaatgagaatggacgtttggtttttttttgtttttgtttttgttttttcctttataaggttgtctgtttttttttttttaaataattgcatcagttcattgacctcatcattaataagtgaagaatacatcagaaaataaaatattcactctccattagaaaattttgtaaaacaatgccatgaacaaattctttagtactcaatgtttctggacattctctttgataacaaaaaataaattttaaaaagg

SEQ ID NO: 423767 - DNA, 2492 bp, Homo sapiens
tacaaattgttattgaattattttattgaatgatgacacccaaactgagctagaacataattctggctctgctagtacatcttctgtgtgatcttggacaagtcactctactttcctttcaattttcttttctcacagggagataatcataaaaacgactgtaaagtacagcacttcatagagtgctttttgtttaaagagctgacaataaatacgagtctcaaggtctaggaaagcctccctcacaacctgagctgcttgaggacaagggattttcttttgaatcagcagtaccttatttgtgtatctgtgatagagttcctggtacataagagtctcaataaatatgtgaatttatgaatattaggcagattgcaaccttgacaggccactgcctcttaaatctcctttctgtgatcttttaatatttaacatctaaaaggccgccgctacttgctttgggataagtatccccggtatgtactttaaaatgcccaagcctagagaaatgattcttgtcttaagggcaccatttcgctctcccaccgtaaagcgccccaggcttgggatctgggtcccaaggctacagggaagagtttggaacgggaagctcatcttccggccctctgattggccggctcgcactccactcaccggcgcgcagctctgattggcctcggcggcacccctcgtcccgcgactactttgtgtgctggggcggcgcgctccggtcctcccgctcagctggcggtctgggctgctctggggcagcccttcggtccactgctctgcatcgcgggcgccgggaattttccgagtccgagcgggttgctgcttttgctcagaggacatccatgaccctaatggtctttttgttcaagataaagtgattttttgcctttgttgattaactggacaaattcagcatgtagagcgcatgaagtacaggacaataaagcttcctacacatatcaccaggaggatctctttgaaagattcactgcaggactaccagagagaataatttgtctgaagcatcatgtgttgaaacaacagaagtctattcacctgtgcactaactagaaacagagttacaatgttttcaattctttgagctccaggactccagggaagtgagttgaaaatctgaaaatgcggccatggactggttcctggcgttggattatgctcattctttttgcctgggggaccttgctgttttatataggtggtcacttggtacgagataatgaccatcctgatcactctagccgagaactgtccaagattctggcaaagcttgaacgcttaaaacagcagaatgaagacttgaggcgaatggccgaatctctccggataccagaaggccctattgatcaggggccagctataggaagagtacgcgttttagaagagcagcttgttaaggccaaagaacagattgaaaattacaagaaacagaccagaaatggtctggggaaggatcatgaaatcctgaggaggaggattgaaaatggagctaaagagctctggtttttcctacagagtgaattgaagaaattaaagaacttagaaggaaatgaactccaaagacatgcagatgaatttcttttggatttaggacatcatgaaaggtctataatgacggatctatactacctcagtcagacagatggagcaggtgattggcgggaaaaagaggccaaagatctgacagaactggttcagcggagaataacatatcttcagaatcccaaggactgcagcaaagccaaaaagctggtgtgtaatatcaacaaaggctgtggctatggctgtcagctccatcatgtggtctactgcttcatgattgcatatggcacccagcgaacactcatcttggaatctcagaattggcgctatgctactggtggatgggagactgtatttaggcctgtaagtgagacatgcacagacagatctggcatctccactggacactggtcaggtgaagtgaaggacaaaaatgttcaagtggtcgagcttcccattgtagacagtcttcatccccgtcctccatatttacccttggctgtaccagaagacctcgcagatcgacttgtacgagtgcatggtgaccctgcagtgtggtgggtgtctcagtttgtcaatcatgaagcagtagaccacatgatggagctgacagccatagccacagcctgtgttgatagtgacataccagcttgtgggctgtgcgtgcagtccttgggattctgaagatatgttattctccgctgaaccagttctgtcagatctttggcctctttttcccgccaatcagcctgcgtccatctgtctgactgaggtagtatagatccgtcattatagacctttcatgatgtcctcactcctaaagaaattcatctgcatgtctttggagttcatttccttctaagttccttctaatttcttccattcactctgtaggacacacccccgctctttagctccca

SEQ ID NO: 423768 - DNA, 1223 bp, Homo sapiens
tacaaattgttattgaattattttattgaatgatgacacccaaactgagctagaacataattctggctctgctagtacatcttctgtgtgatcttggacaagtcactctactttcctttcaattttcttttctcacagggagataatcataaaaacgactgtaaagtacagcacttcatagagtgctttttgtttaaagagctgacaataaatacgagtctcaaggtctaggaaagcctccctcacaacctgagctgcttgaggacaagggattttcttttgaatcagcagtaccttatttgtgtatctgtgatagagttcctggtacataagagtctcaataaatatgtgaatttatgaatattaggcagattgcaaccttgacaggccactgcctcttaaatctcctttctgtgatcttttaatatttaacatctaaaaggccgccgctacttgctttgggataagtatccccggtatgtactttaaaatgcccaagcctagagaaatgattcttgtcttaagggcaccatttcgctctcccaccgtaaagcgccccaggcttgggatctgggtcccaaggctacagggaagagtttggaacgggaagctcatcttccggccctctgattggccggctcgcactccactcaccggcgcgcagctctgattggcctcggcggcacccctcgtcccgcgactactttgtgtgctggggcggcgcgctccggtcctcccgctcagctggcggtctgggctgctctggggcagcccttcggtccactgctctgcatcgcgggcgccgggaattttccgagtccgagcgggttgctgcttttgctcagaggacatccatgaccctaatggtctttttgttcaagataaagtgattttttgcctttgttgattaactggacaaattcaggtactgaggccgggcgcggtggctcacgcctgtaatcccagcactttgggaggccgaggcgggcggatcacgaggtcaggagatcgagaccatcccggctaaaacggtgaaaccccgtctctactaaaaatacaaaaaattagccgggcgtagtggcgggcgcctgtagtcccagctacttaggaggctgaggcaggagaatggcgtgaacccaggaggcagagcttgcagtgagccgagatcctgccactgcactccagcctgggcgacagagcgagactccgtctcaaaaaaaaaa

SEQ ID NO: 423769 - DNA, 302 bp, Homo sapiens
tggttcagcggagaataacatatcttcaggtaagaaggttgggttaagaataaatttgagtgaaaaaaagaaggatcataatataactaagagtaataatttcagttgtttttagtcttcctggcccttgaaaatcagtactcacacattttacatatttattcagaaagacactgtgttatgccttgagtggaatacaaagatggctaaaacaaagaccctgtcctaaagggagctacttcttacacacgtacacacacacacacacacacacacacacaatacaatacaaatataacatc

SEQ ID NO: 423770 - DNA, 237 bp, Homo sapiens
gattctgatggcaattactgtctcattagtgaacaataaaagaaaaattgttgtattagcacaacctactactgtgaagaggaaaagaattaccccatacaagtaagagatttcatatttattaacatcagcagcaatattataatgattttgaaaaattgcttggttgttttaggtgaaattataaataaaaatctgtctattggaatcattttagcattaatgaatctacagaaa

SEQ ID NO: 423771 - DNA, 3287 bp, Homo sapiens
  misc_feature (4)..(4): n is a, c, g, or t
ggcncgacccgagcagccggttccctcctctccaggccccctcctcattccacccccgccgcctggcccagcgacccgtcccttcgtctccccgcggaatggggccggcactgctcagggtcgcgcgccctggacccagctcgctctcggtctcgcgctgtcagcgactgcccggctcgcgccgcctcgcgctctgcctcagtcagtggcgccgaaggctccgttaagcggcggcggcggttcctgtttccgtttcttcctctccgttcggtcgggagtagcatcctccactcagccacccttcccactcccccatcgtggggcagctgcggctgagggctgtggctttggcagctgcgacggggagcggcggagaccgcctctgctcccgcctggggttgctgcttttgctcagaggacatccatgaccctaatggtctttttgttcaagataaagtgattttttgcctttgttgattaactggacaaattcagcatgtagagcgcatgaagtacaggacaataaagcttcctacacatatcaccaggaggatctctttgaaagattcactgcaggactaccagagagaataatttgtctgaagcatcatgtgttgaaacaacagaagtctattcacctgtgcactaactagaaacagagttacaatgttttcaattctttgagctccaggactccagggaagtgagttgaaaatctgaaaatgcggccatggactggttcctggcgttggattatgctcattctttttgcctgggggaccttgctgttttatataggtggtcacttggtacgagataatgaccatcctgatcactctagccgagaactgtccaagattctggcaaagcttgaacgcttaaaacagcagaatgaagacttgaggcgaatggccgaatctctccggataccagaaggccctattgatcaggggccagctataggaagagtacgcgttttagaagagcagcttgttaaggccaaagaacagattgaaaattacaagaaacagaccagaaatggtctggggaaggatcatgaaatcctgaggaggaggattgaaaatggagctaaagagctctggtttttcctacagagtgaattgaagaaattaaagaacttagaaggaaatgaactccaaagacatgcagatgaatttcttttggatttaggacatcatgaaaggtctataatgacggatctatactacctcagtcagacagatggagcaggtgattggcgggaaaaagaggccaaagatctgacagaactggttcagcggagaataacatatcttcagaatcccaaggactgcagcaaagccaaaaagctggtgtgtaatatcaacaaaggctgtggctatggctgtcagctccatcatgtggtctactgcttcatgattgcatatggcacccagcgaacactcatcttggaatctcagaattggcgctatgctactggtggatgggagactgtatttaggcctgtaagtgagacatgcacagacagatctggcatctccactggacactggtcaggtgaagtgaaggacaaaaatgttcaagtggtcgagcttcccattgtagacagtcttcatccccgtcctccatatttacccttggctgtaccagaagacctcgcagatcgacttgtacgagtgcatggtgaccctgcagtgtggtgggtgtctcagtttgtcaaatacttgatccgcccacagccttggctagaaaaagaaatagaagaagccaccaagaagcttggcttcaaacatccagttattggagtccatgtcagacgcacagacaaagtgggaacagaagctgccttccatcccattgaagagtacatggtgcatgttgaagaacattttcagcttcttgcacgcagaatgcaagtggacaaaaaaagagtgtatttggccacagatgacccttctttattaaaggaggcaaaaacaaagtaccccaattatgaatttattagtgataactctatttcctggtcagctggactgcacaatcgatacacagaaaattcacttcgtggagtgatcctggatatacattttctctctcaggcagacttcctagtgtgtactttttcatcccaggtctgtcgagttgcttatgaaattatgcaaacactacatcctgatgcctctgcaaacttccattctttagatgacatctactattttgggggccagaatgcccacaatcaaattgccatttatgctcaccaaccccgaactgcagatgaaattcccatggaacctggagatatcattggtgtggctggaaatcattgggatggctattctaaaggtgtcaacaggaaattgggaaggacgggcctatatccctcctacaaagttcgagagaagatagaaacggtcaagtaccccacatatcctgaggctgagaaataaagctcagatggaagagataaacgaccaaactcagttcgaccaaactcagttcaaaccatttgagccaaactgtagatgaagagggctctgatctaacaaaataaggttatatgagtagatactctcagcaccaagagcagctgggaactgacataggcttcaattggtggaattcctctttaacaagggctgcaatgccctcatacccatgcacagtacaataatgtactcacatataacatgcaaacaggttgttttctactttgcccctttcagtatgtccccataagacaaacactgccatattgtgtaatttaagtgacacagacattttgtgtgagacttaaaacatggtgcctatatctgagagacctgtgtgaactattgagaagatcggaacagctccttactctgaggaagttgattcttatttgatggtggtattgtgaccactgaattcactccagtcaacagattcagaatgagaatggacgtttggtttttttttgtttttgtttttgttttttcctttataaggttgtctgtttttttttttttaaataattgcatcagttcattgacctcatcattaataagtgaagaatacatcagaaaataaaatattcactctccattagaaaattttgtaaaacaatgccatgaacaaattctttagtactcaatgtttctggacattctctttgataacaaaaaataaattttaaaaaggaattttgtaaaagtttctagaattttatatcattggatgatatgttgatcagccttatgtggaagaactgtgataaaaagaggagctttttagtttttcaaaaaaaa

SEQ ID NO: 423772 - DNA, 3180 bp, Homo sapiens
  misc_feature (4)..(4): n is a, c, g, or t
ggcncgacccgagcagccggttccctcctctccaggccccctcctcattccacccccgccgcctggcccagcgacccgtcccttcgtctccccgcggaatggggccggcactgctcagggtcgcgcgccctggacccagctcgctctcggtctcgcgctgtcagcgactgcccggctcgcgccgcctcgcgctctgcctcagtcagtggcgccgaaggctccgttaagcggcggcggcggttcctgtttccgtttcttcctctccgttcggtcgggagtagcatcctccactcagccacccttcccactcccccatcgtggggcagctgcggctgagggctgtggctttggcagctgcgacggggagcggcggagaccgcctctgctcccgcctggggttgctgcttttgctcagaggacatccatgaccctaatggtctttttgttcaagataaagtgattttttgcctttgttgattaactggacaaattcagcatgtagagcgcatgaagtacaggacaataaagcttcctacacatatcaccaggaggatctctttgaaagattcactgcaggactaccagagagaataatttgtctgaagcatcatgtgttgaaacaacagaagtctattcacctgtgcactaactagaaacagagttacaatgttttcaattctttgagctccaggactccagggaagtgagttgaaaatctgaaaatgcggccatggactggttcctggcgttggattatgctcattctttttgcctgggggaccttgctgttttatataggtggtcacttggtacgagataatgaccatcctgatcactctagccgagaactgtccaagattctggcaaagcttgaacgcttaaaacagcagaatgaagacttgaggcgaatggccgaatctctccggataccagaaggccctattgatcaggggccagctataggaagagtacgcgttttagaagagcagcttgttaaggccaaagaacagattgaaaattacaagaaacagaccagaaatggtctggggaaggatcatgaaatcctgaggaggaggattgaaaatggagctaaagagctctggtttttcctacagagtgaattgaagaaattaaagaacttagaaggaaatgaactccaaagacatgcagatgaatttcttttggatttaggacatcatgaaaggtctataatgacggatctatactacctcagtcagacagatggagcaggtgattggcgggaaaaagaggccaaagatctgacagaactggttcagcggagaataacatatcttcagaatcccaaggactgcagcaaagccaaaaagctggtgtgtaatatcaacaaaggctgtggctatggctgtcagctccatcatgtggtctactgcttcatgattgcatatggcacccagcgaacactcatcttggaatctcagaattggcgctatgctactggtggatgggagactgtatttaggcctgtaagtgagacatgcacagacagatctggcatctccactggacactggtcaggtgaagtgaaggacaaaaatgttcaagtggtcgagcttcccattgtagacagtcttcatccccgtcctccatatttacccttggctgtaccagaagacctcgcagatcgacttgtacgagtgcatggtgaccctgcagtgtggtgggtgtctcagtttgtcaaatacttgatccgcccacagccttggctagaaaaagaaatagaagaagccaccaagaagcttggcttcaaacatccagttattggagtccatgtcagacgcacagacaaagtgggaacagaagctgccttccatcccattgaagagtacatggtgcatgttgaagaacattttcagcttcttgcacgcagaatgcaagtggacaaaaaaagagtgtatttggccacagatgacccttctttattaaaggaggcaaaaacaaagtaccccaattatgaatttattagtgataactctatttcctggtcagctggactgcacaatcgatacacagaaaattcacttcgtggagtgatcctggatatacattttctctctcaggcagacttcctagtgtgtactttttcatcccaggtctgtcgagttgcttatgaaattatgcaaacactacatcctgatgcctctgcaaacttccattctttagatgacatctactattttgggggccagaatgcccacaatcaaattgccatttatgctcaccaaccccgaactgcagatgaaattcccatggaacctggagatatcattggtgtggctggaaatcattgggatggctattctaaaggtgtcaacaggaaattgggaaggacgggcctatatccctcctacaaagttcgagagaagatagaaacggtcaagtaccccacatatcctgaggctgagaaataaagctcagatggaagagataaacgaccaaactcagttcgaccaaactcagttcaaaccatttgagccaaactgtagatgaagagggctctgatctaacaaaataaggttatatgagtagatactctcagcaccaagagcagctgggaactgacataggcttcaattggtggaattcctctttaacaagggctgcaatgccctcatacccatgcacagtacaataatgtactcacatataacatgcaaacaggttgttttctactttgcccctttcagtatgtccccataagacaaacactgccatattgtgtaatttaagtgacacagacattttgtgtgagacttaaaacatggtgcctatatctgagagacctgtgtgaactattgagaagatcggaacagctccttactctgaggaagttgattcttatttgatggtggtattgtgaccactgaattcactccagtcaacagattcagaatgagaatggacgtttggtttttttttgtttttgtttttgttttttcctttataaggttgtctgtttttttttttttaaataattgcatcagttcattgacctcatcattaataagtgaagaatacatcagaaaataaaatattcactctccattagaaaattttgtaaaacaatgccatgaacaaattctttagtactcaatgtttctggacattctctttgataacaaaaaataaattttaaaaagg

SEQ ID NO: 423773 - DNA, 3258 bp, Homo sapiens
  misc_feature (4)..(4): n is a, c, g, or t
ggcncgacccgagcagccggttccctcctctccaggccccctcctcattccacccccgccgcctggcccagcgacccgtcccttcgtctccccgcggaatggggccggcactgctcagggtcgcgcgccctggacccagctcgctctcggtctcgcgctgtcagcgactgcccggctcgcgccgcctcgcgctctgcctcagtcagtggcgccgaaggctccgttaagcggcggcggcggttcctgtttccgtttcttcctctccgttcggtcgggagtagcatcctccactcagccacccttcccactcccccatcgtggggcagctgcggctgagggctgtggctttggcagctgcgacggggagcggcggagaccgcctctgctcccgcctggggttgctgcttttgctcagaggacatccatgaccctaatggtctttttgttcaagataaagtgattttttgcctttgttgattaactggacaaattcagattctattttgaccagcaataagttgaattatggggctagaagataaggactaaaaacaagaattggtgtccagaaagcatgtagagcgcatgaagtacaggacaataaagcttcctacacatatcaccaggaggatctctttgaaagattcactgcaggactaccagagagaataatttgtctgaagcatcatgtgttgaaacaacagaagtctattcacctgtgcactaactagaaacagagttacaatgttttcaattctttgagctccaggactccagggaagtgagttgaaaatctgaaaatgcggccatggactggttcctggcgttggattatgctcattctttttgcctgggggaccttgctgttttatataggtggtcacttggtacgagataatgaccatcctgatcactctagccgagaactgtccaagattctggcaaagcttgaacgcttaaaacagcagaatgaagacttgaggcgaatggccgaatctctccggataccagaaggccctattgatcaggggccagctataggaagagtacgcgttttagaagagcagcttgttaaggccaaagaacagattgaaaattacaagaaacagaccagaaatggtctggggaaggatcatgaaatcctgaggaggaggattgaaaatggagctaaagagctctggtttttcctacagagtgaattgaagaaattaaagaacttagaaggaaatgaactccaaagacatgcagatgaatttcttttggatttaggacatcatgaaaggtctataatgacggatctatactacctcagtcagacagatggagcaggtgattggcgggaaaaagaggccaaagatctgacagaactggttcagcggagaataacatatcttcagaatcccaaggactgcagcaaagccaaaaagctggtgtgtaatatcaacaaaggctgtggctatggctgtcagctccatcatgtggtctactgcttcatgattgcatatggcacccagcgaacactcatcttggaatctcagaattggcgctatgctactggtggatgggagactgtatttaggcctgtaagtgagacatgcacagacagatctggcatctccactggacactggtcaggtgaagtgaaggacaaaaatgttcaagtggtcgagcttcccattgtagacagtcttcatccccgtcctccatatttacccttggctgtaccagaagacctcgcagatcgacttgtacgagtgcatggtgaccctgcagtgtggtgggtgtctcagtttgtcaaatacttgatccgcccacagccttggctagaaaaagaaatagaagaagccaccaagaagcttggcttcaaacatccagttattggagtccatgtcagacgcacagacaaagtgggaacagaagctgccttccatcccattgaagagtacatggtgcatgttgaagaacattttcagcttcttgcacgcagaatgcaagtggacaaaaaaagagtgtatttggccacagatgacccttctttattaaaggaggcaaaaacaaagtaccccaattatgaatttattagtgataactctatttcctggtcagctggactgcacaatcgatacacagaaaattcacttcgtggagtgatcctggatatacattttctctctcaggcagacttcctagtgtgtactttttcatcccaggtctgtcgagttgcttatgaaattatgcaaacactacatcctgatgcctctgcaaacttccattctttagatgacatctactattttgggggccagaatgcccacaatcaaattgccatttatgctcaccaaccccgaactgcagatgaaattcccatggaacctggagatatcattggtgtggctggaaatcattgggatggctattctaaaggtgtcaacaggaaattgggaaggacgggcctatatccctcctacaaagttcgagagaagatagaaacggtcaagtaccccacatatcctgaggctgagaaataaagctcagatggaagagataaacgaccaaactcagttcgaccaaactcagttcaaaccatttgagccaaactgtagatgaagagggctctgatctaacaaaataaggttatatgagtagatactctcagcaccaagagcagctgggaactgacataggcttcaattggtggaattcctctttaacaagggctgcaatgccctcatacccatgcacagtacaataatgtactcacatataacatgcaaacaggttgttttctactttgcccctttcagtatgtccccataagacaaacactgccatattgtgtaatttaagtgacacagacattttgtgtgagacttaaaacatggtgcctatatctgagagacctgtgtgaactattgagaagatcggaacagctccttactctgaggaagttgattcttatttgatggtggtattgtgaccactgaattcactccagtcaacagattcagaatgagaatggacgtttggtttttttttgtttttgtttttgttttttcctttataaggttgtctgtttttttttttttaaataattgcatcagttcattgacctcatcattaataagtgaagaatacatcagaaaataaaatattcactctccattagaaaattttgtaaaacaatgccatgaacaaattctttagtactcaatgtttctggacattctctttgataacaaaaaataaattttaaaaagg

SEQ ID NO: 423774 - DNA, 3586 bp, Homo sapiens
tacaaattgttattgaattattttattgaatgatgacacccaaactgagctagaacataattctggctctgctagtacatcttctgtgtgatcttggacaagtcactctactttcctttcaattttcttttctcacagggagataatcataaaaacgactgtaaagtacagcacttcatagagtgctttttgtttaaagagctgacaataaatacgagtctcaaggtctaggaaagcctccctcacaacctgagctgcttgaggacaagggattttcttttgaatcagcagtaccttatttgtgtatctgtgatagagttcctggtacataagagtctcaataaatatgtgaatttatgaatattaggcagattgcaaccttgacaggccactgcctcttaaatctcctttctgtgatcttttaatatttaacatctaaaaggccgccgctacttgctttgggataagtatccccggtatgtactttaaaatgcccaagcctagagaaatgattcttgtcttaagggcaccatttcgctctcccaccgtaaagcgccccaggcttgggatctgggtcccaaggctacagggaagagtttggaacgggaagctcatcttccggccctctgattggccggctcgcactccactcaccggcgcgcagctctgattggcctcggcggcacccctcgtcccgcgactactttgtgtgctggggcggcgcgctccggtcctcccgctcagctggcggtctgggctgctctggggcagcccttcggtccactgctctgcatcgcgggcgccgggaattttccgagtccgagcgggttgctgcttttgctcagaggacatccatgaccctaatggtctttttgttcaagataaagtgattttttgcctttgttgattaactggacaaattcagcatgtagagcgcatgaagtacaggacaataaagcttcctacacatatcaccaggaggatctctttgaaagattcactgcaggactaccagagagaataatttgtctgaagcatcatgtgttgaaacaacagaagtctattcacctgtgcactaactagaaacagagttacaatgttttcaattctttgagctccaggactccagggaagtgagttgaaaatctgaaaatgcggccatggactggttcctggcgttggattatgctcattctttttgcctgggggaccttgctgttttatataggtggtcacttggtacgagataatgaccatcctgatcactctagccgagaactgtccaagattctggcaaagcttgaacgcttaaaacagcagaatgaagacttgaggcgaatggccgaatctctccggataccagaaggccctattgatcaggggccagctataggaagagtacgcgttttagaagagcagcttgttaaggccaaagaacagattgaaaattacaagaaacagaccagaaatggtctggggaaggatcatgaaatcctgaggaggaggattgaaaatggagctaaagagctctggtttttcctacagagtgaattgaagaaattaaagaacttagaaggaaatgaactccaaagacatgcagatgaatttcttttggatttaggacatcatgaaaggtctataatgacggatctatactacctcagtcagacagatggagcaggtgattggcgggaaaaagaggccaaagatctgacagaactggttcagcggagaataacatatcttcagaatcccaaggactgcagcaaagccaaaaagctggtgtgtaatatcaacaaaggctgtggctatggctgtcagctccatcatgtggtctactgcttcatgattgcatatggcacccagcgaacactcatcttggaatctcagaattggcgctatgctactggtggatgggagactgtatttaggcctgtaagtgagacatgcacagacagatctggcatctccactggacactggtcaggtgaagtgaaggacaaaaatgttcaagtggtcgagcttcccattgtagacagtcttcatccccgtcctccatatttacccttggctgtaccagaagacctcgcagatcgacttgtacgagtgcatggtgaccctgcagtgtggtgggtgtctcagtttgtcaaatacttgatccgcccacagccttggctagaaaaagaaatagaagaagccaccaagaagcttggcttcaaacatccagttattggagtccatgtcagacgcacagacaaagtgggaacagaagctgccttccatcccattgaagagtacatggtgcatgttgaagaacattttcagcttcttgcacgcagaatgcaagtggacaaaaaaagagtgtatttggccacagatgacccttctttattaaaggaggcaaaaacaaagtaccccaattatgaatttattagtgataactctatttcctggtcagctggactgcacaatcgatacacagaaaattcacttcgtggagtgatcctggatatacattttctctctcaggcagacttcctagtgtgtactttttcatcccaggtctgtcgagttgcttatgaaattatgcaaacactacatcctgatgcctctgcaaacttccattctttagatgacatctactattttgggggccagaatgcccacaatcaaattgccatttatgctcaccaaccccgaactgcagatgaaattcccatggaacctggagatatcattggtgtggctggaaatcattgggatggctattctaaaggtgtcaacaggaaattgggaaggacgggcctatatccctcctacaaagttcgagagaagatagaaacggtcaagtaccccacatatcctgaggctgagaaataaagctcagatggaagagataaacgaccaaactcagttcgaccaaactcagttcaaaccatttgagccaaactgtagatgaagagggctctgatctaacaaaataaggttatatgagtagatactctcagcaccaagagcagctgggaactgacataggcttcaattggtggaattcctctttaacaagggctgcaatgccctcatacccatgcacagtacaataatgtactcacatataacatgcaaacaggttgttttctactttgcccctttcagtatgtccccataagacaaacactgccatattgtgtaatttaagtgacacagacattttgtgtgagacttaaaacatggtgcctatatctgagagacctgtgtgaactattgagaagatcggaacagctccttactctgaggaagttgattcttatttgatggtggtattgtgaccactgaattcactccagtcaacagattcagaatgagaatggacgtttggtttttttttgtttttgtttttgttttttcctttataaggttgtctgtttttttttttttaaataattgcatcagttcattgacctcatcattaataagtgaagaatacatcagaaaataaaatattcactctccattagaaaattttgtaaaacaatgccatgaacaaattctttagtacctgcccgggcggccgctcgaaagggcg

SEQ ID NO: 423775 - DNA, 3557 bp, Homo sapiens
tacaaattgttattgaattattttattgaatgatgacacccaaactgagctagaacataattctggctctgctagtacatcttctgtgtgatcttggacaagtcactctactttcctttcaattttcttttctcacagggagataatcataaaaacgactgtaaagtacagcacttcatagagtgctttttgtttaaagagctgacaataaatacgagtctcaaggtctaggaaagcctccctcacaacctgagctgcttgaggacaagggattttcttttgaatcagcagtaccttatttgtgtatctgtgatagagttcctggtacataagagtctcaataaatatgtgaatttatgaatattaggcagattgcaaccttgacaggccactgcctcttaaatctcctttctgtgatcttttaatatttaacatctaaaaggccgccgctacttgctttgggataagtatccccggtatgtactttaaaatgcccaagcctagagaaatgattcttgtcttaagggcaccatttcgctctcccaccgtaaagcgccccaggcttgggatctgggtcccaaggctacagggaagagtttggaacgggaagctcatcttccggccctctgattggccggctcgcactccactcaccggcgcgcagctctgattggcctcggcggcacccctcgtcccgcgactactttgtgtgctggggcggcgcgctccggtcctcccgctcagctggcggtctgggctgctctggggcagcccttcggtccactgctctgcatcgcgggcgccgggaattttccgagtccgagcgggttgctgcttttgctcagaggacatccatgaccctaatggtctttttgttcaagataaagtgattttttgcctttgttgattaactggacaaattcagcatgtagagcgcatgaagtacaggacaataaagcttcctacacatatcaccaggaggatctctttgaaagattcactgcaggactaccagagagaataatttgtctgaagcatcatgtgttgaaacaacagaagtctattcacctgtgcactaactagaaacagagttacaatgttttcaattctttgagctccaggactccagggaagtgagttgaaaatctgaaaatgcggccatggactggttcctggcgttggattatgctcattctttttgcctgggggaccttgctgttttatataggtggtcacttggtacgagataatgaccatcctgatcactctagccgagaactgtccaagattctggcaaagcttgaacgcttaaaacagcagaatgaagacttgaggcgaatggccgaatctctccggataccagaaggccctattgatcaggggccagctataggaagagtacgcgttttagaagagcagcttgttaaggccaaagaacagattgaaaattacaagaaacagaccagaaatggtctggggaaggatcatgaaatcctgaggaggaggattgaaaatggagctaaagagctctggtttttcctacagagtgaattgaagaaattaaagaacttagaaggaaatgaactccaaagacatgcagatgaatttcttttggatttaggacatcatgaaaggtctataatgacggatctatactacctcagtcagacagatggagcaggtgattggcgggaaaaagaggccaaagatctgacagaactggttcagcggagaataacatatcttcagaatcccaaggactgcagcaaagccaaaaagctggtgtgtaatatcaacaaaggctgtggctatggctgtcagctccatcatgtggtctactgcttcatgattgcatatggcacccagcgaacactcatcttggaatctcagaattggcgctatgctactggtggatgggagactgtatttaggcctgtaagtgagacatgcacagacagatctggcatctccactggacactggtcaggtgaagtgaaggacaaaaatgttcaagtggtcgagcttcccattgtagacagtcttcatccccgtcctccatatttacccttggctgtaccagaagacctcgcagatcgacttgtacgagtgcatggtgaccctgcagtgtggtgggtgtctcagtttgtcaaatacttgatccgcccacagccttggctagaaaaagaaatagaagaagccaccaagaagcttggcttcaaacatccagttattggagtccatgtcagacgcacagacaaagtgggaacagaagctgccttccatcccattgaagagtacatggtgcatgttgaagaacattttcagcttcttgcacgcagaatgcaagtggacaaaaaaagagtgtatttggccacagatgacccttctttattaaaggaggcaaaaacaaagtaccccaattatgaatttattagtgataactctatttcctggtcagctggactgcacaatcgatacacagttcctagtgtgtactttttcatcccaggtctgtcgagttgcttatgaaattatgcaaacactacatcctgatgcctctgcaaacttccattctttagatgacatctactattttgggggccagaatgcccacaatcaaattgccatttatgctcaccaaccccgaactgcagatgaaattcccatggaacctggagatatcattggtgtggctggaaatcattgggatggctattctaaaggtgtcaacaggaaattgggaaggacgggcctatatccctcctacaaagttcgagagaagatagaaacggtcaagtaccccacatatcctgaggctgagaaataaagctcagatggaagagataaacgaccaaactcagttcgaccaaactcagttcaaaccatttgagccaaactgtagatgaagagggctctgatctaacaaaataaggttatatgagtagatactctcagcaccaagagcagctgggaactgacataggcttcaattggtggaattcctctttaacaagggctgcaatgccctcatacccatgcacagtacaataatgtactcacatataacatgcaaacaggttgttttctactttgcccctttcagtatgtccccataagacaaacactgccatattgtgtaatttaagtgacacagacattttgtgtgagacttaaaacatggtgcctatatctgagagacctgtgtgaactattgagaagatcggaacagctccttactctgaggaagttgattcttatttgatggtggtattgtgaccactgaattcactccagtcaacagattcagaatgagaatggacgtttggtttttttttgtttttgtttttgttttttcctttataaggttgtctgtttttttttttttaaataattgcatcagttcattgacctcatcattaataagtgaagaatacatcagaaaataaaatattcactctccattagaaaattttgtaaaacaatgccatgaacaaattctttagtactcaatgtttctggacattctctttgataacaaaaaataaattttaaaaagg

SEQ ID NO: 423776 - DNA, 658 bp, Homo sapiens
cctcattccacccccgccgcctggcccagcgacccgtcccttcgtctccccgcggaatggggccggcactgctcagggtcgcgcgccctggacccagctcgctctcggtctcgcgctgtcagcgactgcccggctcgcgccgcctcgcgctctgcctcagtcagtggcgccgaaggctccgttaagcggcggcggcggttcctgtttccgtttcttcctctccgttcggtcgggagtagcatcctccactcagccacccttcccactcccccatcgtggggcagctgcggctgagggctgtggctttggcagctgcgacggggagcggcggagaccgcctctgctcccgcctggggtaagggggcgttttgggagccgggccccgcgcgcctcggggtcttgggctgggctgcgcgcgggatctgaggaggctccgcggctgtccctgctcgttcacccgggcctgttgctgcaactgctgccggttaaccagcggctctcggaaaagtggggagggagcccccgggacgctctggcggatgccttggcgcagccccgggggcgcgggcagagggtgaggggcgcccgcctctccagccgggacgcggagctgcgccgctgctgccctcggcgtcgcgcatccttgcctagggcaggg

SEQ ID NO: 423777 - DNA, 1898 bp, Homo sapiens
ctccccgctgggggctcggcggccctctgaagcgggtggattggctggggtgcttcgctcagccaatccggacgcgcccgggcgtcgcggccccgcctcctccccggcgctctgggcccgtagcgctccgcgggaaggaggctggatgcccggcagcagtggggcggggatggaggcggccgtggcgccggggagggatgcgccggcacccgcggcgagtcagcccagcggctgcgggaaacacaactcgccggagaggaaagtttatatggactataatgcaacgactcccctggagccagaagttatccaggccatgaccaaggccatgtgggaagcctggggaaatcccagcagcccgtattcagcaggaagaaaggccaaggatattataaatgcagctcgggaaagcctcgcgaagatgataggggggaaacctcaagatataatcttcacttccgggggcactgagtcaaataatttagtaatccattctgtggtgaaacatttccacgcaaaccagacctcaaagggacacacaggtgggcaccacagcccagtgaagggggccaagccccatttcattacttcctcggtggaacacgactccatccggctgcccctggagcacctggtggaagaacaagtggcagcggtcacctttgtcccggtgtccaaggtgagcgggcagacagaggtggacgacatcctcgcggcagtccgcccgaccacacgcctcgtgaccatcatgctggccaacaatgagactggcattgtcatgcctgtccctgaaatcagtcagcgcattaaagccctgaaccaggaacgggtggcagctgggctacctcccatcctcgtgcacacggatgctgcacaggccttggggaagcagcgcgtggatgtggaggacctgggcgtggacttccttacaatcgtggggcacaagttttatggtcccaggattggcgcactttatatacgaggacttggtgaatttacccctctctaccctatgctatttggaggtggacaagaacggaatttcaggccagggacagagaacaccccaatgattgctggccttgggaaggtgagccctggtgagcttgaggagatgagttgattgctttgtcatcagtgtccccagcggctctagtaggaatctggggctttagggagatcatattcgtgatctcataagcggactgacaagaaaaagcctggaatctgatttatcaacctggagagctgtactttttcagatctgtggattagtggcacttgtttagcatttaaaagggaaaaactccttgtctgtgtctcttctgacatgagaaacagtgatactgttacagcagaggtgaagtgtcaagctgcaggttcaccattcccaaaggcgtcggcagcccccgcaccatcgacgttctgtccccgattggtctgtggggtggccaatccagcacctgccaccagccctccactggggcctgtcctgcttctgcgacagtaaccaggctcaggttttgccgtgcgaaggcagaggtactggttacacctcggcgtctgcaggctgctccctcactgtgcggcctctggtcaaaggccaccaccttcaagcaaccctccatgaaccacagctacattggttcccccatgtcccctgctgtcaccctctatccctgacactgctttatttcccctatctgatgtttctctgtagtgtgttcagatgtatgccccaccttctgcttccccgagagcaggggcttggccatgtcggcctcagtatccccagtacagagaaaggcttagcgcccaggaggccgggccttgggaagagtatgaatggattccctgttacttagaatattcaaaattatattattaacagtgataac

SEQ ID NO: 423778 - DNA, 1604 bp, Homo sapiens
ctccccgctgggggctcggcggccctctgaagcgggtggattggctggggtgcttcgctcagccaatccggacgcgcccgggcgtcgcggccccgcctcctccccggcgctctgggcccgtagcgctccgcgggaaggaggctggatgcccggcagcagtggggcggggatggaggcggccgtggcgccggggagggatgcgccggcacccgcggcgagtcagcccagcggctgcgggaaacacaactcgccggagaggaaagtttatatggactataatgcaacgactcccctggagccagaagttatccaggccatgaccaaggccatgtgggaagcctggggaaatcccagcagcccgtattcagcaggaagaaaggccaaggatattataaatgcagctcgggaaagcctcgcgaagatgataggggggaaacctcaagatataatcttcacttccgggggcactgagtcaaataatttagtaatccattctgtggtgaaacatttccacgcaaaccagacctcaaagggacacacaggtgggcaccacagcccagtgaagggggccaagccccatttcattacttcctcggtggaacacgactccatccggctgcccctggagcacctggtggaagaacaagtggcagcggtcacctttgtcccggtgtccaaggtgagcgggcagacagaggtggacgacatcctcgcggcagtccgcccgaccacacgcctcgtgaccatcatgctggccaacaatgagactggcattgtcatgcctgtccctgaaatcagtcagcgcattaaagccctgaaccaggaacgggtggcagctgggctacctcccatcctcgtgcacacggatgctgcacaggccttggggaagcagcgcgtggatgtggaggacctgggcgtggacttccttacaatcgtggggcacaagttttatggtcccaggattggcgcactttatatacgaggacttggtgaatttacccctctctaccctatgctatttggaggtggacaagaacggaatttcaggccagggacagagaacaccccaatgattgctggccttgggaaggccgcggagctggtgacccagaactgcgaggcttatgaggcccacatgagggacgtccgcgactacctggaagagaggctggaagctgaattcggtcagaagagaatccatctgaatagccagtttccaggcacccagcggcttcccaatacctgtaacttttccatccggggaccccggcttcaaggtgatggcccctcaccctggtctttccgagtgtgagcacagctccctcggtgcgtggattctggtccgagccagtgactcccactcgccctgccctgagcatgacacagctcgggctgtcagagggccttgctggggttgccaagagcaggctcgggtggctgtgctgtggtccacagggctctcgccgctggcccctcctctccctgacgtggctcattttgctgctgctgggatgtggactgtggcaaactctcgtgtctggcattagcgccaccccaaaagccgtcagggaaggaagcaacattaaattctagacatttgtcta

SEQ ID NO: 423779 - DNA, 1404 bp, Homo sapiens
ctccccgctgggggctcggcggccctctgaagcgggtggattggctggggtgcttcgctcagccaatccggacgcgcccgggcgtcgcggccccgcctcctccccggcgctctgggcccgtagcgctccgcgggaaggaggctggatgcccggcagcagtggggcggggatggaggcggccgtggcgccggggagggatgcgccggcacccgcggcgagtcagcccagcggctgcgggaaacacaactcgccggagaggaaagtttatatggactataatgcaacgactcccctggagccagaagttatccaggccatgaccaaggccatgtgggaagcctggggaaatcccagcagcccgtattcagcaggaagaaaggccaaggatattataaatgcagctcgggaaagcctcgcgaagatgataggggggaaacctcaagatataatcttcacttccgggggcactgagtcaaataatttagtaatccattctgtggtgaaacatttccacgcaaaccagacctcaaagggacacacaggtgggcaccacagcccagtgaagggggccaagccccatttcattacttcctcggtggaacacgactccatccggctgcccctggagcacctggtggaagaacaagtggcagcggtcacctttgtcccggtgtccaaggtgagcgggcagacagaggtggacgacatcctcgcggcagtccgcccgaccacacgcctcgtgaccatcatgctggccaacaatgagactggcattgtcatgcctgtccctgaaatcagtcagcgcattaaagccctgaaccaggaacgggtggcagctgggctacctcccatcctcgtgcacacggatgctgcacaggccttggggaagcagcgcgtggatgtggaggacctgggcgtggacttccttacaatcgtggggcacaagttttatggtcccaggattggcgcactttatatacgaggacttggtgaatttacccctcctgcttccccgagcctgaccctgttccgcccactggcaatcagggctgcgcacttccctgtccacggtccccaggccttcctgtcttgtcccttttgatcattaactcagggtttcagctccaacctcgctgagttggtgcagctccgggtcattcctggggtgggaatcggatcatccctgactcagcttataccttaattttatttgcagaggattcttttctcaaaatgctctggcatttggacacacatcacatgtcgatatttgcataggagtcattttcagtggaataacatttttaatgtgtggttttacggttcaaggaactacatgatgattttgaggaaacacttgccagaaactaaattaacgaataaaagatttcagtgcccgacttg

SEQ ID NO: 423780 - DNA, 1791 bp, Homo sapiens
ctccccgctgggggctcggcggccctctgaagcgggtggattggctggggtgcttcgctcagccaatccggacgcgcccgggcgtcgcggccccgcctcctccccggcgctctgggcccgtagcgctccgcgggaaggaggctggatgcccggcagcagtggggcggggatggaggcggccgtggcgccggggagggatgcgccggcacccgcggcgagtcagcccagcggctgcgggaaacacaactcgccggagaggaaagtttatatggactataatgcaacgactcccctggagccagaagttatccaggccatgaccaaggccatgtgggaagcctggggaaatcccagcagcccgtattcagcaggaagaaaggccaaggatattataaatgcagctcgggaaagcctcgcgaagatgataggggggaaacctcaagatataatcttcacttccgggggcactgagtcaaataatttagtaatccattctgtggtgaaacatttccacgcaaaccagacctcaaagggacacacaggtgggcaccacagcccagtgaagggggccaagccccatttcattacttcctcggtggaacacgactccatccggctgcccctggagcacctggtggaagaacaagtggcagcggtcacctttgtcccggtgtccaaggtgagcgggcagacagaggtggacgacatcctcgcggcagtccgcccgaccacacgcctcgtgaccatcatgctggccaacaatgagactggcattgtcatgcctgtccctgaaatcagtcagcgcattaaagccctgaaccaggaacgggtggcagctgggctacctcccatcctcgtgcacacggatgctgcacaggccttggggaagcagcgcgtggatgtggaggacctgggcgtggacttccttacaatcgtggggcacaaggacagagaacaccccaatgattgctggccttgggaaggtgagccctggtgagcttgaggagatgagttgattgctttgtcatcagtgtccccagcggctctagtaggaatctggggctttagggagatcatattcgtgatctcataagcggactgacaagaaaaagcctggaatctgatttatcaacctggagagctgtactttttcagatctgtggattagtggcacttgtttagcatttaaaagggaaaaactccttgtctgtgtctcttctgacatgagaaacagtgatactgttacagcagaggtgaagtgtcaagctgcaggttcaccattcccaaaggcgtcggcagcccccgcaccatcgacgttctgtccccgattggtctgtggggtggccaatccagcacctgccaccagccctccactggggcctgtcctgcttctgcgacagtaaccaggctcaggttttgccgtgcgaaggcagaggtactggttacacctcggcgtctgcaggctgctccctcactgtgcggcctctggtcaaaggccaccaccttcaagcaaccctccatgaaccacagctacattggttcccccatgtcccctgctgtcaccctctatccctgacactgctttatttcccctatctgatgtttctctgtagtgtgttcagatgtatgccccaccttctgcttccccgagagcaggggcttggccatgtcggcctcagtatccccagtacagagaaaggcttagcgcccaggaggccgggccttgggaagagtatgaatggattccctgttacttagaatattcaaaattatattattaacagtgataac

SEQ ID NO: 423781 - DNA, 2149 bp, Homo sapiens
aacgagaaatatgtacgagtgcggtgcgcgggttgttatttcagtacaggggtggggcggggatggaggcggccgtggcgccggggagggatgcgccggcacccgcggcgagtcagcccagcggctgcgggaaacacaactcgccggagaggaaagtttatatggactataatgcaacgactcccctggagccagaagttatccaggccatgaccaaggccatgtgggaagcctggggaaatcccagcagcccgtattcagcagcggtcacctttgtcccggtgtccaaggtgagcgggcagacagaggtggacgacatcctcgcggcagtccgcccgaccacacgcctcgtgaccatcatgctggccaacaatgagactggcattgtcatgcctgtccctgaaatcagtcagcgcattaaagccctgaaccaggaacgggtggcagctgggctacctcccatcctcgtgcacacggatgctgcacaggccttggggaagcagcgcgtggatgtggaggacctgggcgtggacttccttacaatcgtggggcacaagttttatggtcccaggattggcgcactttatatacgaggacttggtgaatttacccctctctaccctatgctatttggaggtggacaagaacggaatttcaggccagggacagagaacaccccaatgattgctggccttgggaaggccgcggagctggtgacccagaactgcgaggcttatgaggcccacatgagggacgtccgcgactacctggaagagaggctggaagctgaattcggtcagaagagaatccatctgaatagccagtttccaggcacccagcggcttcccaatacctgtaacttttccatccggggaccccggcttcaaggccacgtggtgcttgcgcagtgccgagtgctgatggccagtgtgggggccgcgtgccactcggaccacggggaccagccgtccccagtgctgctgagctacggtgtccccttcgacgtggccaggaacgcgctccggctcagcgtgggccgcagcaccaccagggccgaggtggacctcgtcgtgcaggacctgaagcaggccgtggcgcagctggaggaccaggcctagcactggggccgccttccccaccccgcttctgggaagcccgtggcagggcacagggttgtccctccagttccctcctgagggctgtgccaggatgactgtctcatgccccctctgcattttgtcctggagtgccagcgagtgtgcacccccagtttccttccctggacccctgcagagctcacagggcccaggacaccaacgccgcataggactgcccacatgggaccgcccacatgggaccgcccacatgggaccgcccacatgggaccgcccacatagaaccgtcctccagtggtgaagcggaaacacttagctttatccaccctccccactgggaactgggcacgcctgttgtgagtgccctttcctggaaggtgtttttatctggaagatagaatccaagtatttataactcattgtcagccaaatgctatcatgaacgtaggaaacttgatttttttgttttgatcatggcctctacatgcacctttccagagtggtctcttctcaggccctttttagtccctttccaaagctgcccccaccaccctgctcctctggcctcagtgcacagtggcccccagcctcggccaggcctgctctgctcagcgcccaccgcccaccacccctcctgcttccccgagcctgaccctgttccgcccactggcaatcagggctgcgcacttccctgtccacggtccccaggccttcctgtcttgtcccttttgatcattaactcagggtttcagctccaacctcgctgagttggtgcagctccgggtcattcctggggtgggaatcggatcatccctgactcagcttataccttaattttatttgcagaggattcttttctcaaaatgctctggcatttggacacacatcacatgtcgatatttgcataggagtcattttcagtggaataacatttttaatgtgtggttttacggttcaaggaactacatgatgattttgaggaaacacttgccagaaactaaattaacgaataaaagatttcagtgcccgacttg

SEQ ID NO: 423782 - DNA, 1012 bp, Homo sapiens
ctccccgctgggggctcggcggccctctgaagcgggtggattggctggggtgcttcgctcagccaatccggacgcgcccgggcgtcgcggccccgcctcctccccggcgctctgggcccgtagcgctccgcgggaaggaggctggatgcccggcagcagtggggcggggatggaggcggccgtggcgccggggagggatgcgccggcacccgcggcgagtcagcccagcggctgcgggaaacacaactcgccggagaggaaagtttatatggactataatgcaacgactcccctggagccagaagttatccaggccatgaccaaggccatgtgggaagcctggggaaatcccagcagcccgtattcagcaggaagaaaggccaaggatattataaatgcagctcgggaaagcctcgcgaagatgataggggggaaacctcaagatataatcttcacttccgggggcactgagtcaaataatttagtaatccattctgtggtgaaacatttccacgcaaaccagacctcaaagggacacacaggtgggcaccacagcccagtgaagggggccaagccccatttcattacttcctcggtggaacacgactccatccggctgcccctggagcacctggtggaagaacaagtggcaggtgagtgagtgcagggtggccctgggaccagcctgctgagctccagctgcgaggcgggaagtggcctgcgagcagagcccgggatccgctgcagagatgtagattcagtgtgccactcactgtaactcactggttctgatgaggaggcaggccctggcaccttggtgaatagttgcccctcactgcactgggctccctggctgcccctctcggtgcagaggccagctgccacaagggggttggcaagtgtggccaaactttcccttaggaagttcattgagaatgaatatgtagaactagccatttgtataactgagtgatatttgaaacttgcatgtaataaatatttaacctttaaa

SEQ ID NO: 423783 - DNA, 890 bp, Homo sapiens
aacgagaaatatgtacgagtgcggtgcgcgggttgttatttcagtacaggggtggggcggggatggaggcggccgtggcgccggggagggatgcgccggcacccgcggcgagtcagcccagcggctgcgggaaacacaactcgccggagaggaaagtttatatggactataatgcaacgactcccctggagccagaagttatccaggccatgaccaaggccatgtgggaagcctggggaaatcccagcagcccgtattcagcaggtaattctagaagatgcacgtgttcactgatgggagataatggggatggggcgctcttagagaaattgcacacccacacgtgacggctttgttttgaataggtttctgttagctgcaattcttgagctgtaatttttgatagtttcttttctgggaaggccccatttgtaagctgagccttgtcgatactgtaatctttaacctttaatgtttaatctttaacatgctgtcctgtcaccctttcccagatgagaaaggtgtctactgagagttccttgaagtagcagtcagtacctgtggagcacttcacagatctagctcagtcaatccttacagaatttgcaaaatatgtcttttaggtcatcaggataacatataatcctggccctttttaaagatgaaaattactttttcattaattactttagttatgaatattcttatttgtttccaatttattcttattgtaatgtagaccattaaattggaggttttggagaagaatttgcttcaagtcagttatatgacagagttacattctgtttttcagacagatgagcaagctaaagtcttacctttcttatttcatgtttatgagagataattaagataaactgtgttaactg

SEQ ID NO: 423784 - DNA, 1791 bp, Homo sapiens
aacgagaaatatgtacgagtgcggtgcgcgggttgttatttcagtacaggggtggggcggggatggaggcggccgtggcgccggggagggatgcgccggcacccgcggcgagtcagcccagcggctgcgggaaacacaactcgccggagaggaaagtttatatggactataatgcaacgactcccctggagccagaagttatccaggccatgaccaaggccatgtgggaagcctggggaaatcccagcagcccgtattcagcaggaagaaaggccaaggatattataaatgcagctcgggaaagcctcgcgaagatgataggggggaaacctcaagatataatcttcacttccgggggcactgagtcaaataatttagtaatccattctgtggtgaaacatttccacgcaaaccagacctcaaagggacacacaggtgggcaccacagcccagtgaagggggccaagccccatttcattacttcctcggtggaacacgactccatccggctgcccctggagcacctggtggaagaacaagtggcagcggtcacctttgtcccggtgtccaaggtgagcgggcagacagaggtggacgacatcctcgcggcagtccgcccgaccacacgcctcgtgaccatcatgctggccaacaatgagactggcattgtcatgcctgtccctgaaatcagtcagcgcattaaagccctgaaccaggaacgggtggcagctgggctacctcccatcctcgtgcacacggatgctgcacaggccttggggaagcagcgcgtggatgtggaggacctgggcgtggacttccttacaatcgtggggcacaagttttatggtcccaggattggcgcactttatatacgaggacttggtgaatttacccctctctaccctatgctatttggaggtggacaagaacggaatttcaggccagggacagagaacaccccaatgattgctggccttgggaaggtgagccctggtgagcttgaggagatgagttgattgctttgtcatcagtgtccccagcggctctagtaggaatctggggctttagggagatcatattcgtgatctcataagcggactgacaagaaaaagcctggaatctgatttatcaacctggagagctgtactttttcagatctgtggattagtggcacttgtttagcatttaaaagggaaaaactccttgtctgtgtctcttctgacatgagaaacagtgatactgttacagcagaggtgaagtgtcaagctgcaggttcaccattcccaaaggcgtcggcagcccccgcaccatcgacgttctgtccccgattggtctgtggggtggccaatccagcacctgccaccagccctccactggggcctgtcctgcttctgcgacagtaaccaggctcaggttttgccgtgcgaaggcagaggtactggttacacctcggcgtctgcaggctgctccctcactgtgcggcctctggtcaaaggccaccaccttcaagcaaccctccatgaaccacagctacattggttcccccatgtcccctgctgtcaccctctatccctgacactgctttatttcccctatctgatgtttctctgtagtgtgttcagatgtatgccccaccttctgcttccccgagagcaggggcttggccatgtcggcctcagtatccccagtacagagaaaggcttagcgcccaggaggccgggccttgggaagagtatgaatggattccctgttacttagaatattcaaaattatattattaacagtgataac

SEQ ID NO: 423785 - DNA, 2538 bp, Homo sapiens
ctccccgctgggggctcggcggccctctgaagcgggtggattggctggggtgcttcgctcagccaatccggacgcgcccgggcgtcgcggccccgcctcctccccggcgctctgggcccgtagcgctccgcgggaaggaggctggatgcccggcagcagtggggcggggatggaggcggccgtggcgccggggagggatgcgccggcacccgcggcgagtcagcccagcggctgcgggaaacacaactcgccggagaggaaagtttatatggactataatgcaacgactcccctggagccagaagttatccaggccatgaccaaggccatgtgggaagcctggggaaatcccagcagcccgtattcagcaggaagaaaggccaaggatattataaatgcagctcgggaaagcctcgcgaagatgataggggggaaacctcaagatataatcttcacttccgggggcactgagtcaaataatttagtaatccattctgtggtgaaacatttccacgcaaaccagacctcaaagggacacacaggtgggcaccacagcccagtgaagggggccaagccccatttcattacttcctcggtggaacacgactccatccggctgcccctggagcacctggtggaagaacaagtggcagcggtcacctttgtcccggtgtccaaggtgagcgggcagacagaggtggacgacatcctcgcggcagtccgcccgaccacacgcctcgtgaccatcatgctggccaacaatgagactggcattgtcatgcctgtccctgaaatcagtcagcgcattaaagccctgaaccaggaacgggtggcagctgggctacctcccatcctcgtgcacacggatgctgcacaggccttggggaagcagcgcgtggatgtggaggacctgggcgtggacttccttacaatcgtggggcacaagttttatggtcccaggattggcgcactttatatacgaggacttggtgaatttacccctctctaccctatgctatttggaggtggacaagaacggaatttcaggccagggacagagaacaccccaatgattgctggccttgggaaggccgcggagctggtgacccagaactgcgaggcttatgaggcccacatgagggacgtccgcgactacctggaagagaggctggaagctgaattcggtcagaagagaatccatctgaatagccagtttccaggcacccagcggcttcccaatacctgtaacttttccatccggggaccccggcttcaaggccacgtggtgcttgcgcagtgccgagtgctgatggccagtgtgggggccgcgtgccactcggaccacggggaccagccgtccccagtgctgctgagctacggtgtccccttcgacgtggccaggaacgcgctccggctcagcgtgggccgcagcaccaccagggccgaggtggacctcgtcgtgcaggacctgaagcaggccgtggcgcagctggaggaccaggcctagcactggggccgccttccccaccccgcttctgggaagcccgtggcagggcacagggttgtccctccagttccctcctgagggctgtgccaggatgactgtctcatgccccctctgcattttgtcctggagtgccagcgagtgtgcacccccagtttccttccctggacccctgcagagctcacagggcccaggacaccaacgccgcataggactgcccacatgggaccgcccacatgggaccgcccacatgggaccgcccacatgggaccgcccacatagaaccgtcctccagtggtgaagcggaaacacttagctttatccaccctccccactgggaactgggcacgcctgttgtgagtgccctttcctggaaggtgtttttatctggaagatagaatccaagtatttataactcattgtcagccaaatgctatcatgaacgtaggaaacttgatttttttgttttgatcatggcctctacatgcacctttccagagtggtctcttctcaggccctttttagtccctttccaaagctgcccccaccaccctgctcctctggcctcagtgcacagtggcccccagcctcggccaggcctgctctgctcagcgcccaccgcccaccacccctcctgcttccccgagcctgaccctgttccgcccactggcaatcagggctgcgcacttccctgtccacggtccccaggccttcctgtcttgtcccttttgatcattaactcagggtttcagctccaacctcgctgagttggtgcagctccgggtcattcctggggtgggaatcggatcatccctgactcagcttataccttaattttatttgcagaggattcttttctcaaaatgctctggcatttggacacacatcacatgtcgatatttgcataggagtcattttcagtggaataacatttttaatgtgtggttttacggttcaaggaactacatgatgattttgaggaaacacttgccagaaactaaattaacgaataaaagatttcagtgcccgacttg

SEQ ID NO: 423786 - DNA, 1457 bp, Homo sapiens
ctccccgctgggggctcggcggccctctgaagcgggtggattggctggggtgcttcgctcagccaatccggacgcgcccgggcgtcgcggccccgcctcctccccggcgctctgggcccgtagcgctccgcgggaaggaggctggatgcccggcagcagtggggcggggatggaggcggccgtggcgccggggagggatgcgccggcacccgcggcgagtcagcccagcggctgcgggaaacacaactcgccggagaggaaagtttatatggactataatgcaacgactcccctggagccagaagttatccaggccatgaccaaggccatgtgggaagcctggggaaatcccagcagcccgtattcagcaggaagaaaggccaaggatattataaatgcagctcgggaaagcctcgcgaagatgataggggggaaacctcaagatataatcttcacttccgggggcactgagtcaaataatttagtaatccattctgtggtgaaacatttccacgcaaaccagacctcaaagggacacacaggtgggcaccacagcccagtgaagggggccaagccccatttcattacttcctcggtggaacacgactccatccggctgcccctggagcacctggtggaagaacaagtggcagcggtcacctttgtcccggtgtccaaggtgagcgggcagacagaggtggacgacatcctcgcggcagtccgcccgaccacacgcctcgtgaccatcatgctggccaacaatgagactggcattgtcatgcctgtccctgaaatcagtcagcgcattaaagccctgaaccaggaacgggtggcagctgggctacctcccatcctcgtgcacacggatgctgcacaggccttggggaagcagcgcgtggatgtggaggacctgggcgtggacttccttacaatcgtggggcacaagttttatggtcccaggattggcgcactttatatacgaggacttggtgaatttacccctctctaccctatgctatttggaggtggacaagaacggaatttcaggccagggacagagaacaccccaatgattgctggccttgggaaggctgaattcggtcagaagagaatccatctgaatagccagtttccaggcacccagcggcttcccaatacctgtaacttttccatccggggaccccggcttcaaggccacgtggtgcttgcgcagtgccgagtgctgatggccagtgtgggggccgcgtgccactcggaccacggggaccaaggattcttttctcaaaatgctctggcatttggacacacatcacatgtcgatatttgcataggagtcattttcagtggaataacatttttaatgtgtggttttacggttcaaggaactacatgatgattttgaggaaacacttgccagaaactaaattaacgaataaaagatttcagtgcccgacttg

SEQ ID NO: 423787 - DNA, 2637 bp, Homo sapiens
aacgagaaatatgtacgagtgcggtgcgcgggttgttatttcagtacaggggtggggcggggatggaggcggccgtggcgccggggagggatgcgccggcacccgcggcgagtcagcccagcggctgcgggaaacacaactcgccggagaggtgcgcgcctttagggcagggctggggagcggccggcgcctgtcgccgattgtcccgcgcgggaggacgaagggggctcccggcctgtggccgctctcgcgtggggcgtcccgcgcggggatgtccgcgaggtcggcctaagtcagggatgcgagcttcaaggaggagcgggtgcgagctgtggccccgcaagggcccacggagaggaaagtttatatggactataatgcaacgactcccctggagccagaagttatccaggccatgaccaaggccatgtgggaagcctggggaaatcccagcagcccgtattcagcaggaagaaaggccaaggatattataaatgcagctcgggaaagcctcgcgaagatgataggggggaaacctcaagatataatcttcacttccgggggcactgagtcaaataatttagtaatccattctgtggtgaaacatttccacgcaaaccagacctcaaagggacacacaggtgggcaccacagcccagtgaagggggccaagccccatttcattacttcctcggtggaacacgactccatccggctgcccctggagcacctggtggaagaacaagtggcagcggtcacctttgtcccggtgtccaaggtgagcgggcagacagaggtggacgacatcctcgcggcagtccgcccgaccacacgcctcgtgaccatcatgctggccaacaatgagactggcattgtcatgcctgtccctgaaatcagtcagcgcattaaagccctgaaccaggaacgggtggcagctgggctacctcccatcctcgtgcacacggatgctgcacaggccttggggaagcagcgcgtggatgtggaggacctgggcgtggacttccttacaatcgtggggcacaagttttatggtcccaggattggcgcactttatatacgaggacttggtgaatttacccctctctaccctatgctatttggaggtggacaagaacggaatttcaggccagggacagagaacaccccaatgattgctggccttgggaaggccgcggagctggtgacccagaactgcgaggcttatgaggcccacatgagggacgtccgcgactacctggaagagaggctggaagctgaattcggtcagaagagaatccatctgaatagccagtttccaggcacccagcggcttcccaatacctgtaacttttccatccggggaccccggcttcaaggccacgtggtgcttgcgcagtgccgagtgctgatggccagtgtgggggccgcgtgccactcggaccacggggaccagccgtccccagtgctgctgagctacggtgtccccttcgacgtggccaggaacgcgctccggctcagcgtgggccgcagcaccaccagggccgaggtggacctcgtcgtgcaggacctgaagcaggccgtggcgcagctggaggaccaggcctagcactggggccgccttccccaccccgcttctgggaagcccgtggcagggcacagggttgtccctccagttccctcctgagggctgtgccaggatgactgtctcatgccccctctgcattttgtcctggagtgccagcgagtgtgcacccccagtttccttccctggacccctgcagagctcacagggcccaggacaccaacgccgcataggactgcccacatgggaccgcccacatgggaccgcccacatgggaccgcccacatgggaccgcccacatagaaccgtcctccagtggtgaagcggaaacacttagctttatccaccctccccactgggaactgggcacgcctgttgtgagtgccctttcctggaaggtgtttttatctggaagatagaatccaagtatttataactcattgtcagccaaatgctatcatgaacgtaggaaacttgatttttttgttttgatcatggcctctacatgcacctttccagagtggtctcttctcaggccctttttagtccctttccaaagctgcccccaccaccctgctcctctggcctcagtgcacagtggcccccagcctcggccaggcctgctctgctcagcgcccaccgcccaccacccctcctgcttccccgagcctgaccctgttccgcccactggcaatcagggctgcgcacttccctgtccacggtccccaggccttcctgtcttgtcccttttgatcattaactcagggtttcagctccaacctcgctgagttggtgcagctccgggtcattcctggggtgggaatcggatcatccctgactcagcttataccttaattttatttgcagaggattcttttctcaaaatgctctggcatttggacacacatcacatgtcgatatttgcataggagtcattttcagtggaataacatttttaatgtgtggttttacggttcaaggaactacatgatgattttgaggaaacacttgccagaaactaaattaacgaataaaagatttcagtgcccgacttg

SEQ ID NO: 423788 - DNA, 950 bp, Homo sapiens
ggggaacgcccacatagaaccgcccacataggaccgcccacatgggaccgcccacatagaaccgtccacatgggaccgcccacatggcaacgccgcataggactgcccacatgggaccgcccacataggaccgcccacataggaccgcccacatgggaccgcccacatgggaccgcccacatgggaccgcccacatagaaccgtcctccagtggtgaagcggaaacacttagctttatccaccctccccactgggaactgggcacgcctgttgtgagtgccctttcctggaaggtgtttttatctggaagatagaatccaagtatttataactcattgtcagccaaatgctatcatgaacgtaggaaacttgatttttttgttttgatcatggcctctacatgcacctttccagagtggtctcttctcaggccctttttagtccctttccaaagctgcccccaccaccctgctcctctggcctcagtgcacagtggcccccagcctcggccaggcctgctctgctcagcgcccaccgcccaccacccctcctgcttccccgagcctgaccctgttccgcccactggcaatcagggctgcgcacttccctgtccacggtccccaggccttcctgtcttgtcccttttgatcattaactcagggtttcagctccaacctcgctgagttggtgcagctccgggtcattcctggggtgggaatcggatcatccctgactcagcttataccttaattttatttgcagaggattcttttctcaaaatgctctggcatttggacacacatcacatgtcgatatttgcataggagtcattttcagtggaataacatttttaatgtgtggttttacggttcaaggaactacatgatgattttgaggaaacacttgccagaaactaaattaacgaataaaagatttcagtgcccgacttg

SEQ ID NO: 423789 - DNA, 306 bp, Homo sapiens
gtagcaatggggtcttactctactgtccaggccggtctcgaactcctggcctcaagtgatcttcccacctagcctcccacagtgctgggattacaggcatgagccaatgcgcctggccaggatcatgattttttaaaaatctctgattttttgaattttacaatttttttttgcattttgcattttgatttgaattttgcaaattttggggtaataaatatgtactgtttctataatcagaaaatatgatccagccccctcttccccacagtacaaaaacatcacctttttccttgaataaaactg

SEQ ID NO: 423790 - DNA, 446 bp, Homo sapiens
cacttggaagcagaaaggcaggttctgagcagccccacaccagcaggtactacctgccataaggtttgtgttgcagccactgcagtcactgctgctgccaccacaactacagttcatagccagtaacagccttcacatgaatgatgtgtagacaccacttttgtctctgaacgcttgacaacaattaggacctgactccaggagcaggacgtcacaggaacaccggaatactggagaaatgaggttagagcaaagaaattagccatctgcctggtgaagactgtgtcctcgaggtagcatttacataggaacaacaggcaacacgtatccattttcattatcctgtgctacagatagacagaggacaaaagggctttaagaaccgtgttttctttaaggcccctgtacttagcgaggctgtatgtccttttttccccttcattcaa

SEQ ID NO: 423791 - DNA, 1799 bp, Homo sapiens
gccgagcggagaggccgcccattggccggccagcgccacgtggccgcccccgccggtatattaggccactatttacctccggctcactcgccatgggttggagagggcagctcgggtagagagggctggcggagcggcgcagacggcggcagtcctgctcagcctctgcccggctccgtactccggccccggcctgcgccccgaccctcgccttcgcccccggccgcccccgcgcggccgtccgtaccgcctccggccgcgccccagtacgcgcagtgcaccctggagggggcctacgaacctggtgccgcacctgccgcggcagctgggggcgcggactacggcttcctggggtccgggccggcgtacgacttcccgggcgtgctggggcgggcggccttttccggcttgtctcaaagcgtcagccgacggccaccctggtgctttccagaccgcatccccggccccaggcacctaccccaagtccgtctctcccgcctccggcctccctgccgccttcagcacgttcgagtggatgaaagtgaagaggaatgcctctaagaaagacagcggtttgggttttgtggaggagacgcgttcccgggcgaattccatggagtctgcctcgagtacagattcggaaaatgtgccaggcattgagaaaatttcaggaaggagctctccgtggaacttctcctggcaaactcgccgagtatggggccgctagcccctccagcgcgatccgcacgaatttcagcaccaagcaactgacagaactggaaaaagagtttcatttcaataagtacttaactcgagcccggcgcatcgagatagccaactgcttgcacctgaatgacacgcaagtcaaaatctggttccagaaccgcaggatgaaacagaagaaaagggaacgagaagggcttctggccacggccattcctgtggctcccctccaacttcccctctctggaacaacccccactaagtttatcaagaaccccggcagcccttctcagtcccaagagccttcgtgaggccggtacttggggccgaaaaactgtggcctgcagaagtcccaggcgacccccatccctatctagacttaggagctcagtttgggatggaggtgggagaacaaaaatgaatagggatttcacttgggaaatgaagtactttagttggcttccgagttccagactatatgtccagatattaattgactgtcttgtaagccacttgtttggttatgatttgtgtcttatcagggaaaaggtgcccagctgccagcccagctccgctgctatctttgcctcacttagtcatgtgcaattcgcgttgcagagtggcagaccattagttgctgagttctgtcagcactctgatgtgctcagaagagcacctgcccaaagtttttctggttttaatttaaaggacaaggctacatatattcagctttttgagatgaccaaagctagttagggtctccttgatgtagctaagctgcttcagtgatcttcacatttgcactccagtttttttttctttaaaaaagcggtttctacctctctatgtgcctgagtgatgatacaatcgctgtttagttactagatgaacaaatccacagaatgggtaaagagtagaatctgaactatatcttgacaaatattattcaaacttgaatgtaaatatatacagtatgtatattttttaaaaagatttgcttgcaatgaccttataagtgacatttaatgtcatagcatgtaaagggttttttttgtaataaaaattatagaatctgc

SEQ ID NO: 423792 - DNA, 1975 bp, Homo sapiens
gccgagcggagaggccgcccattggccggccagcgccacgtggccgcccccgccggtatattaggccactatttacctccggctcactcgccatgggttggagagggcagctcgggtagagagggctggcggagcggcgcagacggcggcagtcctgctcagcctctgcccggctccgtactccggccccggcctgcgccctcagaaaggtggggcccgaaccatgagctcctacctggagtacgtgtcatgcagcagcagcggcggggtcggcggcgacgtgctcagcttggcacccaagttctgccgctccgacgcccggcccgtggctctgcagcccgccttccctctgggcaacggcgacggcgccttcgtcagctgtctgcccctggccgccgcccgaccctcgccttcgcccccggccgcccccgcgcggccgtccgtaccgcctccggccgcgccccagtacgcgcagtgcaccctggagggggcctacgaacctggtgccgcacctgccgcggcagctgggggcgcggactacggcttcctggggtccgggccggcgtacgacttcccgggcgtgctggggcgggcggccgacgacggcgggtctcacgtccactacgccacctcggccgtcttctcgggcggcggctctttcctcctcagcggccaggtggattacgcggccttcggcgaacccggcccttttccggcttgtctcaaagcgtcagccgacggccaccctggtgctttccagaccgcatccccggccccaggcacctaccccaagtccgtctctcccgcctccggcctccctgccgccttcagcacgttcgagtggatgaaagtgaagaggaatgcctctaagaaaggcaaactcgccgagtatggggccgctagcccctccagcgcgatccgcacgaatttcagcaccaagcaactgacagaactggaaaaagagtttcatttcaataagtacttaactcgagcccggcgcatcgagatagccaactgcttgcacctgaatgacacgcaagtcaaaatctggttccagaaccgcaggatgaaacagaagaaaagggaacgagaagggcttctggccacggccattcctgtggctcccctccaacttcccctctctggaacaacccccactaagtttatcaagaaccccggcagcccttctcagtcccaagagccttcgtgaggccggtacttggggccgaaaaactgtggcctgcagaagtcccaggcgacccccatccctatctagacttaggagctcagtttgggatggaggtgggagaacaaaaatgaatagggatttcacttgggaaatgaagtactttagttggcttccgagttccagactatatgtccagatattaattgactgtcttgtaagccacttgtttggttatgatttgtgtcttatcagggaaaaggtgcccagctgccagcccagctccgctgctatctttgcctcacttagtcatgtgcaattcgcgttgcagagtggcagaccattagttgctgagttctgtcagcactctgatgtgctcagaagagcacctgcccaaagtttttctggttttaatttaaaggacaaggctacatatattcagctttttgagatgaccaaagctagttagggtctccttgatgtagctaagctgcttcagtgatcttcacatttgcactccagtttttttttctttaaaaaagcggtttctacctctctatgtgcctgagtgatgatacaatcgctgtttagttactagatgaacaaatccacagaatgggtaaagagtagaatctgaactatatcttgacaaatattattcaaacttgaatgtaaatatatacagtatgtatattttttaaaaagatttgcttgcaatgaccttataagtgacatttaatgtcatagcatgtaaagggttttttttgtaataaaaattatagaatctgc

SEQ ID NO: 423793 - DNA, 1783 bp, Homo sapiens
  misc_feature (1717)..(1717): n is a, c, g, or t
gcatcttggcagctctgaattgggaagggatgaaggaggctgtgcctccgggttgcacgaagagtccgagtcatttctcagaaggttttgataggtgggccttagaggagacgccgccgagcaccgcaagaactggaaaacacacccctctctgtctgcctgggagagccacggaaattggcacttctctgagtgaagctgaggagaaggctgtaaatctgccaaaacagccttgaagtattcttttgtcatgaggaagtgacggctgctggagggaggtgaacaccacaaggagagatggcatctggcctgggccccgcctagcagcagctccacctcctaggccaggccctgtgggatgcgccactagaccaccatggacggatcccacagcgcagccctgaagctgcagcagctgcctcccacaagtagctccagcgccgtaagcgaggcctccttctcctacaaggaaaacctgattggcgccctcttggcgatcttcgggcacctcgtggtcagcattgcacttaacctccagaagtactgccacatccgcctggcaggctccaaggatccccgggcctatttcaagaccaagacatggtggctgggcctgttcctgatgcttctgggcgagctgggtgtgttcgcctcctacgccttcgcgccgctgtcactcatcgtgcccctcagcgcagtttctgtgatagctagtgccatcataggaatcatattcatcaaggaaaagtggaaaccgaaagactttctgaggcgctacgtcttgtcctttgttggctgcggtttggctgtcgtgggtacctacctgctggtgacattcgcacccaacagtcacgagaagatgacaggcgagaatgtcaccaggcacctcgtgagctggcctttccttttgtacatgctggtggagatcattctgttctgcttgctgctctacttctacaaggagaagaacgccaacaacattgtcgtgattcttctcttggtggcgttacttgtcttgctctgtcacccaggctggagtgcagtggtacaatcttagctctctgcagccttgacctcctggcctcaagtgatccccctgcctcggcctcccaaagtgccaggattacaggcatgaggccctgtacctggctagaactgcatataattttatagctaaatagagctgtggggaatccatccttcctgaggagaagcagacagaggcggaggagcaggctggtgtcagggctggtgaagcctgctaccgcgctgctcttgagtggcctcaggctaatgaccctccctccttaagccacgctgtccacttctctaaagggggggcctatgagaacatccaagtcacggaagggagtgggggttaaatgagatgtgcacaggtggctaatatgtgcatttttcttccaaccttcctactgtgtgccctaccaccgccacaagccatcaaccaaatagatacctgtcaccgaagacagggtttccttaattttttaacagctctgttgagatataatttacataccataaagttcacctgtttaaagtatacaattcagtggtttttagtatttcatagagttgtgaaaccatcatcctaatctaattttagaacattttgtcacccccaaaagaaaccctgtgcccattagcagtcactccctgttccccttttcccagcctcaggcaaccactaagctancttctgtccctgtagatttgcctttttgaacaccttcataaataaagtcgtatgctttgtggcctg

SEQ ID NO: 423794 - DNA, 5388 bp, Homo sapiens
gcatcttggcagctctgaattgggaagggatgaaggaggctgtgcctccgggttgcacgaagagtccgagtcatttctcagaaggttttgataggtgggccttagaggagacgccgccgagcaccgcaagaactggaaaacacacccctctctgtctgcctgggagagccacggaaattggcacttctctgagtgaagctgaggagaaggctgtaaatctgccaaaacagccttgaagtattcttttgtcatgaggaagtgacggctgctggagggaggtgaacaccacaaggagagatggcatctggcctgggccccgcctagcagcagctccacctcctaggccaggccctgtgggatgcgccactagaccaccatggacggatcccacagcgcagccctgaagctgcagcagctgcctcccacaagtagctccagcgccgtaagcgaggcctccttctcctacaaggaaaacctgattggcgccctcttggcgatcttcgggcacctcgtggtcagcattgcacttaacctccagaagtactgccacatccgcctggcaggctccaaggatccccgggcctatttcaagaccaagacatggtggctgggcctgttcctgatgcttctgggcgagctgggtgtgttcgcctcctacgccttcgcgccgctgtcactcatcgtgcccctcagcgcagtttctgtgatagctagtgccatcataggaatcatattcatcaaggaaaagtggaaaccgaaagactttctgaggcgctacgtcttgtcctttgttggctgcggtttggctgtcgtgggtacctacctgctggtgacattcgcacccaacagtcacgagaagatgacaggcgagaatgtcaccaggcacctcgtgagctggcctttccttttgtacatgctggtggagatcattctgttctgcttgctgctctacttctacaaggagaagaacgccaacaacattgtcgtgattcttctcttggtggcgttacttggctccatgacagtggtgacagtcaaggccgtggctgggatgcttgtcttgtccattcaagggaacctgcagcttgactaccccatcttctacgtgatgttcgtgtgcatggtggcaaccgccgtctatcaggctgcgtttttgagtcaagcctcacagatgtacgactcctctttgattgccagtgtgggctacattctgtccacaaccattgctatcacagcaggtgcaatattttacctggacttcatcggggaggacgtgctgcacatctgcatgtttgcactggggtgcctcattgcattcttgggcgtcttcttaatcacgcgtaacaggaagaagcccattccatttgagccctatatttccatggatgccatgccaggtatgcagaacatgcacgataaagggatgactgtccagcctgaacttaaagcttctttttcctatggggctctggaaaacaatgacaacatttctgagatctacgctcctgccaccctgccagtcatgcaagaagagcacggctccagaagtgcctctggggtcccctaccgagtcctagagcacaccaagaaggaatgagactcgcctccctctatttataactgtcccctccaggctgacagtggttcaaccctgaatcctaaaacttgcctttcaagtctcattttgtttctaactgagaactctatggatgatgatctcaaaaagcctttgtctctgggaaaggatgcgttatcttggtcttggaaatttcaaatgatgagggttgggggatggaagcattattccaggtggacgggatagaatccagcctctgcctggattagcccagggggatttggaaagcctttctaccatccttgaggatggtaactgagcttcctctgacagtgaccaaaggatgctgtatccttcagagctaaggcaagacagagagtctgctgttaattctcaaatccagcgaaaggctggacatctctaaatctcgtcttcctccacctcatgtgcatgcctgatctcaccctgacactcctgatgccgcatctgtgatagcactcgtgttgccttcacatggcaggctgggccaaccctgggtggaaggttctgacatttgtgttttcagaaatgtacatctgccttccagtcatctgtgcccttctagggaagatgtgcttgatatgttcaaattggatctactctgaaaacgaaacttggttttggtcctgtgaggactacttgtttgtccacctcctccaccaaaggaattaggaagttaagagaaggggaagaatatggaggataggagagggtgatgatgctttagcccattaaggaagaaaagttccccttactcttacaaaaggtgattgcaccacttaaaaaaggataggtagaaaatctggccattttatgtgttatttttttcctgcataccagtgccccctggaaagatggggatgctcatttcagagacagcctcttcacctgtcctccgtctctccattacagagccacaagccaagcttgagttactggttaatttccttgaagtcaatagagactctctgggtcctcatccccatgcatatatgtctgggagaagcaagcattctccaaaacagggctgttgctttcttcctggccgcatatgtgactgtcttcccctagactgatggtatacttttgagaggggcggataaaggtttgcaaactttaatgggcataaggatcccctagaagcatatgtaaaatgcagattcctgcaccccaactgcagacactgttaagtgggactggagtggggcccacgggtctgcattcttaactggtaccaccagtgattctgatgcgatgcttcaatcccgagatttcacatctggaaagcctaagaatttacaaagatgttctgctaaaacccccagggccccatgcagtcttgctagaaaatttcctccctagggttcctttggaaggttaaatactccccataggatctgtggcatttctccatccaatgaatactacttagagctacactcaccacttccctagacagcctttaataggcatgataacagtgttaatagaccagtgtgatagatcacttatctttatggattgtgcttaatactgatttagtatcttgactccaaaaactgacatctgttgtctgtgataaccacttctgtattgcgtcttaaccacttctgtattgtgtggtcttaactgcctaaggcggcaatgggcagtgggcccctttcccttaggatgggtatcaattcaacaatatttataaggcatttactgtgtgctaagcatttggaagacccaggctacaaaataagacatagttcctgccctccaggccagcagagggaggcacaaatacccaggaatctctgatgggtgtgaagtgcggtcgtgggccacagaaaatgaccgtcatggagaccctgctaaaggtcggaccctgagcccaaaggggtattcagaagtggagatgattttggccccactcatagatgggtggcaaatctaagatttgtataaagcatataaaatagggtgatcacccccgaggcagaggggccagcatttgcaaaggcacagagctaagaggagctgggcaaagaaaggaaagccagggaaggtggtgggagatgagtctcaaagctaagtagtggaagctgggcacagtggctcatgcctgcaatcccagcactttgggaggccaaggctggaggatcacttgagcccaggagttttatatcagcctgggcaacatagcaagacctcatctctgctaaaaattaaaaataaataaattagctgggtgtggtggtgcatgcctgtgatcctagctactcaggaggctgaggtgggaggatcgctagagcccagagaaccaaggctacagtgagccatgatcatgctactgcactccagcctgggtgacaatgagaccatggctcaaaaaaaaaaaaaaaaaaaaaagataagcagtggaggccgaatcatggagggtcttgaatacctggctaaggagtttaaagtgtatccaagaggacgtgggagccactgatggttcatgaggaagagaagggcaggaccagcactgattgaaaaggagggcttgttcagtgtggaggaagaatcagaagggggaataagttaccttctccgagcctgcaagaacaaaaaacaaaaagcagaaattaaaatcaggtttcactgctatttatatatttctcctttcccaaatgatttttctaaagctgggagtggaggtaggagggagaaacagaaggtgagcagggaggctatttagatgtgtcaaacccgggtgatcattaataatttgggcatatatatgctcccaaacttactctgcccccttccttcccttttttttttttttttggtatgggccttttaggcttgggccagccagctttcttgagatgagtgaataaaagcgtattgtaatttcatgtctgcttcagatcatggggacagtgccacccaggaactgctgctgaggcctgggaagctcccttgccttcgggtttggagcagtggcatcatcccaccaacctgagccatgaaagggctgagcagaaagttaaatggtagtttcctgactggaagccacacgtaggtcacttgagtagtcaggaagcacagtgggtgtggagccatcatctgtcttgggctggttcctcccaatctttgtccagtggtataaatggactgtctgctgatggccatacgcagcactggctgttaagatggggaaggggtacatcaggattccactcatagccctggttcgttattgttactcatggctctgacgtccccaagccctcttgaatgttgcaagcaatgttaaatatcacacctcggtctccttttgagcagcccaggtacctaaagcaaggtcaccaaacttgggtttaaacttcagttgccatcacagcagggttcaggttatgcagtttttgcagtgtggagttgaacgctgggtaaagaagggagagctgactctccattgcttttctagtggaaaccagccagtttgacggcacggtgcggatacaggactccatcaggctagtgttggggaaccagcccggcagccttccatgtgaattccaaagctgtttcaacactggctgataggcagacaaaaggttacttgtgtgtttctctgagaagcggtgtaaatgaagtcaccttagaatatattctgtgcggatgcttatattttgttaacttcacgacttatggcatgtcttatttaaaaaaaaaaaagtactaggtgcaaataacattatgaagtggtatttaattaaaaatccatgcagtga

SEQ ID NO: 423795 - DNA, 5624 bp, Homo sapiens
tgagacctggagaagttagtattctacttcttgtgctcaagagctatggaaaaagggaggatttaagttagggtgcgatgggaggaaggaagcagagtggaggaggaaagggaacattaagggccagggagaaagcttttgagatagatgagtcaggtttgtattaaggggaggacaaaggcatgataggacttgtttttaactgctagaattgaattttgaagaatttttttaatggactcacttgtcatggccggttacgttttatctgaatggtagtctcttctcagataacaaagctgggctcagtgtttccttgtccatgcatttttaatgttcctctccaccaccctagagcaccgcaagaactggaaaacacacccctctctgtctgcctgggagagccacggaaattggcacttctctgagtgaagctgaggagaaggctgtaaatctgccaaaacagccttgaagtattcttttgtcatgaggaagtgacggctgctggagggaggtgaacaccacaaggagagatggcatctggcctgggccccgcctagcagcagctccacctcctaggccaggccctgtgggatgcgccactagaccaccatggacggatcccacagcgcagccctgaagctgcagcagctgcctcccacaagtagctccagcgccgtaagcgaggcctccttctcctacaaggaaaacctgattggcgccctcttggcgatcttcgggcacctcgtggtcagcattgcacttaacctccagaagtactgccacatccgcctggcaggctccaaggatccccgggcctatttcaagaccaagacatggtggctgggcctgttcctgatgcttctgggcgagctgggtgtgttcgcctcctacgccttcgcgccgctgtcactcatcgtgcccctcagcgcagtttctgtgatagctagtgccatcataggaatcatattcatcaaggaaaagtggaaaccgaaagactttctgaggcgctacgtcttgtcctttgttggctgcggtttggctgtcgtgggtacctacctgctggtgacattcgcacccaacagtcacgagaagatgacaggcgagaatgtcaccaggcacctcgtgagctggcctttccttttgtacatgctggtggagatcattctgttctgcttgctgctctacttctacaaggagaagaacgccaacaacattgtcgtgattcttctcttggtggcgttacttggctccatgacagtggtgacagtcaaggccgtggctgggatgcttgtcttgtccattcaagggaacctgcagcttgactaccccatcttctacgtgatgttcgtgtgcatggtggcaaccgccgtctatcaggctgcgtttttgagtcaagcctcacagatgtacgactcctctttgattgccagtgtgggctacattctgtccacaaccattgctatcacagcaggtgcaatattttacctggacttcatcggggaggacgtgctgcacatctgcatgtttgcactggggtgcctcattgcattcttgggcgtcttcttaatcacgcgtaacaggaagaagcccattccatttgagccctatatttccatggatgccatgccaggtatgcagaacatgcacgataaagggatgactgtccagcctgaacttaaagcttctttttcctatggggctctggaaaacaatgacaacatttctgagatctacgctcctgccaccctgccagtcatgcaagaagagcacggctccagaagtgcctctggggtcccctaccgagtcctagagcacaccaagaaggaatgagactcgcctccctctatttataactgtcccctccaggctgacagtggttcaaccctgaatcctaaaacttgcctttcaagtctcattttgtttctaactgagaactctatggatgatgatctcaaaaagcctttgtctctgggaaaggatgcgttatcttggtcttggaaatttcaaatgatgagggttgggggatggaagcattattccaggtggacgggatagaatccagcctctgcctggattagcccagggggatttggaaagcctttctaccatccttgaggatggtaactgagcttcctctgacagtgaccaaaggatgctgtatccttcagagctaaggcaagacagagagtctgctgttaattctcaaatccagcgaaaggctggacatctctaaatctcgtcttcctccacctcatgtgcatgcctgatctcaccctgacactcctgatgccgcatctgtgatagcactcgtgttgccttcacatggcaggctgggccaaccctgggtggaaggttctgacatttgtgttttcagaaatgtacatctgccttccagtcatctgtgcccttctagggaagatgtgcttgatatgttcaaattggatctactctgaaaacgaaacttggttttggtcctgtgaggactacttgtttgtccacctcctccaccaaaggaattaggaagttaagagaaggggaagaatatggaggataggagagggtgatgatgctttagcccattaaggaagaaaagttccccttactcttacaaaaggtgattgcaccacttaaaaaaggataggtagaaaatctggccattttatgtgttatttttttcctgcataccagtgccccctggaaagatggggatgctcatttcagagacagcctcttcacctgtcctccgtctctccattacagagccacaagccaagcttgagttactggttaatttccttgaagtcaatagagactctctgggtcctcatccccatgcatatatgtctgggagaagcaagcattctccaaaacagggctgttgctttcttcctggccgcatatgtgactgtcttcccctagactgatggtatacttttgagaggggcggataaaggtttgcaaactttaatgggcataaggatcccctagaagcatatgtaaaatgcagattcctgcaccccaactgcagacactgttaagtgggactggagtggggcccacgggtctgcattcttaactggtaccaccagtgattctgatgcgatgcttcaatcccgagatttcacatctggaaagcctaagaatttacaaagatgttctgctaaaacccccagggccccatgcagtcttgctagaaaatttcctccctagggttcctttggaaggttaaatactccccataggatctgtggcatttctccatccaatgaatactacttagagctacactcaccacttccctagacagcctttaataggcatgataacagtgttaatagaccagtgtgatagatcacttatctttatggattgtgcttaatactgatttagtatcttgactccaaaaactgacatctgttgtctgtgataaccacttctgtattgcgtcttaaccacttctgtattgtgtggtcttaactgcctaaggcggcaatgggcagtgggcccctttcccttaggatgggtatcaattcaacaatatttataaggcatttactgtgtgctaagcatttggaagacccaggctacaaaataagacatagttcctgccctccaggccagcagagggaggcacaaatacccaggaatctctgatgggtgtgaagtgcggtcgtgggccacagaaaatgaccgtcatggagaccctgctaaaggtcggaccctgagcccaaaggggtattcagaagtggagatgattttggccccactcatagatgggtggcaaatctaagatttgtataaagcatataaaatagggtgatcacccccgaggcagaggggccagcatttgcaaaggcacagagctaagaggagctgggcaaagaaaggaaagccagggaaggtggtgggagatgagtctcaaagctaagtagtggaagctgggcacagtggctcatgcctgcaatcccagcactttgggaggccaaggctggaggatcacttgagcccaggagttttatatcagcctgggcaacatagcaagacctcatctctgctaaaaattaaaaataaataaattagctgggtgtggtggtgcatgcctgtgatcctagctactcaggaggctgaggtgggaggatcgctagagcccagagaaccaaggctacagtgagccatgatcatgctactgcactccagcctgggtgacaatgagaccatggctcaaaaaaaaaaaaaaaaaaaaaagataagcagtggaggccgaatcatggagggtcttgaatacctggctaaggagtttaaagtgtatccaagaggacgtgggagccactgatggttcatgaggaagagaagggcaggaccagcactgattgaaaaggagggcttgttcagtgtggaggaagaatcagaagggggaataagttaccttctccgagcctgcaagaacaaaaaacaaaaagcagaaattaaaatcaggtttcactgctatttatatatttctcctttcccaaatgatttttctaaagctgggagtggaggtaggagggagaaacagaaggtgagcagggaggctatttagatgtgtcaaacccgggtgatcattaataatttgggcatatatatgctcccaaacttactctgcccccttccttcccttttttttttttttttggtatgggccttttaggcttgggccagccagctttcttgagatgagtgaataaaagcgtattgtaatttcatgtctgcttcagatcatggggacagtgccacccaggaactgctgctgaggcctgggaagctcccttgccttcgggtttggagcagtggcatcatcccaccaacctgagccatgaaagggctgagcagaaagttaaatggtagtttcctgactggaagccacacgtaggtcacttgagtagtcaggaagcacagtgggtgtggagccatcatctgtcttgggctggttcctcccaatctttgtccagtggtataaatggactgtctgctgatggccatacgcagcactggctgttaagatggggaaggggtacatcaggattccactcatagccctggttcgttattgttactcatggctctgacgtccccaagccctcttgaatgttgcaagcaatgttaaatatcacacctcggtctccttttgagcagcccaggtacctaaagcaaggtcaccaaacttgggtttaaacttcagttgccatcacagcagggttcaggttatgcagtttttgcagtgtggagttgaacgctgggtaaagaagggagagctgactctccattgcttttctagtggaaaccagccagtttgacggcacggtgcggatacaggactccatcaggctagtgttggggaaccagcccggcagccttccatgtgaattccaaagctgtttcaacactggctgataggcagacaaaaggttacttgtgtgtttctctgagaagcggtgtaaatgaagtcaccttagaatatattctgtgcggatgcttatattttgttaacttcacgacttatggcatgtcttatttaaaaaaaaaaaagtactaggtgcaaataacattatgaagtggtatttaattaaaaatccatgcagtga

SEQ ID NO: 423796 - DNA, 5520 bp, Homo sapiens
ctcggggctccacctagctcagccctggaattccgcaagcacccggaggccggggggtctccgcgggcgtcccatgcggaggacatggtgcgccgtgtcctcttccccacgacctcagggaccggtccccccgccggaactgcttcctacctggtccggtcccggcagctgaatctggccagcccaacctcccggtcgctatggcacccacaggcctaacattcgcgagtccaccttccgccgtccgcgagagcaccgcaagaactggaaaacacacccctctctgtctgcctgggagagccacggaaattggcacttctctgagtgaagctgaggagaaggctgtaaatctgccaaaacagccttgaagtattcttttgtcatgaggaagtgacggctgctggagggaggtgaacaccacaaggagagatggcatctggcctgggccccgcctagcagcagctccacctcctaggccaggccctgtgggatgcgccactagaccaccatggacggatcccacagcgcagccctgaagctgcagcagctgcctcccacaagtagctccagcgccgtaagcgaggcctccttctcctacaaggaaaacctgattggcgccctcttggcgatcttcgggcacctcgtggtcagcattgcacttaacctccagaagtactgccacatccgcctggcaggctccaaggatccccgggcctatttcaagaccaagacatggtggctgggcctgttcctgatgcttctgggcgagctgggtgtgttcgcctcctacgccttcgcgccgctgtcactcatcgtgcccctcagcgcagtttctgtgatagctagtgccatcataggaatcatattcatcaaggaaaagtggaaaccgaaagactttctgaggcgctacgtcttgtcctttgttggctgcggtttggctgtcgtgggtacctacctgctggtgacattcgcacccaacagtcacgagaagatgacaggcgagaatgtcaccaggcacctcgtgagctggcctttccttttgtacatgctggtggagatcattctgttctgcttgctgctctacttctacaaggagaagaacgccaacaacattgtcgtgattcttctcttggtggcgttacttggctccatgacagtggtgacagtcaaggccgtggctgggatgcttgtcttgtccattcaagggaacctgcagcttgactaccccatcttctacgtgatgttcgtgtgcatggtggcaaccgccgtctatcaggctgcgtttttgagtcaagcctcacagatgtacgactcctctttgattgccagtgtgggctacattctgtccacaaccattgctatcacagcaggtgcaatattttacctggacttcatcggggaggacgtgctgcacatctgcatgtttgcactggggtgcctcattgcattcttgggcgtcttcttaatcacgcgtaacaggaagaagcccattccatttgagccctatatttccatggatgccatgccaggtatgcagaacatgcacgataaagggatgactgtccagcctgaacttaaagcttctttttcctatggggctctggaaaacaatgacaacatttctgagatctacgctcctgccaccctgccagtcatgcaagaagagcacggctccagaagtgcctctggggtcccctaccgagtcctagagcacaccaagaaggaatgagactcgcctccctctatttataactgtcccctccaggctgacagtggttcaaccctgaatcctaaaacttgcctttcaagtctcattttgtttctaactgagaactctatggatgatgatctcaaaaagcctttgtctctgggaaaggatgcgttatcttggtcttggaaatttcaaatgatgagggttgggggatggaagcattattccaggtggacgggatagaatccagcctctgcctggattagcccagggggatttggaaagcctttctaccatccttgaggatggtaactgagcttcctctgacagtgaccaaaggatgctgtatccttcagagctaaggcaagacagagagtctgctgttaattctcaaatccagcgaaaggctggacatctctaaatctcgtcttcctccacctcatgtgcatgcctgatctcaccctgacactcctgatgccgcatctgtgatagcactcgtgttgccttcacatggcaggctgggccaaccctgggtggaaggttctgacatttgtgttttcagaaatgtacatctgccttccagtcatctgtgcccttctagggaagatgtgcttgatatgttcaaattggatctactctgaaaacgaaacttggttttggtcctgtgaggactacttgtttgtccacctcctccaccaaaggaattaggaagttaagagaaggggaagaatatggaggataggagagggtgatgatgctttagcccattaaggaagaaaagttccccttactcttacaaaaggtgattgcaccacttaaaaaaggataggtagaaaatctggccattttatgtgttatttttttcctgcataccagtgccccctggaaagatggggatgctcatttcagagacagcctcttcacctgtcctccgtctctccattacagagccacaagccaagcttgagttactggttaatttccttgaagtcaatagagactctctgggtcctcatccccatgcatatatgtctgggagaagcaagcattctccaaaacagggctgttgctttcttcctggccgcatatgtgactgtcttcccctagactgatggtatacttttgagaggggcggataaaggtttgcaaactttaatgggcataaggatcccctagaagcatatgtaaaatgcagattcctgcaccccaactgcagacactgttaagtgggactggagtggggcccacgggtctgcattcttaactggtaccaccagtgattctgatgcgatgcttcaatcccgagatttcacatctggaaagcctaagaatttacaaagatgttctgctaaaacccccagggccccatgcagtcttgctagaaaatttcctccctagggttcctttggaaggttaaatactccccataggatctgtggcatttctccatccaatgaatactacttagagctacactcaccacttccctagacagcctttaataggcatgataacagtgttaatagaccagtgtgatagatcacttatctttatggattgtgcttaatactgatttagtatcttgactccaaaaactgacatctgttgtctgtgataaccacttctgtattgcgtcttaaccacttctgtattgtgtggtcttaactgcctaaggcggcaatgggcagtgggcccctttcccttaggatgggtatcaattcaacaatatttataaggcatttactgtgtgctaagcatttggaagacccaggctacaaaataagacatagttcctgccctccaggccagcagagggaggcacaaatacccaggaatctctgatgggtgtgaagtgcggtcgtgggccacagaaaatgaccgtcatggagaccctgctaaaggtcggaccctgagcccaaaggggtattcagaagtggagatgattttggccccactcatagatgggtggcaaatctaagatttgtataaagcatataaaatagggtgatcacccccgaggcagaggggccagcatttgcaaaggcacagagctaagaggagctgggcaaagaaaggaaagccagggaaggtggtgggagatgagtctcaaagctaagtagtggaagctgggcacagtggctcatgcctgcaatcccagcactttgggaggccaaggctggaggatcacttgagcccaggagttttatatcagcctgggcaacatagcaagacctcatctctgctaaaaattaaaaataaataaattagctgggtgtggtggtgcatgcctgtgatcctagctactcaggaggctgaggtgggaggatcgctagagcccagagaaccaaggctacagtgagccatgatcatgctactgcactccagcctgggtgacaatgagaccatggctcaaaaaaaaaaaaaaaaaaaaaagataagcagtggaggccgaatcatggagggtcttgaatacctggctaaggagtttaaagtgtatccaagaggacgtgggagccactgatggttcatgaggaagagaagggcaggaccagcactgattgaaaaggagggcttgttcagtgtggaggaagaatcagaagggggaataagttaccttctccgagcctgcaagaacaaaaaacaaaaagcagaaattaaaatcaggtttcactgctatttatatatttctcctttcccaaatgatttttctaaagctgggagtggaggtaggagggagaaacagaaggtgagcagggaggctatttagatgtgtcaaacccgggtgatcattaataatttgggcatatatatgctcccaaacttactctgcccccttccttcccttttttttttttttttggtatgggccttttaggcttgggccagccagctttcttgagatgagtgaataaaagcgtattgtaatttcatgtctgcttcagatcatggggacagtgccacccaggaactgctgctgaggcctgggaagctcccttgccttcgggtttggagcagtggcatcatcccaccaacctgagccatgaaagggctgagcagaaagttaaatggtagtttcctgactggaagccacacgtaggtcacttgagtagtcaggaagcacagtgggtgtggagccatcatctgtcttgggctggttcctcccaatctttgtccagtggtataaatggactgtctgctgatggccatacgcagcactggctgttaagatggggaaggggtacatcaggattccactcatagccctggttcgttattgttactcatggctctgacgtccccaagccctcttgaatgttgcaagcaatgttaaatatcacacctcggtctccttttgagcagcccaggtacctaaagcaaggtcaccaaacttgggtttaaacttcagttgccatcacagcagggttcaggttatgcagtttttgcagtgtggagttgaacgctgggtaaagaagggagagctgactctccattgcttttctagtggaaaccagccagtttgacggcacggtgcggatacaggactccatcaggctagtgttggggaaccagcccggcagccttccatgtgaattccaaagctgtttcaacactggctgataggcagacaaaaggttacttgtgtgtttctctgagaagcggtgtaaatgaagtcaccttagaatatattctgtgcggatgcttatattttgttaacttcacgacttatggcatgtcttatttaaaaaaaaaaaagtactaggtgcaaataacattatgaagtggtatttaattaaaaatccatgcagtga

SEQ ID NO: 423797 - DNA, 5007 bp, Homo sapiens
gcatcttggcagctctgaattgggaagggatgaaggaggctgtgcctccgggttgcacgaagagtccgagtcatttctcagaaggttttgataggtgggccttagaggagacgccgccggaaaacctgattggcgccctcttggcgatcttcgggcacctcgtggtcagcattgcacttaacctccagaagtactgccacatccgcctggcaggctccaaggatccccgggcctatttcaagaccaagacatggtgctgggtgtgttcgcctcctacgccttcgcgccgctgtcactcatcgtgcccctcagcgcagtttctgtgatagctagtgccatcataggaatcatattcatcaaggaaaagtggaaaccgaaagactttctgaggcgctacgtcttgtcctttgttggctgcggtttggctgtcgtgggtacctacctgctggtgacattcgcacccaacagtcacgagaagatgacaggcgagaatgtcaccaggcacctcgtgagctggcctttccttttgtacatgctggtggagatcattctgttctgcttgctgctctacttctacaaggagaagaacgccaacaacattgtcgtgattcttctcttggtggcgttacttggctccatgacagtggtgacagtcaaggccgtggctgggatgcttgtcttgtccattcaagggaacctgcagcttgactaccccatcttctacgtgatgttcgtgtgcatggtggcaaccgccgtctatcaggctgcgtttttgagtcaagcctcacagatgtacgactcctctttgattgccagtgtgggctacattctgtccacaaccattgctatcacagcaggtgcaatattttacctggacttcatcggggaggacgtgctgcacatctgcatgtttgcactggggtgcctcattgcattcttgggcgtcttcttaatcacgcgtaacaggaagaagcccattccatttgagccctatatttccatggatgccatgccaggtatgcagaacatgcacgataaagggatgactgtccagcctgaacttaaagcttctttttcctatggggctctggaaaacaatgacaacatttctgagatctacgctcctgccaccctgccagtcatgcaagaagagcacggctccagaagtgcctctggggtcccctaccgagtcctagagcacaccaagaaggaatgagactcgcctccctctatttataactgtcccctccaggctgacagtggttcaaccctgaatcctaaaacttgcctttcaagtctcattttgtttctaactgagaactctatggatgatgatctcaaaaagcctttgtctctgggaaaggatgcgttatcttggtcttggaaatttcaaatgatgagggttgggggatggaagcattattccaggtggacgggatagaatccagcctctgcctggattagcccagggggatttggaaagcctttctaccatccttgaggatggtaactgagcttcctctgacagtgaccaaaggatgctgtatccttcagagctaaggcaagacagagagtctgctgttaattctcaaatccagcgaaaggctggacatctctaaatctcgtcttcctccacctcatgtgcatgcctgatctcaccctgacactcctgatgccgcatctgtgatagcactcgtgttgccttcacatggcaggctgggccaaccctgggtggaaggttctgacatttgtgttttcagaaatgtacatctgccttccagtcatctgtgcccttctagggaagatgtgcttgatatgttcaaattggatctactctgaaaacgaaacttggttttggtcctgtgaggactacttgtttgtccacctcctccaccaaaggaattaggaagttaagagaaggggaagaatatggaggataggagagggtgatgatgctttagcccattaaggaagaaaagttccccttactcttacaaaaggtgattgcaccacttaaaaaaggataggtagaaaatctggccattttatgtgttatttttttcctgcataccagtgccccctggaaagatggggatgctcatttcagagacagcctcttcacctgtcctccgtctctccattacagagccacaagccaagcttgagttactggttaatttccttgaagtcaatagagactctctgggtcctcatccccatgcatatatgtctgggagaagcaagcattctccaaaacagggctgttgctttcttcctggccgcatatgtgactgtcttcccctagactgatggtatacttttgagaggggcggataaaggtttgcaaactttaatgggcataaggatcccctagaagcatatgtaaaatgcagattcctgcaccccaactgcagacactgttaagtgggactggagtggggcccacgggtctgcattcttaactggtaccaccagtgattctgatgcgatgcttcaatcccgagatttcacatctggaaagcctaagaatttacaaagatgttctgctaaaacccccagggccccatgcagtcttgctagaaaatttcctccctagggttcctttggaaggttaaatactccccataggatctgtggcatttctccatccaatgaatactacttagagctacactcaccacttccctagacagcctttaataggcatgataacagtgttaatagaccagtgtgatagatcacttatctttatggattgtgcttaatactgatttagtatcttgactccaaaaactgacatctgttgtctgtgataaccacttctgtattgcgtcttaaccacttctgtattgtgtggtcttaactgcctaaggcggcaatgggcagtgggcccctttcccttaggatgggtatcaattcaacaatatttataaggcatttactgtgtgctaagcatttggaagacccaggctacaaaataagacatagttcctgccctccaggccagcagagggaggcacaaatacccaggaatctctgatgggtgtgaagtgcggtcgtgggccacagaaaatgaccgtcatggagaccctgctaaaggtcggaccctgagcccaaaggggtattcagaagtggagatgattttggccccactcatagatgggtggcaaatctaagatttgtataaagcatataaaatagggtgatcacccccgaggcagaggggccagcatttgcaaaggcacagagctaagaggagctgggcaaagaaaggaaagccagggaaggtggtgggagatgagtctcaaagctaagtagtggaagctgggcacagtggctcatgcctgcaatcccagcactttgggaggccaaggctggaggatcacttgagcccaggagttttatatcagcctgggcaacatagcaagacctcatctctgctaaaaattaaaaataaataaattagctgggtgtggtggtgcatgcctgtgatcctagctactcaggaggctgaggtgggaggatcgctagagcccagagaaccaaggctacagtgagccatgatcatgctactgcactccagcctgggtgacaatgagaccatggctcaaaaaaaaaaaaaaaaaaaaaagataagcagtggaggccgaatcatggagggtcttgaatacctggctaaggagtttaaagtgtatccaagaggacgtgggagccactgatggttcatgaggaagagaagggcaggaccagcactgattgaaaaggagggcttgttcagtgtggaggaagaatcagaagggggaataagttaccttctccgagcctgcaagaacaaaaaacaaaaagcagaaattaaaatcaggtttcactgctatttatatatttctcctttcccaaatgatttttctaaagctgggagtggaggtaggagggagaaacagaaggtgagcagggaggctatttagatgtgtcaaacccgggtgatcattaataatttgggcatatatatgctcccaaacttactctgcccccttccttcccttttttttttttttttggtatgggccttttaggcttgggccagccagctttcttgagatgagtgaataaaagcgtattgtaatttcatgtctgcttcagatcatggggacagtgccacccaggaactgctgctgaggcctgggaagctcccttgccttcgggtttggagcagtggcatcatcccaccaacctgagccatgaaagggctgagcagaaagttaaatggtagtttcctgactggaagccacacgtaggtcacttgagtagtcaggaagcacagtgggtgtggagccatcatctgtcttgggctggttcctcccaatctttgtccagtggtataaatggactgtctgctgatggccatacgcagcactggctgttaagatggggaaggggtacatcaggattccactcatagccctggttcgttattgttactcatggctctgacgtccccaagccctcttgaatgttgcaagcaatgttaaatatcacacctcggtctccttttgagcagcccaggtacctaaagcaaggtcaccaaacttgggtttaaacttcagttgccatcacagcagggttcaggttatgcagtttttgcagtgtggagttgaacgctgggtaaagaagggagagctgactctccattgcttttctagtggaaaccagccagtttgacggcacggtgcggatacaggactccatcaggctagtgttggggaaccagcccggcagccttccatgtgaattccaaagctgtttcaacactggctgataggcagacaaaaggttacttgtgtgtttctctgagaagcggtgtaaatgaagtcaccttagaatatattctgtgcggatgcttatattttgttaacttcacgacttatggcatgtcttatttaaaaaaaaaaaagtactaggtgcaaataacattatgaagtggtatttaattaaaaatccatgcagtga

SEQ ID NO: 423798 - DNA, 5101 bp, Homo sapiens
  misc_feature (4930)..(4930): n is a, c, g, or t
  misc_feature (4975)..(4976): n is a, c, g, or t
  misc_feature (4983)..(4983): n is a, c, g, or t
  misc_feature (4985)..(4985): n is a, c, g, or t
  misc_feature (5086)..(5086): n is a, c, g, or t
gcatcttggcagctctgaattgggaagggatgaaggaggctgtgcctccgggttgcacgaagagtccgagtcatttctcagaaggttttgataggtgggccttagaggagacgccgccgagcaccgcaagaactggaaaacacacccctctctgtctgcctgggagagccacggaaattggcacttctctgagtgaagctgaggagaaggctgtaaatctgccaaaacagccttgaagtattcttttgtcatgaggaagtgacggctgctggagggaggtgaacaccacaaggagagatggcatctggcctgggccccgcctagcagcagctccacctcctaggccaggccctgtgggatgcgccactagaccaccatggacggatcccacagcgcagccctgaagctgcagcagctgcctcccacaagtagctccagcgccgtaagcgaggcctccttctcctacaaggaaaacctgattggcgccctcttggcgatcttcgggcacctcgtggtcagcattgcacttaacctccagaagtactgccacatccgcctggcaggctccaaggatccccgggcctatttcaagaccaagacatggtggctgggcctgttcctgatgcttctgggcgagctgggtgtgttcgcctcctacgccttcgcgccgctgtcactcatcgtgcccctcagcgcagtttctgtgatagctagtgccatcataggaatcatattcatcaaggaaaagtggaaaccgaaagactttctgaggcgctacgtcttgtcctttgttggctgcggtttggctgtcgtgggtacctacctgctggtgacattcgcacccaacagtcacgagaagatgacaggcgagaatgtcaccaggcacctcgtgagctggcctttccttttgtacatgctggtggagatcattctgttctgcttgctgctctacttctacaaggagaagaacgccaacaacattgtcgtgattcttctcttggtggcgttacttggctccatgacagtggtgacagtcaaggccgtggctgggatgcttgtcttgtccattcaagggaacctgcagcttgactaccccatcttctacgtgatgttcgtgtgcatggtggcaaccgccgtctatcaggctgcgtttttgagtcaagcctcacagatgtacgactcctctttgattgccagtgtgggctacattctgtccacaaccattgctatcacagcaggtgcaatattttacctggacttcatcggggaggacgtgctgcacatctgcatgtttgcactggggtgcctcattgcattcttgggcgtcttcttaatcacgcgtaacaggaagaagcccattccatttgagccctatatttccatggatgccatgccaggtatgcagaacatgcacgataaagggatgactgtccagcctgaacttaaagcttctttttcctatggggctctggaaaacaatgacaacatttctgagatctacgctcctgccaccctgccagtcatgcaagaagagcacggctccagaagtgcctctggggtcccctaccgagtcctagagcacaccaagaaggaatgagactcgcctccctctatttataactgtcccctccaggctgacagtggttcaaccctgaatcctaaaacttgcctttcaagtctcattttgtttctaactgagaactctatggatgatgatctcaaaaagcctttgtctctgggaaaggatgcgttatcttggtcttggaaatttcaaatgatgagggttgggggatggaagcattattccaggtggacgggatagaatccagcctctgcctggattagcccagggggatttggaaagcctttctaccatccttgaggatggtaactgagcttcctctgacagtgaccaaaggatgctgtatccttcagagctaaggcaagacagagagtctgctgttaattctcaaatccagcgaaaggctggacatctctaaatctcgtcttcctccacctcatgtgcatgcctgatctcaccctgacactcctgatgccgcatctgtgatagcactcgtgttgccttcacatggcaggctgggccaaccctgggtggaaggttctgacatttgtgttttcagaaatgtacatctgccttccagtcatctgtgcccttctagggaagatgtgcttgatatgttcaaattggatctactctgaaaacgaaacttggttttggtcctgtgaggactacttgtttgtccacctcctccaccaaaggaattaggaagttaagagaaggggaagaatatggaggataggagagggtgatgatgctttagcccattaaggaagaaaagttccccttactcttacaaaaggtgattgcaccacttaaaaaaggataggtagaaaatctggccattttatgtgttatttttttcctgcataccagtgccccctggaaagatggggatgctcatttcagagacagcctcttcacctgtcctccgtctctccattacagagccacaagccaagcttgagttactggttaatttccttgaagtcaatagagactctctgggtcctcatccccatgcatatatgtctgggagaagcaagcattctccaaaacagggctgttgctttcttcctggccgcatatgtgactgtcttcccctagactgatggtatacttttgagaggggcggataaaggtttgcaaactttaatgggcataaggatcccctagaagcatatgtaaaatgcagattcctgcaccccaactgcagacactgttaagtgggactggagtggggcccacgggtctgcattcttaactggtaccaccagtgattctgatgcgatgcttcaatcccgagatttcacatctggaaagcctaagaatttacaaagatgttctgctaaaacccccagggccccatgcagtcttgctagaaaatttcctccctagggttcctttggaaggttaaatactccccataggatctgtggcatttctccatccaatgaatactacttagagctacactcaccacttccctagacagcctttaataggcatgataacagtgttaatagaccagtgtgatagatcacttatctttatggattgtgcttaatactgatttagtatcttgactccaaaaactgacatctgttgtctgtgataaccacttctgtattgcgtcttaaccacttctgtattgtgtggtcttaactgcctaaggcggcaatgggcagtgggcccctttcccttaggatgggtatcaattcaacaatatttataaggcatttactgtgtgctaagcatttggaagacccaggctacaaaataagacatagttcctgccctccaggccagcagagggaggcacaaatacccaggaatctctgatgggtgtgaagtgcggtcgtgggccacagaaaatgaccgtcatggagaccctgctaaaggtcggaccctgagcccaaaggggtattcagaagtggagatgattttggccccactcatagatgggtggcaaatctaagatttgtataaagcatataaaatagggtgatcacccccgaggcagaggggccagcatttgcaaaggcacagagctaagaggagctgggcaaagaaaggaaagccagggaaggtggtgggagatgagtctcaaagctaagtagtggaagctgggcacagtggctcatgcctgcaatcccagcactttgggaggccaaggctggaggatcacttgagcccaggagttttatatcagcctgggcaacatagcaagacctcatctctgctaaaaattaaaaataaataaattagctgggtgtggtggtgcatgcctgtgatcctagctactcaggaggctgaggtgggaggatcgctagagcccagagaaccaaggctacagtgagccatgatcatgctactgcactccagcctgggtgacaatgagaccatggctcaaaaaaaaaaaaaaaaaaaaaagataagcagtggaggccgaatcatggagggtcttgaatacctggctaaggagtttaaagtgtatccaagaggacgtgggagccactgatggttcatgaggaagagaagggcaggaccagcactgattgaaaaggagggcttgttcagtgtggaggaagaatcagaagggggaataagttaccttctccgagcctgcaagaacaaaaaacaaaaagcagaaattaaaatcaggtttcactgctatttatatatttctcctttcccaaatgatttttctaaagctgggagtggaggtaggagggagaaacagaaggtgagcagggaggctatttagatgtgtcaaacccgggtgatcattaataatttgggcatatatatgctcccaaacttactctgcccccttccttcccttttttttttttttttggtatgggccttttaggcttgggccagccagctttcttgagatgagtgaataaaagcgtattgtaatttcatgtctgcttcagatcatggggacagtgccacccaggaactgctgctgaggcctgggaagctcccttgccttcgggtttggagcagtggcatcatcccaccaacctgagccatgaaagggctgagcagaaagttaaatggtagtttcctgactggaagccacacgtaggtcacttgagtagtcaggaagcacagtgggtgtggagccatcatctgtcttgggctggttcctcccaatctttgtccagtggtataaatggactgtctgctgatggccatacgcagcactggctgttaagatggggaaggggtacatcaggattccactcatagccctggttcgttattgttactcatggctctgacgtccccaagccctcttgaatgttgcaagcaatgttaaatatcacacctcggtctccnaactggatctgttattttcagggaaacaggccccagggccccctnnaggcctnancctaagcccttagggctctgagagtgctgttgggttctatttatttatttatttgttcctttgttccctacccgtgcccccagtgtctttcctgctgagtnaccagggggaaaggt

SEQ ID NO: 423799 - DNA, 2746 bp, Homo sapiens
cctcctatctgaatccagatcgccatgatgacaaaaatgagacggatggccttgtacttttgagaggggcggataaaggtttgcaaactttaatgggcataaggatcccctagaagcatatgtaaaatgcagattcctgcaccccaactgcagacactgttaagtgggactggagtggggcccacgggtctgcattcttaactggtaccaccagtgattctgatgcgatgcttcaatcccgagatttcacatctggaaagcctaagaatttacaaagatgttctgctaaaacccccagggccccatgcagtcttgctagaaaatttcctccctagggttcctttggaaggttaaatactccccataggatctgtggcatttctccatccaatgaatactacttagagctacactcaccacttccctagacagcctttaataggcatgataacagtgttaatagaccagtgtgatagatcacttatctttatggattgtgcttaatactgatttagtatcttgactccaaaaactgacatctgttgtctgtgataaccacttctgtattgcgtcttaaccacttctgtattgtgtggtcttaactgcctaaggcggcaatgggcagtgggcccctttcccttaggatgggtatcaattcaacaatatttataaggcatttactgtgtgctaagcatttggaagacccaggctacaaaataagacatagttcctgccctccaggccagcagagggaggcacaaatacccaggaatctctgatgggtgtgaagtgcggtcgtgggccacagaaaatgaccgtcatggagaccctgctaaaggtcggaccctgagcccaaaggggtattcagaagtggagatgattttggccccactcatagatgggtggcaaatctaagatttgtataaagcatataaaatagggtgatcacccccgaggcagaggggccagcatttgcaaaggcacagagctaagaggagctgggcaaagaaaggaaagccagggaaggtggtgggagatgagtctcaaagctaagtagtggaagctgggcacagtggctcatgcctgcaatcccagcactttgggaggccaaggctggaggatcacttgagcccaggagttttatatcagcctgggcaacatagcaagacctcatctctgctaaaaattaaaaataaataaattagctgggtgtggtggtgcatgcctgtgatcctagctactcaggaggctgaggtgggaggatcgctagagcccagagaaccaaggctacagtgagccatgatcatgctactgcactccagcctgggtgacaatgagaccatggctcaaaaaaaaaaaaaaaaaaaaaagataagcagtggaggccgaatcatggagggtcttgaatacctggctaaggagtttaaagtgtatccaagaggacgtgggagccactgatggttcatgaggaagagaagggcaggaccagcactgattgaaaaggagggcttgttcagtgtggaggaagaatcagaagggggaataagttaccttctccgagcctgcaagaacaaaaaacaaaaagcagaaattaaaatcaggtttcactgctatttatatatttctcctttcccaaatgatttttctaaagctgggagtggaggtaggagggagaaacagaaggtgagcagggaggctatttagatgtgtcaaacccgggtgatcattaataatttgggcatatatatgctcccaaacttactctgcccccttccttcccttttttttttttttttggtatgggccttttaggcttgggccagccagctttcttgagatgagtgaataaaagcgtattgtaatttcatgtctgcttcagatcatggggacagtgccacccaggaactgctgctgaggcctgggaagctcccttgccttcgggtttggagcagtggcatcatcccaccaacctgagccatgaaagggctgagcagaaagttaaatggtagtttcctgactggaagccacacgtaggtcacttgagtagtcaggaagcacagtgggtgtggagccatcatctgtcttgggctggttcctcccaatctttgtccagtggtataaatggactgtctgctgatggccatacgcagcactggctgttaagatggggaaggggtacatcaggattccactcatagccctggttcgttattgttactcatggctctgacgtccccaagccctcttgaatgttgcaagcaatgttaaatatcacacctcggtctccttttgagcagcccaggtacctaaagcaaggtcaccaaacttgggtttaaacttcagttgccatcacagcagggttcaggttatgcagtttttgcagtgtggagttgaacgctgggtaaagaagggagagctgactctccattgcttttctagtggaaaccagccagtttgacggcacggtgcggatacaggactccatcaggctagtgttggggaaccagcccggcagccttccatgtgaattccaaagctgtttcaacactggctgataggcagacaaaaggttacttgtgtgtttctctgagaagcggtgtaaatgaagtcaccttagaatatattctgtgcggatgcttatattttgttaacttcacgacttatggcatgtcttatttaaaaaaaaaaaagtactaggtgcaaataacattatgaagtggtatttaattaaaaatccatgcagtga

SEQ ID NO: 423800 - DNA, 1801 bp, Homo sapiens
  misc_feature (9)..(9): n is a, c, g, or t
agcggccgncctttttttgcccagcatttgcaaaggcacagagctaagaggagctgggcaaagaaaggaaagccagggaaggtggtgggagatgagtctcaaagctaagtagtggaagctgggcacagtggctcatgcctgcaatcccagcactttgggaggccaaggctggaggatcacttgagcccaggagttttatatcagcctgggcaacatagcaagacctcatctctgctaaaaattaaaaataaataaattagctgggtgtggtggtgcatgcctgtgatcctagctactcaggaggctgaggtgggaggatcgctagagcccagagaaccaaggctacagtgagccatgatcatgctactgcactccagcctgggtgacaatgagaccatggctcaaaaaaaaaaaaaaaaaaaaaagataagcagtggaggccgaatcatggagggtcttgaatacctggctaaggagtttaaagtgtatccaagaggacgtgggagccactgatggttcatgaggaagagaagggcaggaccagcactgattgaaaaggagggcttgttcagtgtggaggaagaatcagaagggggaataagttaccttctccgagcctgcaagaacaaaaaacaaaaagcagaaattaaaatcaggtttcactgctatttatatatttctcctttcccaaatgatttttctaaagctgggagtggaggtaggagggagaaacagaaggtgagcagggaggctatttagatgtgtcaaacccgggtgatcattaataatttgggcatatatatgctcccaaacttactctgcccccttccttcccttttttttttttttttggtatgggccttttaggcttgggccagccagctttcttgagatgagtgaataaaagcgtattgtaatttcatgtctgcttcagatcatggggacagtgccacccaggaactgctgctgaggcctgggaagctcccttgccttcgggtttggagcagtggcatcatcccaccaacctgagccatgaaagggctgagcagaaagttaaatggtagtttcctgactggaagccacacgtaggtcacttgagtagtcaggaagcacagtgggtgtggagccatcatctgtcttgggctggttcctcccaatctttgtccagtggtataaatggactgtctgctgatggccatacgcagcactggctgttaagatggggaaggggtacatcaggattccactcatagccctggttcgttattgttactcatggctctgacgtccccaagccctcttgaatgttgcaagcaatgttaaatatcacacctcggtctccttttgagcagcccaggtacctaaagcaaggtcaccaaacttgggtttaaacttcagttgccatcacagcagggttcaggttatgcagtttttgcagtgtggagttgaacgctgggtaaagaagggagagctgactctccattgcttttctagtggaaaccagccagtttgacggcacggtgcggatacaggactccatcaggctagtgttggggaaccagcccggcagccttccatgtgaattccaaagctgtttcaacactggctgataggcagacaaaaggttacttgtgtgtttctctgagaagcggtgtaaatgaagtcaccttagaatatattctgtgcggatgcttatattttgttaacttcacgacttatggcatgtcttatttaaaaaaaaaaaagtactaggtgcaaataacattatgaagtggtatttaattaaaaatccatgcagtga

SEQ ID NO: 423801 - DNA, 2101 bp, Homo sapiens
gcatcttggcagctctgaattgggaagggatgaaggaggctgtgcctccgggttgcacgaagagtccgagtcatttctcagaaggttttgataggtgggccttagaggagacgccgccgagcaccgcaagaactggaaaacacacccctctctgtctgcctgggagagccacggaaattggcacttctctgagtgaagctgaggagaaggctgtaaatctgccaaaacagccttgaagtattcttttgtcatgaggaagtgacggctgctggagggaggtgaacaccacaaggagagatggcatctggcctgggccccgcctagcagcagctccacctcctaggccaggccctgtgggatgcgccactagaccaccatggacggatcccacagcgcagccctgaagctgcagcagctgcctcccacaagtagctccagcgccgtaagcgaggcctccttctcctacaaggaaaacctgattggcgccctcttggcgatcttcgggcacctcgtggtcagcattgcacttaacctccagaagtactgccacatccgcctggcaggctccaaggatccccgggcctatttcaagaccaagacatggtggctgggcctgttcctgatgcttctgggcgagctgggtgtgttcgcctcctacgccttcgcgccgctgtcactcatcgtgcccctcagcgcagtttctgtgatagctagtgccatcataggaatcatattcatcaaggaaaagtggaaaccgaaagactttctgaggcgctacgtcttgtcctttgttggctgcggtttggctgtcgtgggtacctacctgctggtgacattcgcacccaacagtcacgagaagatgacaggcgagaatgtcaccaggcacctcgtgagctggcctttccttttgtacatgctggtggagatcattctgttctgcttgctgctctacttctacaaggagaagaacgccaacaacattgtcgtgattcttctcttggtggcgttacttggctccatgacagtggtgacagtcaaggccgtggctgggatgcttgtcttgtccattcaagggaacctgcagcttgactaccccatcttctacgtgatgttcgtgtgcatggtggcaaccgccgtctatcaggctgcgtttttgagtcaagcctcacagatgtacgactcctctttgattgccagtgtgggctacattctgtccacaaccattgctatcacagcaggtgcaatattttacctggacttcatcggggaggacgtgctgcacatctgcatgtttgcactggggtgcctcattgcattcttgggcgtcttcttaatcacgcgtaacaggaagaagcccattccatttgagccctatatttccatggatgccatgccagattcatatcttcacaacagacaactgctgttcaagaggtattcaaattccagaaatttaccacatcacaatttggagagcctttgagtaattcaagcacctgaaagacttcttaaaaatgagatcgagaaacagcccctgacctccaggaactagcctggcactctcagccaggccttggccctttcctgtggaacagaaacaatttcacagaacatcagcagcagacaaggccactctgcagctgtgatggatcaggacacaagcaggtggaatgggaagaaaagggtttttttcctaaaattaaaaataaataaataaataaaagaacacaaacaggactactctgctagcctgactaaacatagacaaaaaatggacattgtccaaatcatgaaaaacaccaaacatccctctgaccttgctaatgtgagagactgccgcttctttaccaggcacagctttagcttcaatctaggcatcttctaggtaaaagctaagatctccaattatggaattagccctgcttcctgacagcatccaacccaaagcaaagcctcacttccttgaaccctccccaaaaatcacctagtccaagccaaccccacaataactcctttctaaccccctcttacatggttcgtggttccccgccgtgtacacctctctcattgcaatgtgtcaataaacccatatttgttagac

SEQ ID NO: 423802 - DNA, 1427 bp, Homo sapiens
gcatcttggcagctctgaattgggaagggatgaaggaggctgtgcctccgggttgcacgaagagtccgagtcatttctcagaaggttttgataggtgggccttagaggagacgccgccgagcaccgcaagaactggaaaacacacccctctctgtctgcctgggagagccacggaaattggcacttctctgagtgaagctgaggagaaggctgtaaatctgccaaaacagccttgaagtattcttttgtcatgaggaagtgacggctgctggagggaggtgaacaccacaaggagagatggcatctggcctgggccccgcctagcagcagctccacctcctaggccaggccctgtgggatgcgccactagaccaccatggacggatcccacagcgcagccctgaagctgcagcagctgcctcccacaagtagctccagcgccgtaagcgaggcctccttctcctacaaggaaaacctgattggcgccctcttggcgatcttcgggcacctcgtggtcagcattgcacttaacctccagaagtactgccacatccgcctggcaggctccaaggatccccgggcctatttcaagaccaagacatggtggctgggcctgttcctgatgcttctgggcgagctgggtgtgttcgcctcctacgccttcgcgccgctgtcactcatcgtgcccctcagcgcagtttctgtgatagctagtgccatcataggaatcatattcatcaaggaaaagtggaaaccgaaagactttctgaggcgctacgtcttgtcctttgttggctgcggtttggctgtcgtgggtacctacctgctggtgacattcgcacccaacagtcacgagaagatgacaggcgagaatgtcaccaggcacctcgtgagctggcctttccttttgtacatgctggtggagatcattctgttctgcttgctgctctacttctacaaggagaagaacgccaacaacattgtcgtgattcttctcttggtggcgttacttggctccatgacagtggtgacagtcaaggccgtggctgggatgcttgtcttgtccattcaagggaacctgcagcttgactaccccatcttctacgtgatgttcgtgtgcatggtggcaaccgccgtctatcaggctgcgtgagttacaaatccttttcctgctgggccctgccattcgggctgcttctcttttgggggcctgatgacgtatgctgtgaagccacaaggaggccagaacatgccccagggcctggcatccagcatggagagaggagctgctaatttgctgagttgtcacctggagggacacctgccactcaaaagacgaaagtttcaccatgttggccaggctgatctcaaactcctgacctcaggtgacccacccgcctcggcctcccaaagtgctgggattacag

SEQ ID NO: 423803 - DNA, 403 bp, Homo sapiens
agaataaaactgctgaacagtctcagtctaaacagaggtgcttttccagccacttggtttccctggtcagcattaggatcttgccttttgtctacctagattcatatcttcacaacagacaactgctgttcaagaggtattcaaattccagaaatttaccacatcacaatttggagagcctttgagtaattcaagcacctgaaagacttcttaaaaatgagatcgagaaacagcccctgacctccaggaactagcctggcactctcagccaggccttggccctttcctgtggaacagaaacaatttcacagaacatcagcagcagacaaggccactctgcagctgtgatggatcaggacacaagcaggtggaatgggaagaaaagggtttttttcctaaaatt

SEQ ID NO: 423804 - DNA, 915 bp, Homo sapiens
gcatcttggcagctctgaattgggaagggatgaaggaggctgtgcctccgggttgcacgaagagtccgagtcatttctcagaaggttttgataggtgggccttagaggagacgccgccgagcaccgcaagaactggaaaacacacccctctctgtctgcctgggagagccacggaaattggcacttctctgagtgaagctgaggagaaggctgtaaatctgccaaaacagccttgaagtattcttttgtcatgaggaagtgacggctgctggagggaggtgaacaccacaaggagagatggcatctggcctgggccccgcctagcagcagctccacctcctaggccaggccctgtgggatgcgccactagaccaccatggacggatcccacagcgcagccctgaagctgcagcagctgcctcccacaagtagctccagcgccgtaagcgaggcctccttctcctacaaggcaagggcttttttggggtttgggaatttgtattttcctagcaaggaagttacacagtgctctgcattggctaatagatatgtatggggtctgcatgcctgtcactggtagaaacaggcaggctcttcacacagacaagggaatgtgtaagcaaaagacaagagatgggccgggagtggtggctcacacctgtaatcccagcactttgggaggtgggcgggtcacgaggtcaagagattgagaccattctggccagcatggtgaaaccccgtctctactaaaaacacaaagattggctgggcgtggtggtgcccacctgtagtcccagctactcgggaagctgaggcaggagaatcacttgaaccaaggaggtggaggttgcagtgagctgagatggtgccgctgttatccagcctggtgacagagtgagactctgtctcaaaagg

SEQ ID NO: 423805 - DNA, 5505 bp, Homo sapiens
gcatcttggcagctctgaattgggaagggatgaaggaggctgtgcctccgggttgcacgaagagtccgagtcatttctcagaaggttttgataggtgggccttagaggagacgccgccgagcaccgcaagaactggaaaacacacccctctctgtctgcctgggagagccacggaaattggcacttctctgagtgaagctgaggagaaggctgtaaatctgccaaaacagccttgaagtattcttttgtcatgaggaagtgacggctgctggagggaggtgaacaccacaaggagagatggcatctggcctgggccccgcctagcagcagctccacctcctaggccaggccctgtgggatgcgccactagaccaccatggacggatcccacagcgcagccctgaagctgcagcagctgcctcccacaagtagctccagcgccgtaagcgaggcctccttctcctacaaggaaaacctgattggcgccctcttggcgatcttcgggcacctcgtggtcagcattgcacttaacctccagaagtactgccacatccgcctggcaggctccaaggatccccgggcctatttcaagaccaagacatggtggctgggcctgttcctgatgcttctgggcgagctgggtgtgttcgcctcctacgccttcgcgccgctgtcactcatcgtgcccctcagcgcagtttctgtgatagctagtgccatcataggaatcatattcatcaaggaaaagtggaaaccgaaagactttctgaggcgctacgtcttgtcctttgttggctgcggtttggctgtcgtgggtacctacctgctggtgacattcgcacccaacagtcacgagaagatgacaggcgagaatgtcaccaggcacctcgtgagctggcctttccttttgtacatgctggtggagatcattctgttctgcttgctgctctacttctacaaggagaagaacgccaacaacattgtcgtgattcttctcttggtggcgttacttggctccatgacagtggtgacagtcaaggccgtggctgggatgcttgtcttgtccattcaagggaacctgcagcttgactaccccatcttctacgtgatgttcgtgtgcatggtggcaaccgccgtctatcaggctgcgtttttgagtcaagcctcacagatgtacgactcctctttgattgccagtgtgggctacattctgtccacaaccattgctatcacagcaggtgcaatattttacctggacttcatcggggaggacgtgctgcacatctgcatgtttgcactggggtgcctcattgcattcttgggcgtcttcttaatcacgcgtaacaggaagaagcccattccatttgagccctatatttccatggatgccatgccaggtatgcagaacatgcacgataaagggatgactgtccagcctgaacttaaagcttctttttcctatggggctctggaaaacaatgacaacatttctgagatctacgctcctgccaccctgccagtcatgcaagaagagcacggctccagaagtgcctctggggtcccctaccgagtcctagagcacaccaagaaggaatgagactcgcctccctctatttataactgtcccctccaggctgacagtggttcaaccctgaatcctaaaacttgcctttcaagtctcattttgtttctaactgagaactctatggatgatgatctcaaaaagcctttgtctctgggaaaggatgcgttatcttggtcttggaaatttcaaatgatgagggttgggggatggaagcattattccaggtggacgggatagaatccagcctctgcctggattagcccagggggatttggaaagcctttctaccatccttgaggatggtaactgagcttcctctgacagtgaccaaaggatgctgtatccttcagagctaaggcaagacagagagtctgctgttaattctcaaatccagcgaaaggctggacatctctaaatctcgtcttcctccacctcatgtgcatgcctgatctcaccctgacactcctgatgccgcatctgtgatagcactcgtgttgccttcacatggcaggctgggccaaccctgggtggaaggttctgacatttgtgttttcagaaatgtacatctgccttccagtcatctgtgcccttctagggaagatgtgcttgatatgttcaaattggatctactctgaaaacgaaacttggttttggtcctgtgaggactacttgtttgtccacctcctccaccaaaggaattaggaagttaagagaaggggaagaatatggaggataggagagggtgatgatgctttagcccattaaggaagaaaagttccccttactcttacaaaaggtgattgcaccacttaaaaaaggataggtagaaaatctggccattttatgtgttatttttttcctgcataccagtgccccctggaaagatggggatgctcatttcagagacagcctcttcacctgtcctccgtctctccattacagagccacaagccaagcttgagttactggttaatttccttgaagtcaatagagactctctgggtcctcatccccatgcatatatgtctgggagaagcaagcattctccaaaacagggctgttgctttcttcctggccgcatatgtgactgtcttcccctagactgatggtatacttttgagaggggcggataaaggtttgcaaactttaatgggcataaggatcccctagaagcatatgtaaaatgcagattcctgcaccccaactgcagacactgttaagtgggactggagtggggcccacgggtctgcattcttaactggtaccaccagtgattctgatgcgatgcttcaatcccgagatttcacatctggaaagcctaagaatttacaaagatgttctgctaaaacccccagggccccatgcagtcttgctagaaaatttcctccctagggttcctttggaaggttaaatactccccataggatctgtggcatttctccatccaatgaatactacttagagctacactcaccacttccctagacagcctttaataggcatgataacagtgttaatagaccagtgtgatagatcacttatctttatggattgtgcttaatactgatttagtatcttgactccaaaaactgacatctgttgtctgtgataaccacttctgtattgcgtcttaaccacttctgtattgtgtggtcttaactgcctaaggcggcaatgggcagtgggcccctttcccttaggatgggtatcaattcaacaatatttataaggcatttactgtgtgctaagcatttggaagacccaggctacaaaataagacatagttcctgccctccaggccagcagagggaggcacaaatacccaggaatctctgatgggtgtgaagtgcggtcgtgggccacagaaaatgaccgtcatggagaccctgctaaaggtcggaccctgagcccaaaggggtattcagaagtggagatgattttggccccactcatagatgggtggcaaatctaagatttgtataaagcatataaaatagggtgatcacccccgaggcagaggggccagcatttgcaaaggcacagagctaagaggagctgggcaaagaaaggaaagccagggaaggtggtgggagatgagtctcaaagctaagtagtggaagctgggcacagtggctcatgcctgcaatcccagcactttgggaggccaaggctggaggatcacttgagcccaggagttttatatcagcctgggcaacatagcaagacctcatctctgctaaaaattaaaaataaataaattagctgggtgtggtggtgcatgcctgtgatcctagctactcaggaggctgaggtgggaggatcgctagagcccagagaaccaaggctacagtgagccatgatcatgctactgcactccagcctgggtgacaatgagaccatggctcaaaaaaaaaaaaaaaaaaaaaagataagcagtggaggccgaatcatggagggtcttgaatacctggctaaggagtttaaagtgtatccaagaggacgtgggagccactgatggttcatgaggaagagaagggcaggaccagcactgattgaaaaggagggcttgttcagtgtggaggaagaatcagaagggggaataagttaccttctccgagcctgcaagaacaaaaaacaaaaagcagaaattaaaatcaggtttcactgctatttatatatttctcctttcccaaatgatttttctaaagctgggagtggaggtaggagggagaaacagaaggtgagcagggaggctatttagatgtgtcaaacccgggtgatcattaataatttgggcatatatatgctcccaaacttactctgcccccttccttcccttttttttttttttttggtatgggccttttaggcttgggccagccagctttcttgagatgagtgaataaaagcgtattgtaatttcatgtctgcttcagatcatggggacagtgccacccaggaactgctgctgaggcctgggaagctcccttgccttcgggtttggagcagtggcatcatcccaccaacctgagccatgaaagggctgagcagaaagttaaatggtagtttcctgactggaagccacacgtaggtcacttgagtagtcaggaagcacagtgggtgtggagccatcatctgtcttgggctggttcctcccaatctttgtccagtggtataaatggactgtctgctgatggccatacgcagcactggctgttaagatggggaaggggtacatcaggattccactcatagccctggttcgttattgttactcatggctctgacgtccccaagccctcttgaatgttgcaagcaatgttaaatatcacacctcggtctccttttgagcagcccaggtacctaaagcaaggtcaccaaacttgggtttaaacttcagttgccatcacagcagggttcaggttatgcagtttttgcagtgtggagttgaacgctgggtaaagaagggagagctgactctccattgcttttctagtggaaaccagccagtttgacggcacggtgcggatacaggactccatcaggctagtgttggggaaccagcccggcagccttccatgtgaattccaaagctgtttcaacactggctgataggcagacaaaaggttacttgtgtgtttctctgagaagcggtgtaaatgaagtcaccttagaatatattctgtgcggatgcttatattttgttaacttcacgacttatggcatgtcttatttaaaaaaaaaaaagtactaggtgcaaataacattatgaagtggtatttaattaaaaatccatgcagtgacagctgagttcgtgtcttatgtttggctaatacttcctagaattatctagaacagtactgtctagtagaactttctgcgatgatggaagtgttctatgtctatgctgcccaacatgg

SEQ ID NO: 423806 - DNA, 5142 bp, Homo sapiens
  misc_feature (5026)..(5026): n is a, c, g, or t
  misc_feature (5044)..(5044): n is a, c, g, or t
  misc_feature (5052)..(5052): n is a, c, g, or t
  misc_feature (5072)..(5072): n is a, c, g, or t
  misc_feature (5079)..(5079): n is a, c, g, or t
  misc_feature (5084)..(5084): n is a, c, g, or t
  misc_feature (5108)..(5108): n is a, c, g, or t
  misc_feature (5110)..(5110): n is a, c, g, or t
  misc_feature (5134)..(5134): n is a, c, g, or t
gcatcttggcagctctgaattgggaagggatgaaggaggctgtgcctccgggttgcacgaagagtccgagtcatttctcagaaggttttgataggtgggccttagaggagacgccgccgagcaccgcaagaactggaaaacacacccctctctgtctgcctgggagagccacggaaattggcacttctctgagtgaagctgaggagaaggctgtaaatctgccaaaacagccttgaagtattcttttgtcatgaggaagtgacggctgctggagggaggtgaacaccacaaggagagatggcatctggcctgggccccgcctagcagcagctccacctcctaggccaggccctgtgggatgcgccactagaccaccatggacggatcccacagcgcagccctgaagctgcagcagctgcctcccacaagtagctccagcgccgtaagcgaggcctccttctcctacaaggaaaacctgattggcgccctcttggcgatcttcgggcacctcgtggtcagcattgcacttaacctccagaagtactgccacatccgcctggcaggctccaaggatccccgggcctatttcaagaccaagacatggtggctgggcctgttcctgatgcttctgggcgagctgggtgtgttcgcctcctacgccttcgcgccgctgtcactcatcgtgcccctcagcgcagtttctgtgatagctagtgccatcataggaatcatattcatcaaggaaaagtggaaaccgaaagactttctgaggcgctacgtcttgtcctttgttggctgcggtttggctgtcgtgggtacctacctgctggtgacattcgcacccaacagtcacgagaagatgacaggcgagaatgtcaccaggcacctcgtgagctggcctttccttttgtacatgctggtggagatcattctgttctgcttgctgctctacttctacaaggagaagaacgccaacaacattgtcgtgattcttctcttggtggcgttacttggctccatgacagtggtgacagtcaaggccgtggctgggatgcttgtcttgtccattcaagggaacctgcagcttgactaccccatcttctacgtgatgttcgtgtgcatggtggcaaccgccgtctatcaggctgcgtttttgagtcaagcctcacagatgtacgactcctctttgattgccagtgtgggctacattctgtccacaaccattgctatcacagcaggtgcaatattttacctggacttcatcggggaggacgtgctgcacatctgcatgtttgcactggggtgcctcattgcattcttgggcgtcttcttaatcacgcgtaacaggaagaagcccattccatttgagccctatatttccatggatgccatgccaggtatgcagaacatgcacgataaagggatgactgtccagcctgaacttaaagcttctttttcctatggggctctggaaaacaatgacaacatttctgagatctacgctcctgccaccctgccagtcatgcaagaagagcacggctccagaagtgcctctggggtcccctaccgagtcctagagcacaccaagaaggaatgagactcgcctccctctatttataactgtcccctccaggctgacagtggttcaaccctgaatcctaaaacttgcctttcaagtctcattttgtttctaactgagaactctatggatgatgatctcaaaaagcctttgtctctgggaaaggatgcgttatcttggtcttggaaatttcaaatgatgagggttgggggatggaagcattattccaggtggacgggatagaatccagcctctgcctggattagcccagggggatttggaaagcctttctaccatccttgaggatggtaactgagcttcctctgacagtgaccaaaggatgctgtatccttcagagctaaggcaagacagagagtctgctgttaattctcaaatccagcgaaaggctggacatctctaaatctcgtcttcctccacctcatgtgcatgcctgatctcaccctgacactcctgatgccgcatctgtgatagcactcgtgttgccttcacatggcaggctgggccaaccctgggtggaaggttctgacatttgtgttttcagaaatgtacatctgccttccagtcatctgtgcccttctagggaagatgtgcttgatatgttcaaattggatctactctgaaaacgaaacttggttttggtcctgtgaggactacttgtttgtccacctcctccaccaaaggaattaggaagttaagagaaggggaagaatatggaggataggagagggtgatgatgctttagcccattaaggaagaaaagttccccttactcttacaaaaggtgattgcaccacttaaaaaaggataggtagaaaatctggccattttatgtgttatttttttcctgcataccagtgccccctggaaagatggggatgctcatttcagagacagcctcttcacctgtcctccgtctctccattacagagccacaagccaagcttgagttactggttaatttccttgaagtcaatagagactctctgggtcctcatccccatgcatatatgtctgggagaagcaagcattctccaaaacagggctgttgctttcttcctggccgcatatgtgactgtcttcccctagactgatggtatacttttgagaggggcggataaaggtttgcaaactttaatgggcataaggatcccctagaagcatatgtaaaatgcagattcctgcaccccaactgcagacactgttaagtgggactggagtggggcccacgggtctgcattcttaactggtaccaccagtgattctgatgcgatgcttcaatcccgagatttcacatctggaaagcctaagaatttacaaagatgttctgctaaaacccccagggccccatgcagtcttgctagaaaatttcctccctagggttcctttggaaggttaaatactccccataggatctgtggcatttctccatccaatgaatactacttagagctacactcaccacttccctagacagcctttaataggcatgataacagtgttaatagaccagtgtgatagatcacttatctttatggattgtgcttaatactgatttagtatcttgactccaaaaactgacatctgttgtctgtgataaccacttctgtattgcgtcttaaccacttctgtattgtgtggtcttaactgcctaaggcggcaatgggcagtgggcccctttcccttaggatgggtatcaattcaacaatatttataaggcatttactgtgtgctaagcatttggaagacccaggctacaaaataagacatagttcctgccctccaggccagcagagggaggcacaaatacccaggaatctctgatgggtgtgaagtgcggtcgtgggccacagaaaatgaccgtcatggagaccctgctaaaggtcggaccctgagcccaaaggggtattcagaagtggagatgattttggccccactcatagatgggtggcaaatctaagatttgtataaagcatataaaatagggtgatcacccccgaggcagaggggccagcatttgcaaaggcacagagctaagaggagctgggcaaagaaaggaaagccagggaaggtggtgggagatgagtctcaaagctaagtagtggaagctgggcacagtggctcatgcctgcaatcccagcactttgggaggccaaggctggaggatcacttgagcccaggagttttatatcagcctgggcaacatagcaagacctcatctctgctaaaaattaaaaataaataaattagctgggtgtggtggtgcatgcctgtgatcctagctactcaggaggctgaggtgggaggatcgctagagcccagagaaccaaggctacagtgagccatgatcatgctactgcactccagcctgggtgacaatgagaccatggctcaaaaaaaaaaaaaaaaaaaaaagataagcagtggaggccgaatcatggagggtcttgaatacctggctaaggagtttaaagtgtatccaagaggacgtgggagccactgatggttcatgaggaagagaagggcaggaccagcactgattgaaaaggagggcttgttcagtgtggaggaagaatcagaagggggaataagttaccttctccgagcctgcaagaacaaaaaacaaaaagcagaaattaaaatcaggtttcactgctatttatatatttctcctttcccaaatgatttttctaaagctgggagtggaggtaggagggagaaacagaaggtgagcagggaggctatttagatgtgtcaaacccgggtgatcattaataatttgggcatatatatgctcccaaacttactctgcccccttccttcccttttttttttttttttggtatgggccttttaggcttgggccagccagctttcttgagatgagtgaataaaagcgtattgtaatttcatgtctgcttcagatcatggggacagtgccacccaggaactgctgctgaggcctgggaagctcccttgccttcgggtttggagcagtggcatcatcccaccaacctgagccatgaaagggctgagcagaaagttaaatggtagtttcctgactggaagccacacgtaggtcacttgagtagtcaggaagcacagtgggtgtggagccatcatctgtcttgggctggttcctcccaatctttgtccagtggtataaatggactgtctgctgatggccatacgcagcactggctgttaagatggggaaggggtacatcaggattccactcatagccctggttcgttattgttactcatggctctgacgtccccaagccctcttgaatgttgcaagcaatgttaaatatcacacctcggtctccttttgagcagcccaggtacctaaagcaaggtcaccaaacttgggtttaaacttccaagttggccaatcaaaaggaaggggttccaaggtttattggnaaggtttttggggaaggnctttgggngtttgggacccgcttggggnttaaaanggaangggggagggaggtttggactttcntncccaattggggttttttccttttngggggggg

SEQ ID NO: 423807 - DNA, 4949 bp, Homo sapiens
catgtccactcctgtgaactttccttacaggaaaacctgattggcgccctcttggcgatcttcgggcacctcgtggtcagcattgcacttaacctccagaagtactgccacatccgcctggcaggctccaaggatccccgggcctatttcaagaccaagacatggtggctgggcctgttcctgatgcttctgggcgagctgggtgtgttcgcctcctacgccttcgcgccgctgtcactcatcgtgcccctcagcgcagtttctgtgatagctagtgccatcataggaatcatattcatcaaggaaaagtggaaaccgaaagactttctgaggcgctacgtcttgtcctttgttggctgcggtttggctgtcgtgggtacctacctgctggtgacattcgcacccaacagtcacgagaagatgacaggcgagaatgtcaccaggcacctcgtgagctggcctttccttttgtacatgctggtggagatcattctgttctgcttgctgctctacttctacaaggagaagaacgccaacaacattgtcgtgattcttctcttggtggcgttacttggctccatgacagtggtgacagtcaaggccgtggctgggatgcttgtcttgtccattcaagggaacctgcagcttgactaccccatcttctacgtgatgttcgtgtgcatggtggcaaccgccgtctatcaggctgcgtttttgagtcaagcctcacagatgtacgactcctctttgattgccagtgtgggctacattctgtccacaaccattgctatcacagcaggtgcaatattttacctggacttcatcggggaggacgtgctgcacatctgcatgtttgcactggggtgcctcattgcattcttgggcgtcttcttaatcacgcgtaacaggaagaagcccattccatttgagccctatatttccatggatgccatgccaggtatgcagaacatgcacgataaagggatgactgtccagcctgaacttaaagcttctttttcctatggggctctggaaaacaatgacaacatttctgagatctacgctcctgccaccctgccagtcatgcaagaagagcacggctccagaagtgcctctggggtcccctaccgagtcctagagcacaccaagaaggaatgagactcgcctccctctatttataactgtcccctccaggctgacagtggttcaaccctgaatcctaaaacttgcctttcaagtctcattttgtttctaactgagaactctatggatgatgatctcaaaaagcctttgtctctgggaaaggatgcgttatcttggtcttggaaatttcaaatgatgagggttgggggatggaagcattattccaggtggacgggatagaatccagcctctgcctggattagcccagggggatttggaaagcctttctaccatccttgaggatggtaactgagcttcctctgacagtgaccaaaggatgctgtatccttcagagctaaggcaagacagagagtctgctgttaattctcaaatccagcgaaaggctggacatctctaaatctcgtcttcctccacctcatgtgcatgcctgatctcaccctgacactcctgatgccgcatctgtgatagcactcgtgttgccttcacatggcaggctgggccaaccctgggtggaaggttctgacatttgtgttttcagaaatgtacatctgccttccagtcatctgtgcccttctagggaagatgtgcttgatatgttcaaattggatctactctgaaaacgaaacttggttttggtcctgtgaggactacttgtttgtccacctcctccaccaaaggaattaggaagttaagagaaggggaagaatatggaggataggagagggtgatgatgctttagcccattaaggaagaaaagttccccttactcttacaaaaggtgattgcaccacttaaaaaaggataggtagaaaatctggccattttatgtgttatttttttcctgcataccagtgccccctggaaagatggggatgctcatttcagagacagcctcttcacctgtcctccgtctctccattacagagccacaagccaagcttgagttactggttaatttccttgaagtcaatagagactctctgggtcctcatccccatgcatatatgtctgggagaagcaagcattctccaaaacagggctgttgctttcttcctggccgcatatgtgactgtcttcccctagactgatggtatacttttgagaggggcggataaaggtttgcaaactttaatgggcataaggatcccctagaagcatatgtaaaatgcagattcctgcaccccaactgcagacactgttaagtgggactggagtggggcccacgggtctgcattcttaactggtaccaccagtgattctgatgcgatgcttcaatcccgagatttcacatctggaaagcctaagaatttacaaagatgttctgctaaaacccccagggccccatgcagtcttgctagaaaatttcctccctagggttcctttggaaggttaaatactccccataggatctgtggcatttctccatccaatgaatactacttagagctacactcaccacttccctagacagcctttaataggcatgataacagtgttaatagaccagtgtgatagatcacttatctttatggattgtgcttaatactgatttagtatcttgactccaaaaactgacatctgttgtctgtgataaccacttctgtattgcgtcttaaccacttctgtattgtgtggtcttaactgcctaaggcggcaatgggcagtgggcccctttcccttaggatgggtatcaattcaacaatatttataaggcatttactgtgtgctaagcatttggaagacccaggctacaaaataagacatagttcctgccctccaggccagcagagggaggcacaaatacccaggaatctctgatgggtgtgaagtgcggtcgtgggccacagaaaatgaccgtcatggagaccctgctaaaggtcggaccctgagcccaaaggggtattcagaagtggagatgattttggccccactcatagatgggtggcaaatctaagatttgtataaagcatataaaatagggtgatcacccccgaggcagaggggccagcatttgcaaaggcacagagctaagaggagctgggcaaagaaaggaaagccagggaaggtggtgggagatgagtctcaaagctaagtagtggaagctgggcacagtggctcatgcctgcaatcccagcactttgggaggccaaggctggaggatcacttgagcccaggagttttatatcagcctgggcaacatagcaagacctcatctctgctaaaaattaaaaataaataaattagctgggtgtggtggtgcatgcctgtgatcctagctactcaggaggctgaggtgggaggatcgctagagcccagagaaccaaggctacagtgagccatgatcatgctactgcactccagcctgggtgacaatgagaccatggctcaaaaaaaaaaaaaaaaaaaaaagataagcagtggaggccgaatcatggagggtcttgaatacctggctaaggagtttaaagtgtatccaagaggacgtgggagccactgatggttcatgaggaagagaagggcaggaccagcactgattgaaaaggagggcttgttcagtgtggaggaagaatcagaagggggaataagttaccttctccgagcctgcaagaacaaaaaacaaaaagcagaaattaaaatcaggtttcactgctatttatatatttctcctttcccaaatgatttttctaaagctgggagtggaggtaggagggagaaacagaaggtgagcagggaggctatttagatgtgtcaaacccgggtgatcattaataatttgggcatatatatgctcccaaacttactctgcccccttccttcccttttttttttttttttggtatgggccttttaggcttgggccagccagctttcttgagatgagtgaataaaagcgtattgtaatttcatgtctgcttcagatcatggggacagtgccacccaggaactgctgctgaggcctgggaagctcccttgccttcgggtttggagcagtggcatcatcccaccaacctgagccatgaaagggctgagcagaaagttaaatggtagtttcctgactggaagccacacgtaggtcacttgagtagtcaggaagcacagtgggtgtggagccatcatctgtcttgggctggttcctcccaatctttgtccagtggtataaatggactgtctgctgatggccatacgcagcactggctgttaagatggggaaggggtacatcaggattccactcatagccctggttcgttattgttactcatggctctgacgtccccaagccctcttgaatgttgcaagcaatgttaaatatcacacctcggtctccttttgagcagcccaggtacctaaagcaaggtcaccaaacttgggtttaaacttcagttgccatcacagcagggttcaggttatgcagtttttgcagtgtggagttgaacgctgggtaaagaagggagagctgactctccattgcttttctagtggaaaccagccagtttgacggcacggtgcggatacaggactccatcaggctagtgttggggaaccagcccggcagccttccatgtgaattccaaagctgtttcaacactggctgataggcagacaaaaggttacttgtgtgtttctctgagaagcggtgtaaatgaagtcaccttagaatatattctgtgcggatgcttatattttgttaacttcacgacttatggcatgtcttatttaaaaaaaaaaaagtactaggtgcaaataacattatgaagtggtatttaattaaaaatccatgcagtga

SEQ ID NO: 423808 - DNA, 4557 bp, Homo sapiens
tgtgagtgccacgagacccagtgcacacggcgtctgtcactgtgcaaatctgccggcttgactctgttcctgttccctcccctctgtctccccaagtcctttggggttatagactggctttccggatctaactctctgcatttccctgaggctccccattcacccttgtctcccatctgcaggctccatgacagtggtgacagtcaaggccgtggctgggatgcttgtcttgtccattcaagggaacctgcagcttgactaccccatcttctacgtgatgttcgtgtgcatggtggcaaccgccgtctatcaggctgcgtttttgagtcaagcctcacagatgtacgactcctctttgattgccagtgtgggctacattctgtccacaaccattgctatcacagcaggtgcaatattttacctggacttcatcggggaggacgtgctgcacatctgcatgtttgcactggggtgcctcattgcattcttgggcgtcttcttaatcacgcgtaacaggaagaagcccattccatttgagccctatatttccatggatgccatgccaggtatgcagaacatgcacgataaagggatgactgtccagcctgaacttaaagcttctttttcctatggggctctggaaaacaatgacaacatttctgagatctacgctcctgccaccctgccagtcatgcaagaagagcacggctccagaagtgcctctggggtcccctaccgagtcctagagcacaccaagaaggaatgagactcgcctccctctatttataactgtcccctccaggctgacagtggttcaaccctgaatcctaaaacttgcctttcaagtctcattttgtttctaactgagaactctatggatgatgatctcaaaaagcctttgtctctgggaaaggatgcgttatcttggtcttggaaatttcaaatgatgagggttgggggatggaagcattattccaggtggacgggatagaatccagcctctgcctggattagcccagggggatttggaaagcctttctaccatccttgaggatggtaactgagcttcctctgacagtgaccaaaggatgctgtatccttcagagctaaggcaagacagagagtctgctgttaattctcaaatccagcgaaaggctggacatctctaaatctcgtcttcctccacctcatgtgcatgcctgatctcaccctgacactcctgatgccgcatctgtgatagcactcgtgttgccttcacatggcaggctgggccaaccctgggtggaaggttctgacatttgtgttttcagaaatgtacatctgccttccagtcatctgtgcccttctagggaagatgtgcttgatatgttcaaattggatctactctgaaaacgaaacttggttttggtcctgtgaggactacttgtttgtccacctcctccaccaaaggaattaggaagttaagagaaggggaagaatatggaggataggagagggtgatgatgctttagcccattaaggaagaaaagttccccttactcttacaaaaggtgattgcaccacttaaaaaaggataggtagaaaatctggccattttatgtgttatttttttcctgcataccagtgccccctggaaagatggggatgctcatttcagagacagcctcttcacctgtcctccgtctctccattacagagccacaagccaagcttgagttactggttaatttccttgaagtcaatagagactctctgggtcctcatccccatgcatatatgtctgggagaagcaagcattctccaaaacagggctgttgctttcttcctggccgcatatgtgactgtcttcccctagactgatggtatacttttgagaggggcggataaaggtttgcaaactttaatgggcataaggatcccctagaagcatatgtaaaatgcagattcctgcaccccaactgcagacactgttaagtgggactggagtggggcccacgggtctgcattcttaactggtaccaccagtgattctgatgcgatgcttcaatcccgagatttcacatctggaaagcctaagaatttacaaagatgttctgctaaaacccccagggccccatgcagtcttgctagaaaatttcctccctagggttcctttggaaggttaaatactccccataggatctgtggcatttctccatccaatgaatactacttagagctacactcaccacttccctagacagcctttaataggcatgataacagtgttaatagaccagtgtgatagatcacttatctttatggattgtgcttaatactgatttagtatcttgactccaaaaactgacatctgttgtctgtgataaccacttctgtattgcgtcttaaccacttctgtattgtgtggtcttaactgcctaaggcggcaatgggcagtgggcccctttcccttaggatgggtatcaattcaacaatatttataaggcatttactgtgtgctaagcatttggaagacccaggctacaaaataagacatagttcctgccctccaggccagcagagggaggcacaaatacccaggaatctctgatgggtgtgaagtgcggtcgtgggccacagaaaatgaccgtcatggagaccctgctaaaggtcggaccctgagcccaaaggggtattcagaagtggagatgattttggccccactcatagatgggtggcaaatctaagatttgtataaagcatataaaatagggtgatcacccccgaggcagaggggccagcatttgcaaaggcacagagctaagaggagctgggcaaagaaaggaaagccagggaaggtggtgggagatgagtctcaaagctaagtagtggaagctgggcacagtggctcatgcctgcaatcccagcactttgggaggccaaggctggaggatcacttgagcccaggagttttatatcagcctgggcaacatagcaagacctcatctctgctaaaaattaaaaataaataaattagctgggtgtggtggtgcatgcctgtgatcctagctactcaggaggctgaggtgggaggatcgctagagcccagagaaccaaggctacagtgagccatgatcatgctactgcactccagcctgggtgacaatgagaccatggctcaaaaaaaaaaaaaaaaaaaaaagataagcagtggaggccgaatcatggagggtcttgaatacctggctaaggagtttaaagtgtatccaagaggacgtgggagccactgatggttcatgaggaagagaagggcaggaccagcactgattgaaaaggagggcttgttcagtgtggaggaagaatcagaagggggaataagttaccttctccgagcctgcaagaacaaaaaacaaaaagcagaaattaaaatcaggtttcactgctatttatatatttctcctttcccaaatgatttttctaaagctgggagtggaggtaggagggagaaacagaaggtgagcagggaggctatttagatgtgtcaaacccgggtgatcattaataatttgggcatatatatgctcccaaacttactctgcccccttccttcccttttttttttttttttggtatgggccttttaggcttgggccagccagctttcttgagatgagtgaataaaagcgtattgtaatttcatgtctgcttcagatcatggggacagtgccacccaggaactgctgctgaggcctgggaagctcccttgccttcgggtttggagcagtggcatcatcccaccaacctgagccatgaaagggctgagcagaaagttaaatggtagtttcctgactggaagccacacgtaggtcacttgagtagtcaggaagcacagtgggtgtggagccatcatctgtcttgggctggttcctcccaatctttgtccagtggtataaatggactgtctgctgatggccatacgcagcactggctgttaagatggggaaggggtacatcaggattccactcatagccctggttcgttattgttactcatggctctgacgtccccaagccctcttgaatgttgcaagcaatgttaaatatcacacctcggtctccttttgagcagcccaggtacctaaagcaaggtcaccaaacttgggtttaaacttcagttgccatcacagcagggttcaggttatgcagtttttgcagtgtggagttgaacgctgggtaaagaagggagagctgactctccattgcttttctagtggaaaccagccagtttgacggcacggtgcggatacaggactccatcaggctagtgttggggaaccagcccggcagccttccatgtgaattccaaagctgtttcaacactggctgataggcagacaaaaggttacttgtgtgtttctctgagaagcggtgtaaatgaagtcaccttagaatatattctgtgcggatgcttatattttgttaacttcacgacttatggcatgtcttatttaaaaaaaaaaaagtactaggtgcaaataacattatgaagtggtatttaattaaaaatccatgcagtga

SEQ ID NO: 423809 - DNA, 1704 bp, Homo sapiens
gcatcttggcagctctgaattgggaagggatgaaggaggctgtgcctccgggttgcacgaagagtccgagtcatttctcagaaggttttgataggtgggccttagaggagacgccgccgagcaccgcaagaactggaaaacacacccctctctgtctgcctgggagagccacggaaattggcacttctctgagtgaagctgaggagaaggctgtaaatctgccaaaacagccttgaagtattcttttgtcatgaggaagtgacggctgctggagggaggtgaacaccacaaggagagatggcatctggcctgggccccgcctagcagcagctccacctcctaggccaggccctgtgggatgcgccactagaccaccatggacggatcccacagcgcagccctgaagctgcagcagctgcctcccacaagtagctccagcgccgtaagcgaggcctccttctcctacaaggaaaacctgattggcgccctcttggcgatcttcgggcacctcgtggtcagcattgcacttaacctccagaagtactgccacatccgcctggcaggctccaaggatccccgggcctatttcaagaccaagacatggtggctgggcctgttcctgatgcttctgggcgagctgggtgtgttcgcctcctacgccttcgcgccgctgtcactcatcgtgcccctcagcgcagtttctgtgatagctagtgccatcataggaatcatattcatcaaggaaaagtggaaaccgaaagactttctgaggcgctacgtcttgtcctttgttggctgcggtttggctgtcgtgggtacctacctgctggtgacattcgcacccaacagtcacgagaagatgacaggcgagaatgtcaccaggcacctcgtgagctggcctttccttttgtacatgctggtggagatcattctgttctgcttgctgctctacttctacaaggagaagaacgccaacaacattgtcgtgattcttctcttggtggcgttacttggctccatgacagtggtgacagtcaaggccgtggctgggatgcttgtcttgtccattcaagggaacctgcagcttgactaccccatcttctacgtgatgttcgtgtgcatggtggcaaccgccgtctatcaggctgcgtttttgagtcaagcctcacagatgtacgactcctctttgattgccagtgtgggctacattctgtccacaaccattgctatcacagcaggtgcaatattttacctggacttcatcggggaggacgtgctgcacatctgcatgtttgcactggggtgcctcattgcattcttgggcgtcttcttaatcacgcgtaacaggaagaagcccattccatttgagccctatatttccatggatgccatgccagtggaaaccagccagtttgacggcacggtgcggatacaggactccatcaggctagtgttggggaaccagcccggcagccttccatgtgaattccaaagctgtttcaacactggctgataggcagacaaaaggttacttgtgtgtttctctgagaagcggtgtaaatgaagtcaccttagaatatattctgtgcggatgcttatattttgttaacttcacgacttatggcatgtcttatttaaaaaaaaaaaagtactaggtgcaaataacattatgaagtggtatttaattaaaaatccatgcagtga

SEQ ID NO: 423810 - DNA, 416 bp, Homo sapiens
cttccctcttccccatctctgcccaggagcttggtttgatccgcaaacctgcctcgttcatgaccagcatctgcgatgagcgaggacaggagctcatctacgcgggcatgcccatcactgaggtcttcaaggaagagatgggcattggcggggtcctcggcctcctctggttccagaaaaggtgagcatggagggcagaagattacagggccctgcagctcagagttaatgattttcccccaacaaaggggtgggagtggacaggcctggggagtgtgtccaagatcaatctttggggccacaggtcaattgagcggccagaggaaggacacataaactattcctaagtcttccaaggacagaaagtccagtcacatgagccactgcacccaaccaaatgcagatctcttgacagc

SEQ ID NO: 423811 - DNA, 4354 bp, Homo sapiens
cgcggggccgttctcgccgcgagccgatgggggcggggaaaagtccggctgggccgggacaaaagccggatcccgggaagctaccggctgctggggtgctccggattttgcggggttcgtcgggcctgtggaagaagcgccgcgcacggacttcggcagaggtagagcaggtctctctgcagccatgtcggccaaggcaatttcagagcagacgggcaaagaactcctttacaagttcatctgtaccacctcagccatccagaatcggttcaagtatgctcgggtcactcctgacacagactgggcccgcttgctgcaggaccacccctggctgctcagccagaacttggtagtcaagccagaccagctgatcaaacgtcgtggaaaacttggtctcgttggggtcaacctcactctggatggggtcaagtcctggctgaagccacggctgggacaggaagccacagttggcaaggccacaggcttcctcaagaactttctgatcgagcccttcgtcccccacagtcaggctgaggagttctatgtctgcatctatgccacccgagaaggggactacgtcctgttccaccacgaggggggtgtggacgtgggtgatgtggacgccaaggcccagaagctgcttgttggcgtggatgagaaactgaatcctgaggacatcaaaaaacacctgttggtccacgcccctgaagacaagaaagaaattctggccagttttatctccggcctcttcaatttctacgaggacttgtacttcacctacctcgagatcaatccccttgtagtgaccaaagatggagtctatgtccttgacttggcggccaaggtggacgccactgccgactacatctgcaaagtgaagtggggtgacatcgagttccctccccccttcgggcgggaggcatatccagaggaagcctacattgcagacctcgatgccaaaagtggggcaagcctgaagctgaccttgctgaaccccaaagggaggatctggaccatggtggccgggggtggcgcctctgtcgtgtacagcgataccatctgtgatctagggggtgtcaacgagctggcaaactatggggagtactcaggcgcccccagcgagcagcagacctatgactatgccaagactatcctctccctcatgacccgagagaagcacccagatggcaagatcctcatcattggaggcagcatcgcaaacttcaccaacgtggctgccacgttcaagggcatcgtgagagcaattcgagattaccagggccccctgaaggagcacgaagtcacaatctttgtccgaagaggtggccccaactatcaggagggcttacgggtgatgggagaagtcgggaagaccactgggatccccatccatgtctttggcacagagactcacatgacggccattgtgggcatggccctgggccaccggcccatccccaaccagccacccacagcggcccacactgcaaacttcctcctcaacgccagcgggagcacatcgacgccagcccccagcaggacagcatctttttctgagtccagggccgatgaggtggcgcctgcaaagaaggccaagcctgccatgccacaaggaaagagcaccaccctcttcagccgccacaccaaggccattgtgtggggcatgcagacccgggccgtgcaaggcatgctggactttgactatgtctgctcccgagacgagccctcagtggctgccatggtctaccctttcactggggaccacaagcagaagttttactgggggcacaaagagatcctgatccctgtcttcaagaacatggctgatgccatgaggaagcacccggaggtagatgtgctcatcaactttgcctctctccgctctgcctatgacagcaccatggagaccatgaactatgcccagatccggaccatcgccatcatagctgaaggcatccctgaggccctcacgagaaagctgatcaagaaggcggaccagaagggagtgaccatcatcggacctgccactgttggaggcatcaagcctgggtgctttaagattggcaacacaggtgggatgctggacaacatcctggcctccaaactgtaccgcccaggcagcgtggcctatgtctcacgttccggaggcatgtccaacgagctcaacaatatcatctctcggaccacggatggcgtctatgagggcgtggccattggtggggacaggtacccgggctccacattcatggatcatgtgttacgctatcaggacactccaggagtcaaaatgattgtggttcttggagagattgggggcactgaggaatataagatttgccggggcatcaaggagggccgcctcactaagcccatcgtctgctggtgcatcgggacgtgtgccaccatgttctcctctgaggtccagtttggccatgctggagcttgtgccaaccaggcttctgaaactgcagtagccaagaaccaggctttgaaggaagcaggagtgtttgtgccccggagctttgatgagcttggagagatcatccagtctgtatacgaagatctcgtggccaatggagtcattgtacctgcccaggaggtgccgcccccaaccgtgcccatggactactcctgggccagggagcttggtttgatccgcaaacctgcctcgttcatgaccagcatctgcgatgagcgaggacaggagctcatctacgcgggcatgcccatcactgaggtcttcaaggaagagatgggcattggcggggtcctcggcctcctctggttccagaaaaggttgcctaagtactcttgccagttcattgagatgtgtctgatggtgacagctgatcacgggccagccgtctctggagcccacaacaccatcatttgtgcgcgagctgggaaagacctggtctccagcctcacctcggggctgctcaccatcggggatcggtttgggggtgccttggatgcagcagccaagatgttcagtaaagcctttgacagtggcattatccccatggagtttgtgaacaagatgaagaaggaagggaagctgatcatgggcattggtcaccgagtgaagtcgataaacaacccagacatgcgagtgcagatcctcaaagattacgtcaggcagcacttccctgccactcctctgctcgattatgcactggaagtagagaagattaccacctcgaagaagccaaatcttatcctgaatgtagatggtctcatcggagtcgcatttgtagacatgcttagaaactgtgggtcctttactcgggaggaagctgatgaatatattgacattggagccctcaatggcatctttgtgctgggaaggagtatggggttcattggacactatcttgatcagaagaggctgaagcaggggctgtatcgtcatccgtgggatgatatttcatatgttcttccggaacacatgagcatgtaacagagccaggaaccctactgcagtaaactgaagacaagaactcttcccccaagaaaaagtgtacagacagctggcagtggagcctgctttatttagcaggggcctggaatgtaaacagccactggggtacaggcaccgaagaccaacatccacaggctaacaccccttcagtccacacaaagaagcttcatattttttttataagcatagaaataaaaaccaagccaatatttgtgactttgctctgctacctgctgtatttattatatggaagcatctaagtactgtcaggatggggtcttcctcattgtagggcgttaggatgttgctttctttttccattagttaaacatttttttctcctttggaggaagggaatgaaacatttatggcctcaagatactatacatttaaagcaccccaatgtctctctttttttttttttacttccctttcttcttccttatataacatgaagaacattgtattaatctgatttttaaagatctttttgtatgttacgtgttaagggcttgtttggtatcccactgaaatgttctgtgttgcagaccagagtctgtttatgtcagggggatggggccattgcatccttagccattgtcacaaaatatgtggagtagtaacttaatatgtaaagttgtaacatacatacatttaaaatggaaatgcagaaagctgtgaaatgtcttgtgtcttatgttctctgtatttatgcagctgatttgtctgtctgtaactgaagtgtgggtccaaggactcctaactactttgcatctgtaatccacaaagattctgggcagctgccacctcagtctcttctctgtattatcatagtctggtttaaataaactatatagtaacaatgaaggcata

SEQ ID NO: 423812 - DNA, 4748 bp, Homo sapiens
cgcggggccgttctcgccgcgagccgatgggggcggggaaaagtccggctgggccgggacaaaagccggatcccgggaagctaccggctgctggggtgctccggattttgcggggttcgtcgggcctgtggaagaagcgccgcgcacggacttcggcagaggtagagcaggtctctctgcagccatgtcggccaaggcaatttcagagcagacgggcaaagaactcctttacaagttcatctgtaccacctcagccatccagaatcggttcaagtatgctcgggtcactcctgacacagactgggcccgcttgctgcaggaccacccctggctgctcagccagaacttggtagtcaagccagaccagctgatcaaacgtcgtggaaaacttggtctcgttggggtcaacctcactctggatggggtcaagtcctggctgaagccacggctgggacaggaagccacagttggcaaggccacaggcttcctcaagaactttctgatcgagcccttcgtcccccacagtcaggctgaggagttctatgtctgcatctatgccacccgagaaggggactacgtcctgttccaccacgaggggggtgtggacgtgggtgatgtggacgccaaggcccagaagctgcttgttggcgtggatgagaaactgaatcctgaggacatcaaaaaacacctgttggtccacgcccctgaagacaagaaagaaattctggccagttttatctccggcctcttcaatttctacgaggacttgtacttcacctacctcgagatcaatccccttgtagtgaccaaagatggagtctatgtccttgacttggcggccaaggtggacgccactgccgactacatctgcaaagtgaagtggggtgacatcgagttccctccccccttcgggcgggaggcatatccagaggaagcctacattgcagacctcgatgccaaaagtggggcaagcctgaagctgaccttgctgaaccccaaagggaggatctggaccatggtggccgggggtggcgcctctgtcgtgtacagcgataccatctgtgatctagggggtgtcaacgagctggcaaactatggggagtactcaggcgcccccagcgagcagcagacctatgactatgccaagactatcctctccctcatgacccgagagaagcacccagatggcaagatcctcatcattggaggcagcatcgcaaacttcaccaacgtggctgccacgttcaagggcatcgtgagagcaattcgagattaccagggccccctgaaggagcacgaagtcacaatctttgtccgaagaggtggccccaactatcaggagggcttacgggtgatgggagaagtcgggaagaccactgggatccccatccatgtctttggcacagagactcacatgacggccattgtgggcatggccctgggccaccggcccatccccaaccagccacccacagcggcccacactgcaaacttcctcctcaacgccagcgggagcacatcgacgccagcccccagcaggacagcatctttttctgagtccagggccgatgaggtggcgcctgcaaagaaggccaagcctgccatgccacaagattcagtcccaagtccaagatccctgcaaggaaagagcaccaccctcttcagccgccacaccaaggccattgtgtggggcatgcagacccgggccgtgcaaggcatgctggactttgactatgtctgctcccgagacgagccctcagtggctgccatggtctaccctttcactggggaccacaagcagaagttttactgggggcacaaagagatcctgatccctgtcttcaagaacatggctgatgccatgaggaagcacccggaggtagatgtgctcatcaactttgcctctctccgctctgcctatgacagcaccatggagaccatgaactatgcccagatccggaccatcgccatcatagctgaaggcatccctgaggccctcacgagaaagctgatcaagaaggcggaccagaagggagtgaccatcatcggacctgccactgttggaggcatcaagcctgggtgctttaagattggcaacacaggtgggatgctggacaacatcctggcctccaaactgtaccgcccaggcagcgtggcctatgtctcacgttccggaggcatgtccaacgagctcaacaatatcatctctcggaccacggatggcgtctatgagggcgtggccattggtggggacaggtacccgggctccacattcatggatcatgtgttacgctatcaggacactccaggagtcaaaatgattgtggttcttggagagattgggggcactgaggaatataagatttgccggggcatcaaggagggccgcctcactaagcccatcgtctgctggtgcatcgggacgtgtgccaccatgttctcctctgaggtccagtttggccatgctggagcttgtgccaaccaggcttctgaaactgcagtagccaagaaccaggctttgaaggaagcaggagtgtttgtgccccggagctttgatgagcttggagagatcatccagtctgtatacgaagatctcgtggccaatggagtcattgtacctgcccaggaggtgccgcccccaaccgtgcccatggactactcctgggccagggagcttggtttgatccgcaaacctgcctcgttcatgaccagcatctgcgatgagcgaggacaggagctcatctacgcgggcatgcccatcactgaggtcttcaaggaagagatgggcattggcggggtcctcggcctcctctggttccagaaaaggttgcctaagtactcttgccagttcattgagatgtgtctgatggtgacagctgatcacgggccagccgtctctggagcccacaacaccatcatttgtgcgcgagctgggaaagacctggtctccagcctcacctcggggctgctcaccatcggggatcggtttgggggtgccttggatgcagcagccaagatgttcagtaaagcctttgacagtggcattatccccatggagtttgtgaacaagatgaagaaggaagggaagctgatcatgggcattggtcaccgagtgaagtcgataaacaacccagacatgcgagtgcagatcctcaaagattacgtcaggcagcacttccctgccactcctctgctcgattatgcactggaagtagagaagattaccacctcgaagaagccaaatcttatcctgaatgtagatggtctcatcggagtcgcatttgtagacatgcttagaaactgtgggtcctttactcgggaggaagctgatgaatatattgacattggagccctcaatggcatctttgtgctgggaaggagtatggggttcattggacactatcttgatcagaagaggctgaagcaggggctgtatcgtcatccgtgggatgatatttcatatgttcttccggaacacatgagcatgtaacagagccaggaaccctactgcagtaaactgaagacaagaactcttcccccaagaaaaagtgtacagacagctggcagtggagcctgctttatttagcaggggcctggaatgtaaacagccactggggtacaggcaccgaagaccaacatccacaggctaacaccccttcagtccacacaaagaagcttcatattttttttataagcatagaaataaaaaccaagccaatatttgtgactttgctctgctacctgctgtatttattatatggaagcatctaagtactgtcaggatggggtcttcctcattgtagggcgttaggatgttgctttctttttccattagttaaacatttttttctcctttggaggaagggaatgaaacatttatggcctcaagatactatacatttaaagcaccccaatgtctctctttttttttttttacttccctttcttcttccttatataacatgaagaacattgtattaatctgatttttaaagatctttttgtatgttacgtgttaagggcttgtttggtatcccactgaaatgttctgtgttgcagaccagagtctgtttatgtcagggggatggggccattgcatccttagccattgtcacaaaatatgtggagtagtaacttaatatgtaaagttgtaacatacatacatttaaaatggaaatgcagaaagctgtgaaatgtcttgtgtcttatgttctctgtatttatgcagctgatttgtctgtctgtaactgaagtgtgggtccaaggactcctaactactttgcatctgtaatccacaaagattctgggcagctgccacctcagtctcttctctgtattatcatagtctggtttaaataaactatatagtaacaatgaaggcataaaaaaaccaacaaaacacccaaacccagacgaacagcaaacaacacacaaagaaccaaaaaaaacaaccgcccccacgacacgccaccaaaacaacaacaccagggggggccgccgccccaaagaaaaaacaccgccgtgagtggccgcccaaaagtgccaagatgagtcggtgaccacgacgcgcggcaaatgtgggctaacaaaaaaggcgggggccgatcaaccacagcgggagcacatcacaacggcgcccaacccccgcgccggtaaagacaaagcaacgagcacacaacaccacgaacaagcacaccccagcacacccgcgcaaaaagctaccaaccacaccagccgctggacgccct

SEQ ID NO: 423813 - DNA, 4330 bp, Homo sapiens
cgcggggccgttctcgccgcgagccgatgggggcggggaaaagtccggctgggccgggacaaaagccggatcccgggaagctaccggctgctggggtgctccggattttgcggggttcgtcgggcctgtggaagaagcgccgcgcacggacttcggcagaggtagagcaggtctctctgcagccatgtcggccaaggcaatttcagagcagacgggcaaagaactcctttacaagttcatctgtaccacctcagccatccagaatcggttcaagtatgctcgggtcactcctgacacagactgggcccgcttgctgcaggaccacccctggctgctcagccagaacttggtagtcaagccagaccagctgatcaaacgtcgtggaaaacttggtctcgttggggtcaacctcactctggatggggtcaagtcctggctgaagccacggctgggacaggaagccacagttggcaaggccacaggcttcctcaagaactttctgatcgagcccttcgtcccccacagtcaggctgaggagttctatgtctgcatctatgccacccgagaaggggactacgtcctgttccaccacgaggggggtgtggacgtgggtgatgtggacgccaaggcccagaagctgcttgttggcgtggatgagaaactgaatcctgaggacatcaaaaaacacctgttggtccacgcccctgaagacaagaaagaaattctggccagttttatctccggcctcttcaatttctacgaggacttgtacttcacctacctcgagatcaatccccttgtagtgaccaaagatggagtctatgtccttgacttggcggccaaggtggacgccactgccgactacatctgcaaagtgaagtggggtgacatcgagttccctccccccttcgggcgggaggcatatccagaggaagcctacattgcagacctcgatgccaaaagtggggcaagcctgaagctgaccttgctgaaccccaaagggaggatctggaccatggtggccgggggtggcgcctctgtcgtgtacagcgataccatctgtgatctagggggtgtcaacgagctggcaaactatggggagtactcaggcgcccccagcgagcagcagacctatgactatgccaagactatcctctccctcatgacccgagagaagcacccagatggcaagatcctcatcattggaggcagcatcgcaaacttcaccaacgtggctgccacgttcaagggcatcgtgagagcaattcgagattaccagggccccctgaaggagcacgaagtcacaatctttgtccgaagaggtggccccaactatcaggagggcttacgggtgatgggagaagtcgggaagaccactgggatccccatccatgtctttggcacagagactcacatgacggccattgtgggcatggccctgggccaccggcccatccccaaccagccacccacagcggcccacactgcaaacttcctcctcaacgccagcgggagcacatcgacgccagcccccagcaggacagcatctttttctgagtccagggccgatgaggtggcgcctgcaaagaaggccaagcctgccatgccacaagattcagtcccaagtccaagatccctgcaaggaaagagcaccaccctcttcagccgccacaccaaggccattgtgtggggcatgcagacccgggccgtgcaaggcatgctggactttgactatgtctgctcccgagacgagccctcagtggctgccatggtctaccctttcactggggaccacaagcagaagttttactgggggcacaaagagatcctgatccctgtcttcaagaacatggctgatgccatgaggaagcacccggaggtagatgtgctcatcaactttgcctctctccgctctgcctatgacagcaccatggagaccatgaactatgcccagatccggaccatcgccatcatagctgaaggcatccctgaggccctcacgagaaagctgatcaagaaggcggaccagaagggagtgaccatcatcggacctgccactgttggaggcatcaagcctgggtgctttaagattggcaacacaggtgggatgctggacaacatcctggcctccaaactgtaccgcccaggcagcgtggcctatgtctcacgttccggaggcatgtccaacgagctcaacaatatcatctctcggaccacggatggcgtctatgagggcgtggccattggtggggacaggtacccgggctccacattcatggatcatgtgttacgctatcaggacactccaggagtcaaaatgattgtggttcttggagagattgggggcactgaggaatataagatttgccggggcatcaaggagggccgcctcactaagcccatcgtctgctggtgcatcgggacgtgtgccaccatgttctcctctgaggtccagtttggccatgctggagcttgtgccaaccaggcttctgaaactgcagtagccaagaaccaggctttgaaggaagcaggagtgtttgtgccccggagctttgatgagcttggagagatcatccagtctgtatacgaagatctcgtggccaatggagtcattgtacctgcccaggaggtgccgcccccaaccgtgcccatggactactcctgggccagggagcttggtttgatccgcaaacctgcctcgttcatgaccagcatctgcgatgagcgaggacaggagctcatctacgcgggcatgcccatcactgaggtcttcaaggaagagatgggcattggcggggtcctcggcctcctctggttccagaaaaggttgcctaagtactcttgccagttcattgagatgtgtctgatggtgacagctgatcacgggccagccgtctctggagcccacaacaccatcatttgtgcgcgagctgggaaagacctggtctccagcctcacctcggggctgctcaccatcggggatcggtttgggggtgccttggatgcagcagccaagatgttcagtaaagcctttgacagtggcattatccccatggagtttgtgaacaagatgaagaaggaagggaagctgatcatgggcattggtcaccgagtgaagtcgataaacaacccagacatgcgagtgcagatcctcaaagattacgtcaggcagcacttccctgccactcctctgctcgattatgcactggaagtagagaagattaccacctcgaagaagccaaatcttatcctgaatgtagatggtctcatcggagtcgcatttgtagacatgcttagaaactgtgggtcctttactcgggaggaagctgatgaatatattgacattggagccctcaatggcatctttgtgctgggaaggagtatggggttcattggacactatcttgatcagaagaggctgaagcaggggctgtatcgtcatccgtgggatgatatttcatatgttcttccggaacacatgagcatgtaacagagccaggaaccctactgcagtaaactgaagacaagaactcttcccccaagaaaaagtgtacagacagctggcagtggagcctgctttatttagcaggggcctggaatgtaaacagccactggggtacaggcaccgaagaccaacatccacaggctaacaccccttcagtccacacaaagaagcttcatattttttttataagcatagaaataggaagcatctaagtactgtcaggatggggtcttcctcattgtagggcgttaggatgttgctttctttttccattagttaaacatttttttctcctttggaggaagggaatgaaacatttatggcctcaagatactatacatttaaagcaccccaatgtctctctttttttttttttacttccctttcttcttccttatataacatgaagaacattgtattaatctgatttttaaagatctttttgtatgttacgtgttaagggcttgtttggtatcccactgaaatgttctgtgttgcagaccagagtctgtttatgtcagggggatggggccattgcatccttagccattgtcacaaaatatgtggagtagtaacttaatatgtaaagttgtaacatacatacatttaaaatggaaatgcagaaagctgtgaaatgtcttgtgtcttatgttctctgtatttatgcagctgatttgtctgtctgtaactgaagtgtgggtccaaggactcctaactactttgcatctgtaatccacaaagattctgggcagctgccacctcagtctcttctctgtattatcatagtctggtttaaataaactatatagtaacaatgaaggcata

SEQ ID NO: 423814 - DNA, 2821 bp, Homo sapiens
gtctgtcaggcagccctggcccctgcaggtctcctgggggtatgtgttctgggtgcactctctgtgtctttgcccaccaggaaagagcaccaccctcttcagccgccacaccaaggccattgtgtggggcatgcagacccgggccgtgcaaggcatgctggactttgactatgtctgctcccgagacgagccctcagtggctgccatggtctaccctttcactggggaccacaagcagaagttttactgggggcacaaagagatcctgatccctgtcttcaagaacatggctgatgccatgaggaagcacccggaggtagatgtgctcatcaactttgcctctctccgctctgcctatgacagcaccatggagaccatgaactatgcccagatccggaccatcgccatcatagctgaaggcatccctgaggccctcacgagaaagctgatcaagaaggcggaccagaagggagtgaccatcatcggacctgccactgttggaggcatcaagcctgggtgctttaagattggcaacacaggtgggatgctggacaacatcctggcctccaaactgtaccgcccaggcagcgtggcctatgtctcacgttccggaggcatgtccaacgagctcaacaatatcatctctcggaccacggatggcgtctatgagggcgtggccattggtggggacaggtacccgggctccacattcatggatcatgtgttacgctatcaggacactccaggagtcaaaatgattgtggttcttggagagattgggggcactgaggaatataagatttgccggggcatcaaggagggccgcctcactaagcccatcgtctgctggtgcatcgggacgtgtgccaccatgttctcctctgaggtccagtttggccatgctggagcttgtgccaaccaggcttctgaaactgcagtagccaagaaccaggctttgaaggaagcaggagtgtttgtgccccggagctttgatgagcttggagagatcatccagtctgtatacgaagatctcgtggccaatggagtcattgtacctgcccaggaggtgccgcccccaaccgtgcccatggactactcctgggccagggagcttggtttgatccgcaaacctgcctcgttcatgaccagcatctgcgatgagcgaggacaggagctcatctacgcgggcatgcccatcactgaggtcttcaaggaagagatgggcattggcggggtcctcggcctcctctggttccagaaaaggttgcctaagtactcttgccagttcattgagatgtgtctgatggtgacagctgatcacgggccagccgtctctggagcccacaacaccatcatttgtgcgcgagctgggaaagacctggtctccagcctcacctcggggctgctcaccatcggggatcggtttgggggtgccttggatgcagcagccaagatgttcagtaaagcctttgacagtggcattatccccatggagtttgtgaacaagatgaagaaggaagggaagctgatcatgggcattggtcaccgagtgaagtcgataaacaacccagacatgcgagtgcagatcctcaaagattacgtcaggcagcacttccctgccactcctctgctcgattatgcactggaagtagagaagattaccacctcgaagaagccaaatcttatcctgaatgtagatggtctcatcggagtcgcatttgtagacatgcttagaaactgtgggtcctttactcgggaggaagctgatgaatatattgacattggagccctcaatggcatctttgtgctgggaaggagtatggggttcattggacactatcttgatcagaagaggctgaagcaggggctgtatcgtcatccgtgggatgatatttcatatgttcttccggaacacatgagcatgtaacagagccaggaaccctactgcagtaaactgaagacaagaactcttcccccaagaaaaagtgtacagacagctggcagtggagcctgctttatttagcaggggcctggaatgtaaacagccactggggtacaggcaccgaagaccaacatccacaggctaacaccccttcagtccacacaaagaagcttcatattttttttataagcatagaaataaaaaccaagccaatatttgtgactttgctctgctacctgctgtatttattatatggaagcatctaagtactgtcaggatggggtcttcctcattgtagggcgttaggatgttgctttctttttccattagttaaacatttttttctcctttggaggaagggaatgaaacatttatggcctcaagatactatacatttaaagcaccccaatgtctctctttttttttttttacttccctttcttcttccttatataacatgaagaacattgtattaatctgatttttaaagatctttttgtatgttacgtgttaagggcttgtttggtatcccactgaaatgttctgtgttgcagaccagagtctgtttatgtcagggggatggggccattgcatccttagccattgtcacaaaatatgtggagtagtaacttaatatgtaaagttgtaacatacatacatttaaaatggaaatgcagaaagctgtgaaatgtcttgtgtcttatgttctctgtatttatgcagctgatttgtctgtctgtaactgaagtgtgggtccaaggactcctaactactttgcatctgtaatccacaaagattctgggcagctgccacctcagtctcttctctgtattatcatagtctggtttaaataaactatatagtaacaatgaaggcata

SEQ ID NO: 423815 - DNA, 3874 bp, Homo sapiens
cgcggggccgttctcgccgcgagccgatgggggcggggaaaagtccggctgggccgggacaaaagccggatcccgggaagctaccggctgctggggtgctccggattttgcggggttcgtcgggcctgtggaagaagcgccgcgcacggacttcggcagaggtagagcaggtctctctgcagccatgtcggccaaggcaatttcagagcagacgggcaaagaactcctttacaagttcatctgtaccacctcagccatccagaatcggttcaagtatgctcgggtcactcctgacacagactgggcccgcttgctgcaggaccacccctggctgctcagccagaacttggtagtcaagccagaccagctgatcaaacgtcgtggaaaacttggtctcgttggggtcaacctcactctggatggggtcaagtcctggctgaagccacggctgggacaggaagccacagttggcaaggccacaggcttcctcaagaactttctgatcgagcccttcgtcccccacagtcaggctgaggagttctatgtctgcatctatgccacccgagaaggggactacgtcctgttccaccacgaggggggtgtggacgtgggtgatgtggacgccaaggcccagaagctgcttgttggcgtggatgagaaactgaatcctgaggacatcaaaaaacacctgttggtccacgcccctgaagacaagaaagaaattctggccagttttatctccggcctcttcaatttctacgaggacttgtacttcacctacctcgagatcaatccccttgtagtgaccaaagatggagtctatgtccttgacttggcggccaaggtggacgccactgccgactacatctgcaaagtgaagtggggtgacatcgagttccctccccccttcgggcgggaggcatatccagaggaagcctacattgcagacctcgatgccaaaagtggggcaagcctgaagctgaccttgctgaaccccaaagggaggatctggaccatggtggccgggggtggcgcctctgtcgtgtacagcgataccatctgtgatctagggggtgtcaacgagctggcaaactatggggagtactcaggcgcccccagcgagcagcagacctatgactatgccaagactatcctctccctcatgacccgagagaagcacccagatggcaagatcctcatcattggaggcagcatcgcaaacttcaccaacgtggctgccacgttcaagggcatcgtgagagcaattcgagattaccagggccccctgaaggagcacgaagtcacaatctttgtccgaagaggtggccccaactatcaggagggcttacgggtgatgggagaagtcgggaagaccactgggatccccatccatgtctttggcacagagactcacatgacggccattgtgggcatggccctgggccaccggcccatccccaaccagccacccacagcggcccacactgcaaacttcctcctcaacgccagcgggagcacatcgacgccagcccccagcaggacagcatctttttctgagtccagggccgatgaggtggcgcctgcaaagaaggccaagcctgccatgccacaagattcagtcccaagtccaagatccctgcaaggaaagagcaccaccctcttcagccgccacaccaaggccattgtgtggggcatgcagacccgggccgtgcaaggcatgctggactttgactatgtctgctcccgagacgagccctcagtggctgccatggtctaccctttcactggggaccacaagcagaagttttactgggggcacaaagagatcctgatccctgtcttcaagaacatggctgatgccatgaggaagcacccggaggtagatgtgctcatcaactttgcctctctccgctctgcctatgacagcaccatggagaccatgaactatgcccagatccggaccatcgccatcatagctgaaggcatccctgaggccctcacgagaaagctgatcaagaaggcggaccagaagggagtgaccatcatcggacctgccactgttggaggcatcaagcctgggtgctttaagattggcaacacaggtgggatgctggacaacatcctggcctccaaactgtaccgcccaggcagcgtggcctatgtctcacgttccggaggcatgtccaacgagctcaacaatatcatctctcggaccacggatggcgtctatgagggcgtggccattggtggggacaggtacccgggctccacattcatggatcatgtgttacgctatcaggacactccaggagtcaaaatgattgtggttcttggagagattgggggcactgaggaatataagatttgccggggcatcaaggagggccgcctcactaagcccatcgtctgctggtgcatcgggacgtgtgccaccatgttctcctctgaggtccagtttggccatgctggagcttgtgccaaccaggcttctgaaactgcagtagccaagaaccaggctttgaaggaagcaggagtgtttgtgccccggagctttgatgagcttggagagatcatccagtctgtatacgaagatctcgtggccaatggagtcattgtacctgcccaggaggtgccgcccccaaccgtgcccatggactactcctgggccagggagcttggtttgatccgcaaacctgcctcgttcatgaccagcatctgcgatgagcgaggacaggagctcatctacgcgggcatgcccatcactgaggtcttcaaggaagagatgggcattggcggggtcctcggcctcctctggttccagaaaaggttgcctaagtactcttgccagttcattgagatgtgtctgatggtgacagctgatcacgggccagccgtctctggagcccacaacaccatcatttgtgcgcgagctgggaaagacctggtctccagcctcacctcggggctgctcaccatcggggatcggtttgggggtgccttggatgcagcagccaagataactcttcccccaagaaaaagtgtacagacagctggcagtggagcctgctttatttagcaggggcctggaatgtaaacagccactggggtacaggcaccgaagaccaacatccacaggctaacaccccttcagtccacacaaagaagcttcatattttttttataagcatagaaataaaaaccaagccaatatttgtgactttgctctgctacctgctgtatttattatatggaagcatctaagtactgtcaggatggggtcttcctcattgtagggcgttaggatgttgctttctttttccattagttaaacatttttttctcctttggaggaagggaatgaaacatttatggcctcaagatactatacatttaaagcaccccaatgtctctctttttttttttttacttccctttcttcttccttatataacatgaagaacattgtattaatctgatttttaaagatctttttgtatgttacgtgttaagggcttgtttggtatcccactgaaatgttctgtgttgcagaccagagtctgtttatgtcagggggatggggccattgcatccttagccattgtcacaaaatatgtggagtagtaacttaatatgtaaagttgtaacatacatacatttaaaatggaaatgcagaaagctgtgaaatgtcttgtgtcttatgttctctgtatttatgcagctgatttgtctgtctgtaactgaagtgtgggtccaaggactcctaactactttgcatctgtaatccacaaagattctgggcagctgccacctcagtctcttctctgtattatcatagtctggtttaaataaactatatagtaacaatgaaggcata

SEQ ID NO: 423816 - DNA, 2167 bp, Homo sapiens
gatgtgttgacagatgccaaatacaaagcagctattttttccatgttataatacagattgcccttaacagtttttctgtcgttcgcttgcagtatggaaatagcagttgaaatgagatggaaaacttggtaactttggtttcccaaatgaatcttatgggtaaaagggccaaggtcaggttgaggggacatattggtcaccttcggctagataatacctcattccgcagtaacagacaactccaaaaatctcagtggcttaccacagcaaaggtttatgtctcattcacactacatccactgagggtttgctgtgcctgttctctgccatctgtgccgaaggaacagccgccgtctgggatgtgctggcctcacgtcagcaggataacagcaatggcaggaccacgtgcaggctcttaaagccttacatgattcaccttcactcacatttcattggccaccgcaagtcaagtggttatttgtgacatcactggggcaggaagagtgacaatatcaaggcatatctgattgggagagaccagtgggaaaggacagtaaatatttgaaacagtttatatagtctcacacagggccggtcatttctatgtccttatattgtgctttggttagaaaccaaagagcaagagatgaggtcactggcagctgctcagggccttatggggacagctccttagcagatccctttaccctgggctccttggctctgtagctccagcaacctcatttatttggtcactccactggcctaggtggggagtattaacatgaaggtcatgcatgtgattcaggacaccaccttctaggcagccaaacacttggccatctcaggtgatacccagaggttgcttgatgagcaaggaccagctcagaaccaagcagggaagataaacaacccagacatgcgagtgcagatcctcaaagattacgtcaggcagcacttccctgccactcctctgctcgattatgcactggaagtagagaagattaccacctcgaagaagccaaatcttatcctgaatgtagatggtctcatcggagtcgcatttgtagacatgcttagaaactgtgggtcctttactcgggaggaagctgatgaatatattgacattggagccctcaatggcatctttgtgctgggaaggagtatggggttcattggacactatcttgatcagaagaggctgaagcaggggctgtatcgtcatccgtgggatgatatttcatatgttcttccggaacacatgagcatgtaacagagccaggaaccctactgcagtaaactgaagacaagaactcttcccccaagaaaaagtgtacagacagctggcagtggagcctgctttatttagcaggggcctggaatgtaaacagccactggggtacaggcaccgaagaccaacatccacaggctaacaccccttcagtccacacaaagaagcttcatattttttttataagcatagaaataaaaaccaagccaatatttgtgactttgctctgctacctgctgtatttattatatggaagcatctaagtactgtcaggatggggtcttcctcattgtagggcgttaggatgttgctttctttttccattagttaaacatttttttctcctttggaggaagggaatgaaacatttatggcctcaagatactatacatttaaagcaccccaatgtctctctttttttttttttacttccctttcttcttccttatataacatgaagaacattgtattaatctgatttttaaagatctttttgtatgttacgtgttaagggcttgtttggtatcccactgaaatgttctgtgttgcagaccagagtctgtttatgtcagggggatggggccattgcatccttagccattgtcacaaaatatgtggagtagtaacttaatatgtaaagttgtaacatacatacatttaaaatggaaatgcagaaagctgtgaaatgtcttgtgtcttatgttctctgtatttatgcagctgatttgtctgtctgtaactgaagtgtgggtccaaggactcctaactactttgcatctgtaatccacaaagattctgggcagctgccacctcagtctcttctctgtattatcatagtctggtttaaataaactatatagtaacaatgaaggcata

SEQ ID NO: 423817 - DNA, 1335 bp, Homo sapiens
gcagccgcctactactactaaattcccggccggtcgacgctgatcatgggcattggtcaccgagtgcagtcgataaacaacccagacatgcgagtgcagatcctcaaagattacgtcaggcagcacttccctgccactcctctgctcgattatgcactggaagtagagaagattaccacctcgaagaagccaaatcttatcctgaatgtagatggtctcatcggagtcgcatttgtagacatgcttagaaactgtgggtcctttactcgggaggaagctgatgaatatattgacattggagccctcaatggcatctttgtgctgggaaggagtatggggttcattggacactatcttgatcagaagaggctgaagcaggggctgtatcgtcatccgtgggatgatatttcatatgttcttccggaacacatgagcatgtaacagagccaggaaccctactgcagtaaactgaagacaagaactcttcccccaagaaaaagtgtacagacagctggcagtggagcctgctttatttagcaggggcctggaatgtaaacagccactggggtacaggcaccgaagaccaacatccacaggctaacaccccttcagtccacacaaagaagcttcatattttttttataagcatagaaataaaaaccaagccaatatttgtgactttgctctgctacctgctgtatttattatatggaagcatctaagtactgtcaggatggggtcttcctcattgtagggcgttaggatgttgctttctttttccattagttaaacatttttttctcctttggaggaagggaatgaaacatttatggcctcaagatactatacatttaaagcaccccaatgtctctctttttttttttttacttccctttcttcttccttatataacatgaagaacattgtattaatctgatttttaaagatctttttgtatgttacgtgttaagggcttgtttggtatcccactgaaatgttctgtgttgcagaccagagtctgtttatgtcagggggatggggccattgcatccttagccattgtcacaaaatatgtggagtagtaacttaatatgtaaagttgtaacatacatacatttaaaatggaaatgcagaaagctgtgaaatgtcttgtgtcttatgttctctgtatttatgcagctgatttgtctgtctgtaactgaagtgtgggtccaaggactcctaactactttgcatctgtaatccacaaagattctgggcagctgccacctcagtctcttctctgtattatcatagtctggtttaaataaactatatagtaacaatgaaggcata

SEQ ID NO: 423818 - DNA, 3440 bp, Homo sapiens
cgcggggccgttctcgccgcgagccgatgggggcggggaaaagtccggctgggccgggacaaaagccggatcccgggaagctaccggctgctggggtgctccggattttgcggggttcgtcgggcctgtggaagaagcgccgcgcacggacttcggcagaggtagagcaggtctctctgcagccatgtcggccaaggcaatttcagagcagacgggcaaagaactcctttacaagttcatctgtaccacctcagccatccagaatcggttcaagtatgctcgggtcactcctgacacagactgggcccgcttgctgcaggaccacccctggctgctcagccagaacttggtagtcaagccagaccagctgatcaaacgtcgtggaaaacttggtctcgttggggtcaacctcactctggatggggtcaagtcctggctgaagccacggctgggacaggaagccacagttggcaaggccacaggcttcctcaagaactttctgatcgagcccttcgtcccccacagtcaggctgaggagttctatgtctgcatctatgccacccgagaaggggactacgtcctgttccaccacgaggggggtgtggacgtgggtgatgtggacgccaaggcccagaagctgcttgttggcgtggatgagaaactgaatcctgaggacatcaaaaaacacctgttggtccacgcccctgaagacaagaaagaaattctggccagttttatctccggcctcttcaatttctacgaggacttgtacttcacctacctcgagatcaatccccttgtagtgaccaaagatggagtctatgtccttgacttggcggccaaggtggacgccactgccgactacatctgcaaagtgaagtggggtgacatcgagttccctccccccttcgggcgggaggcatatccagaggaagcctacattgcagacctcgatgccaaaagtggggcaagcctgaagctgaccttgctgaaccccaaagggaggatctggaccatggtggccgggggtggcgcctctgtcgtgtacagcgataccatctgtgatctagggggtgtcaacgagctggcaaactatggggagtactcaggcgcccccagcgagcagcagacctatgactatgccaagactatcctctccctcatgacccgagagaagcacccagatggcaagatcctcatcattggaggcagcatcgcaaacttcaccaacgtggctgccacgttcaagggcatcgtgagagcaattcgagattaccagggccccctgaaggagcacgaagtcacaatctttgtccgaagaggtggccccaactatcaggagggcttacgggtgatgggagaagtcgggaagaccactgggatccccatccatgtctttggcacagagactcacatgacggccattgtgggcatggccctgggccaccggcccatccccaaccagccacccacagcggcccacactgcaaacttcctcctcaacgccagcgggagcacatcgacgccagcccccagcaggacagcatctttttctgagtccagggccgatgaggtggcgcctgcaaagaaggccaagcctgccatgccacaagattcagtcccaagtccaagatccctgcaaggaaagagcaccaccctcttcagccgccacaccaaggccattgtgtggggcatgcagacccgggccgtgcaaggcatgctggactttgactatgtctgctcccgagacgagccctcagtggctgccatggtctaccctttcactggggaccacaagcagaagttttactgggggcacaaagagatcctgatccctgtcttcaagaacatggctgatgccatgaggaagcacccggaggtagatgtgctcatcaactttgcctctctccgctctgcctatgacagcaccatggagaccatgaactatgcccagatccggaccatcgccatcatagctgaaggcatccctgaggccctcacgagaaagctgatcaagaaggcggaccagaagggagtgaccatcatcggacctgccactgttggaggcatcaagcctgggtgctttaagattggcaacacaggtgggatgctggacaacatcctggcctccaaactgtaccgcccaggcagcgtggcctatgtctcacgttccggaggcatgtccaacgagctcaacaatatcatctctcggaccacggatggcgtctatgagggcgtggccattggtggggacaggtacccgggctccacattcatggatcatgtgttacgctatcaggacactccaggagtcaaaatgattgtggttcttggagagattgggggcactgaggaatataagatttgccggggcatcaaggagggccgcctcactaagcccatcgtctgctggtgcatcgggacgtgtgccaccatgttctcctctgaggtccagtttggccatgctggagcttgtgccaaccaggcttctgaaactgcagtagccaagaaccaggctttgaaggaagcaggagtgtttgtgccccggagctttgatgagcttggagagatcatccagtctgtatacgaagatctcgtggccaatggagtcattgtacctgcccaggaggtgccgcccccaaccgtgcccatggactactcctgggccagggagcttggtttgatccgcaaacctgcctcgttcatgaccagcatctgcgatgagcgaggacaggagctcatctacgcgggcatgcccatcactgaggtcttcaaggaagagatgggcattggcggggtcctcggcctcctctggttccagaaaaggttgcctaagtactcttgccagttcattgagatgtgtctgatggtgacagctgatcacgggccagccgtctctggagcccacaacaccatcatttgtgcgcgagctgggaaagacctggtctccagcctcacctcggggctgctcaccatcggggatcggtttgggggtgccttggatgcagcagccaagatgttcagtaaagcctttgacagtggcattatccccatggagtttgtgaacaagatgaagaaggaagggaagctgatcatgggcattggtcaccgagtgaagtcggtgagttgttactctcctaaaaaagtgggatggaggccaggcgcggtggcccatgcctgtaatcacagcactttgggaggccaaggcaggtggatcacttgaggtcgggagttggagaccagcctgaccaacatggagaaaccccgtctctactaaaaatacaaaaaaattagccaggcgtggtggtgcatgcctgtaatcccagctactcaggaggctgaggtaggagaattgcttgaacccgggaagtggaggttgtggtgagccgagattgtgccatggcactccagtctgggcaacaagagtgaaactccatctc

SEQ ID NO: 423819 - DNA, 2165 bp, Homo sapiens
cgcggggccgttctcgccgcgagccgatgggggcggggaaaagtccggctgggccgggacaaaagccggatcccgggaagctaccggctgctggggtgctccggattttgcggggttcgtcgggcctgtggaagaagcgccgcgcacggacttcggcagaggtagagcaggtctctctgcagccatgtcggccaaggcaatttcagagcagacgggcaaagaactcctttacaagttcatctgtaccacctcagccatccagaatcggttcaagtatgctcgggtcactcctgacacagactgggcccgcttgctgcaggaccacccctggctgctcagccagaacttggtagtcaagccagaccagctgatcaaacgtcgtggaaaacttggtctcgttggggtcaacctcactctggatggggtcaagtcctggctgaagccacggctgggacaggaagccacagttggcaaggccacaggcttcctcaagaactttctgatcgagcccttcgtcccccacagtcaggctgaggagttctatgtctgcatctatgccacccgagaaggggactacgtcctgttccaccacgaggggggtgtggacgtgggtgatgtggacgccaaggcccagaagctgcttgttggcgtggatgagaaactgaatcctgaggacatcaaaaaacacctgttggtccacgcccctgaagacaagaaagaaattctggccagttttatctccggcctcttcaatttctacgaggacttgtacttcacctacctcgagatcaatccccttgtagtgaccaaagatggagtctatgtccttgacttggcggccaaggtggacgccactgccgactacatctgcaaagtgaagtggggtgacatcgagttccctccccccttcgggcgggaggcatatccagaggaagcctacattgcagacctcgatgccaaaagtggggcaagcctgaagctgaccttgctgaaccccaaagggaggatctggaccatggtggccgggggtggcgcctctgtcgtgtacagcgataccatctgtgatctagggggtgtcaacgagctggcaaactatggggagtactcaggcgcccccagcgagcagcagacctatgactatgccaagactatcctctccctcatgacccgagagaagcacccagatggcaagatcctcatcattggaggcagcatcgcaaacttcaccaacgtggctgccacgttcaagggcatcgtgagagcaattcgagattaccagggccccctgaaggagcacgaagtcacaatctttgtccgaagaggtggccccaactatcaggagggcttacgggtgatgggagaagtcgggaagaccactgggatccccatccatgtctttggcacagagactcacatgacggccattgtgggcatggccctgggccaccggcccatccccaaccagccacccacagcggcccacactgcaaacttcctcctcaacgccagcgggagcacatcgacgccagcccccagcaggacagcatctttttctgagtccagggccgatgaggtggcgcctgcaaagaaggccaagcctgccatgccacaagattcagtcccaagtccaagatccctgcaaggaaagagcaccaccctcttcagccgccacaccaaggccattgtgtggggcatgcagacccgggccgtgcaaggcatgctggactttgactatgtctgctcccgagacgagccctcagtggctgccatggtctaccctttcactggggaccacaagcagaagttttactgggggcacaaagagatcctgatccctgtcttcaagaacatggctgatgccatgaggaagcacccggaggtagatgtgctcatcaactttgcctctctccgctctgcctatgacagcaccatggagaccatgaactatgcccagatccggaccatcgccatcatagctgaaggcatccctgaggccctcacgagaaagctgatcaagaaggcggaccagaagggagtgaccatcatcggacctgccactgtgagcttcccctccggaaagccttttacgttcgatgctatcttatgaagttcaatgcccttaggaagtttactttttgactcctctatctccctcctaggttgag

SEQ ID NO: 423820 - DNA, 2491 bp, Homo sapiens
  misc_feature (2230)..(2230): n is a, c, g, or t
cgcggggccgttctcgccgcgagccgatgggggcggggaaaagtccggctgggccgggacaaaagccggatcccgggaagctaccggctgctggggtgctccggattttgcggggttcgtcgggcctgtggaagaagcgccgcgcacggacttcggcagaggtagagcaggtctctctgcagccatgtcggccaaggcaatttcagagcagacgggcaaagaactcctttacaagttcatctgtaccacctcagccatccagaatcggttcaagtatgctcgggtcactcctgacacagactgggcccgcttgctgcaggaccacccctggctgctcagccagaacttggtagtcaagccagaccagctgatcaaacgtcgtggaaaacttggtctcgttggggtcaacctcactctggatggggtcaagtcctggctgaagccacggctgggacaggaagccacagttggcaaggccacaggcttcctcaagaactttctgatcgagcccttcgtcccccacagtcaggctgaggagttctatgtctgcatctatgccacccgagaaggggactacgtcctgttccaccacgaggggggtgtggacgtgggtgatgtggacgccaaggcccagaagctgcttgttggcgtggatgagaaactgaatcctgaggacatcaaaaaacacctgttggtccacgcccctgaagacaagaaagaaattctggccagttttatctccggcctcttcaatttctacgaggacttgtacttcacctacctcgagatcaatccccttgtagtgaccaaagatggagtctatgtccttgacttggcggccaaggtggacgccactgccgactacatctgcaaagtgaagtggggtgacatcgagttccctccccccttcgggcgggaggcatatccagaggaagcctacattgcagacctcgatgccaaaagtggggcaagcctgaagctgaccttgctgaaccccaaagggaggatctggaccatggtggccgggggtggcgcctctgtcgtgtacagcgataccatctgtgatctagggggtgtcaacgagctggcaaactatggggagtactcaggcgcccccagcgagcagcagacctatgactatgccaagactatcctctccctcatgacccgagagaagcacccagatggcaagatcctcatcattggaggcagcatcgcaaacttcaccaacgtggctgccacgttcaagggcatcgtgagagcaattcgagattaccagggccccctgaaggagcacgaagtcacaatctttgtccgaagaggtggccccaactatcaggagggcttacgggtgatgggagaagtcgggaagaccactgggatccccatccatgtctttggcacagagactcacatgacggccattgtgggcatggccctgggccaccggcccatccccaaccagccacccacagcggcccacactgcaaacttcctcctcaacgccagcgggagcacatcgacgccagcccccagcaggacagcatctttttctgagtccagggccgatgaggtggcgcctgcaaagaaggccaagcctgccatgccacaaggaaagagcaccaccctcttcagccgccacaccaaggccattgtgtggggcatgcagacccgggccgtgcaaggcatgctggactttgactatgtctgctcccgagacgagccctcagtggctgccatggtctaccctttcactggggaccacaagcagaagttttactgggggcacaaagagatcctgatccctgtcttcaagaacatggctgatgccatgaggaagcacccggaggtagatgtgctcatcaactttgcctctctccgctctgcctatgacagcaccatggagaccatgaactatgcccagatccggaccatcgccatcatagctgaaggcatccctgaggccctcacgagaaagctgatcaagaaggcggaccagaagggagtgaccatcatcggacctgccactgttggaggcatcaagcctgggtgctttaagattggcaacacaggtgggatgctggacaacatcctggcctccaaactgtaccgcccaggcagcgtggcctatgtctcacgttccggaggcatgtccaacgagctcaacaatatcatctctcggaccacggatggcgtctatgagggcgtggccattggtggggacaggtancccggggctccactttcctggctcctgttgtaacgctatccaggacctccaggagtccccaccgcatcgtgggtcctggcgcaccttgggcggccctgacggcatttttcactttgccggggcctcaggaggggcgcgctcactatacccttccttgtcgcgcgcctccggcgtcttcccctgtgtctctcttgggcccgttggcccccctgcacctttccccacgcctcaatccgtctccacccgttcgtcgcccgtttc

SEQ ID NO: 423821 - DNA, 1418 bp, Homo sapiens
cgcggggccgttctcgccgcgagccgatgggggcggggaaaagtccggctgggccgggacaaaagccggatcccgggaagctaccggctgctggggtgctccggattttgcggggttcgtcgggcctgtggaagaagcgccgcgcacggacttcggcagaggtagagcaggtctctctgcagccatgtcggccaaggcaatttcagagcagacgggcaaagaactcctttacaagttcatctgtaccacctcagccatccagaatcggttcaagtatgctcgggtcactcctgacacagactgggcccgcttgctgcaggaccacccctggctgctcagccagaacttggtagtcaagccagaccagctgatcaaacgtcgtggaaaacttggtctcgttggggtcaacctcactctggatggggtcaagtcctggctgaagccacggctgggacaggaagccacagttggcaaggccacaggcttcctcaagaactttctgatcgagcccttcgtcccccacagtcaggctgaggagttctatgtctgcatctatgccacccgagaaggggactacgtcctgttccaccacgaggggggtgtggacgtgggtgatgtggacgccaaggcccagaagctgcttgttggcgtggatgagaaactgaatcctgaggacatcaaaaaacacctgttggtccacgcccctgaagacaagaaagaaattctggccagttttatctccggcctcttcaatttctacgaggacttgtacttcacctacctcgagatcaatccccttgtagtgaccaaagatggagtctatgtccttgacttggcggccaaggtggacgccactgccgactacatctgcaaagtgaagtggggtgacatcgagttccctccccccttcgggcgggaggcatatccagaggaagcctacattgcagacctcgatgccaaaagtggggcaagcctgaagctgaccttgctgaaccccaaagggaggatctggaccatggtggccgggggtggcgcctctgtcgtgtacagcgataccatctgtgatctagggggtgtcaacgagctggcaaactatggggagtactcaggcgcccccagcgagcagcagacctatgactatgccaagactatcctctccctcatgacccgagagaagcacccagatggcaagatcctcatcattggaggcagcatcgcaaacttcaccaacgtggctgccacgttcaagggcatcgtgagagcaattcgagattaccagggccccctgaaggagcacgaagtcacaatctttgtccgaagaggtggccccaactatcaggagggcttacgggtgatgggagaagtcgcgagaacactagatgtcacccattgctcgcacaaactcacttttgtggcag

SEQ ID NO: 423822 - DNA, 1601 bp, Homo sapiens
cgcggggccgttctcgccgcgagccgatgggggcggggaaaagtccggctgggccgggacaaaagccggatcccgggaagctaccggctgctggggtgctccggattttgcggggttcgtcgggcctgtggaagaagcgccgcgcacggacttcggcagaggtagagcaggtctctctgcagccatgtcggccaaggcaatttcagagcagacgggcaaagaactcctttacaagttcatctgtaccacctcagccatccagaatcggttcaagtatgctcgggtcactcctgacacagactgggcccgcttgctgcaggaccacccctggctgctcagccagaacttggtagtcaagccagaccagctgatcaaacgtcgtggaaaacttggtctcgttggggtcaacctcactctggatggggtcaagtcctggctgaagccacggctgggacaggaagccacagttggcaaggccacaggcttcctcaagaactttctgatcgagcccttcgtcccccacagtcaggctgaggagttctatgtctgcatctatgccacccgagaaggggactacgtcctgttccaccacgaggggggtgtggacgtgggtgatgtggacgccaaggcccagaagctgcttgttggcgtggatgagaaactgaatcctgaggacatcaaaaaacacctgttggtccacgcccctgaagacaagaaagaaattctggccagttttatctccggcctcttcaatttctacgaggacttgtacttcacctacctcgagatcaatccccttgtagtgaccaaagatggagtctatgtccttgacttggcggccaaggtggacgccactgccgactacatctgcaaagtgaagtggggtgacatcgagttccctccccccttcgggcgggaggcatatccagaggaagcctacattgcagacctcgatgccaaaagtggggcaagcctgaagctgaccttgctgaaccccaaagggaggatctggaccatggtggccgggggtggcgcctctgtcgtgtacagcgataccatctgtgatctagggggtgtcaacgagctggcaaactatggggagtactcaggcgcccccagcgagcagcagacctatgactatgccaagactatcctctccctcatgacccgagagaagcacccagatggcaagatcctcatcattggaggcagcatcgcaaacttcaccaacgtggctgccacgttcaaggtaacagttgcaacagtggtgcagtttctggggaaagtggtttggggaaagcagggaaggggccttgaaagcagagtttgagccagagccaagttaccatgagttcccagggtcaggtagggagctcttgccccagggtctcttaaaggggtggagaagacactgggacaggagctgcccatctgcgctgtgtgtctctgggcaagcagctgctacgctgaactataactctcccacctgaagcatgggaggcgaatttctgctttcttccttctcaggaccaatgctttggagcactggctcaatcgatcctttctttctttccttcccttctcttcctttcccttccctt

SEQ ID NO: 423823 - DNA, 406 bp, Homo sapiens
gagagagagagagagagagagagagagagagagagagagagagagagagagagagagagagagagagagagagagagagagagagaggtctgtttatgtcagggggatggggccattgcatccttagccattgtcacaaaatatgtggagtagtaacttaatatgtaaagttgtaacatacatacatttaaaatggaaatgcagaaagctgtgaaatgtcttgtgtcttatgttctctgtatttatgcagctgatttgtctgtctgtaactgaagtgtgggtccaaggactcctaactactttgcatctgtaatccacaaagattctgggcagctgccacctcagtctcttctctgtattatcatagtctggtttaaataaactatatagtaacaatgaaggcata

SEQ ID NO: 423824 - DNA, 327 bp, Homo sapiens
gcttgttggcgtggatgagaaactgaatcctgaggacatcaaaaaacacctgttggtccacgcccctgaagacaagaaagagttgagtgagagggacggtagggaggtggcagttcggatgagaagaccgacaggctctgggcacagactggggagagcagagcggtctcctctctgggagccaggtggtagacacggccctgtcctgaggaagacagctgggtgcagggcggggactggcttggaaccagactgaaatatgccgccagcatccctcacctccttgcccctgtctgtctgacacctctgcctccagcttctcgcctg

SEQ ID NO: 423825 - DNA, 618 bp, Homo sapiens
tgtctggtggtgaaattatgacagctgatttgtcctggatattggtcttgcactgaatgcgccaaacactgatcatggctgtaaaaggccctttgcagggtcacatggacttgggcccttatctgcagacttgaattatggatttttttttccttcccttgcagggaagaccactgggatccccatccatgtctttggcacagagactcacatgacggccattgtgggcatggccctgggccaccggcccatccccaaccagccacccacagcggcccacactgcaaacttcctcctcaacgccagcgggagcacatcggtaggttccagcctccccaaaccttacaggaaggaaccatctcatcttttccactaggatacagtcttcttcctctgttccctgggggcatagaggaaatacagcgggagttagtgcatggttggtttgtggatctctgccaatttttttcctgtcctgattaaagtagtataatggaaggacaaaggattttaaaattggatccaagttcaaattgtggccgggcatggtggctcatgcctgtaatcccagcactttgggaggccgaggctggcggatcacctgagctcaggagttcg

SEQ ID NO: 423826 - DNA, 412 bp, Homo sapiens
ccggaatttgtggatatattttaaaacaactgcaccagggcgtactttctaagtcatctcttactgctgagcgaacctctctgggcttattttgtgcccagtcttttcctttgcaagttaaatagctccaactccttccctctttcttctcttctgttccatttgctaccttcccctgtccattattgctggggcatctctggacccttactggccatccacatccccccaaaatccagtgtacccagtacaagtgtgcttcctaaccctgtacacacttccccaggcctcctcctgatcctgtatcctgatactccctgctctcaacaggtacccgggctccacattcatggatcatgtgttacgctatcaggacactccaggagtcaaaatgattgtggttcttggagag

SEQ ID NO: 423827 - DNA, 607 bp, Homo sapiens
cgcaagtcaagtggttatttgtgacatcactggggcaggaagagtgacaatatcaaggcatatctgattgggagagaccagtgggaaaggacagtaaatatttgaaacagtttatatagtctcacacagggccggtcatttctatgtccttatattgtgctttggttagaaaccaaagagcaagagatgaggtcactggcagctgctcagggccttatggggacagctccttagcagatccctttaccctgggctccttggctctgtagctccagcaacctcatttatttggtcactccactggcctaggtggggagtattaacatgaaggtcatgcatgtgattcaggacaccaccttctaggcagccaaacacttggccatctcaggtgatacccagaggttgcttgatgagcaaggaccagctcagaaccaagcagggaaggtgggtggctctgagggacattccatccaggacttgcttgactttgctcagccagccccagctcctgagcatataacaacatgcctatgtacagcacagagcctctttctaagataatgctagacttgcactccacactcactcattcactctttgagctccc

SEQ ID NO: 423828 - DNA, 4384 bp, Homo sapiens
cgcggggccgttctcgccgcgagccgatgggggcggggaaaagtccggctgggccgggacaaaagccggatcccgggaagctaccggctgctggggtgctccggattttgcggggttcgtcgggcctgtggaagaagcgccgcgcacggacttcggcagaggtagagcaggtctctctgcagccatgtcggccaaggcaatttcagagcagacgggcaaagaactcctttacaagttcatctgtaccacctcagccatccagaatcggttcaagtatgctcgggtcactcctgacacagactgggcccgcttgctgcaggaccacccctggctgctcagccagaacttggtagtcaagccagaccagctgatcaaacgtcgtggaaaacttggtctcgttggggtcaacctcactctggatggggtcaagtcctggctgaagccacggctgggacaggaagccacagttggcaaggccacaggcttcctcaagaactttctgatcgagcccttcgtcccccacagtcaggctgaggagttctatgtctgcatctatgccacccgagaaggggactacgtcctgttccaccacgaggggggtgtggacgtgggtgatgtggacgccaaggcccagaagctgcttgttggcgtggatgagaaactgaatcctgaggacatcaaaaaacacctgttggtccacgcccctgaagacaagaaagaaattctggccagttttatctccggcctcttcaatttctacgaggacttgtacttcacctacctcgagatcaatccccttgtagtgaccaaagatggagtctatgtccttgacttggcggccaaggtggacgccactgccgactacatctgcaaagtgaagtggggtgacatcgagttccctccccccttcgggcgggaggcatatccagaggaagcctacattgcagacctcgatgccaaaagtggggcaagcctgaagctgaccttgctgaaccccaaagggaggatctggaccatggtggccgggggtggcgcctctgtcgtgtacagcgataccatctgtgatctagggggtgtcaacgagctggcaaactatggggagtactcaggcgcccccagcgagcagcagacctatgactatgccaagactatcctctccctcatgacccgagagaagcacccagatggcaagatcctcatcattggaggcagcatcgcaaacttcaccaacgtggctgccacgttcaagggcatcgtgagagcaattcgagattaccagggccccctgaaggagcacgaagtcacaatctttgtccgaagaggtggccccaactatcaggagggcttacgggtgatgggagaagtcgggaagaccactgggatccccatccatgtctttggcacagagactcacatgacggccattgtgggcatggccctgggccaccggcccatccccaaccagccacccacagcggcccacactgcaaacttcctcctcaacgccagcgggagcacatcgacgccagcccccagcaggacagcatctttttctgagtccagggccgatgaggtggcgcctgcaaagaaggccaagcctgccatgccacaagattcagtcccaagtccaagatccctgcaaggaaagagcaccaccctcttcagccgccacaccaaggccattgtgtggggcatgcagacccgggccgtgcaaggcatgctggactttgactatgtctgctcccgagacgagccctcagtggctgccatggtctaccctttcactggggaccacaagcagaagttttactgggggcacaaagagatcctgatccctgtcttcaagaacatggctgatgccatgaggaagcacccggaggtagatgtgctcatcaactttgcctctctccgctctgcctatgacagcaccatggagaccatgaactatgcccagatccggaccatcgccatcatagctgaaggcatccctgaggccctcacgagaaagctgatcaagaaggcggaccagaagggagtgaccatcatcggacctgccactgttggaggcatcaagcctgggtgctttaagattggcaacacaggtgggatgctggacaacatcctggcctccaaactgtaccgcccaggcagcgtggcctatgtctcacgttccggaggcatgtccaacgagctcaacaatatcatctctcggaccacggatggcgtctatgagggcgtggccattggtggggacaggtacccgggctccacattcatggatcatgtgttacgctatcaggacactccaggagtcaaaatgattgtggttcttggagagattgggggcactgaggaatataagatttgccggggcatcaaggagggccgcctcactaagcccatcgtctgctggtgcatcgggacgtgtgccaccatgttctcctctgaggtccagtttggccatgctggagcttgtgccaaccaggcttctgaaactgcagtagccaagaaccaggctttgaaggaagcaggagtgtttgtgccccggagctttgatgagcttggagagatcatccagtctgtatacgaagatctcgtggccaatggagtcattgtacctgcccaggaggtgccgcccccaaccgtgcccatggactactcctgggccagggagcttggtttgatccgcaaacctgcctcgttcatgaccagcatctgcgatgagcgaggacaggagctcatctacgcgggcatgcccatcactgaggtcttcaaggaagagatgggcattggcggggtcctcggcctcctctggttccagaaaaggttgcctaagtactcttgccagttcattgagatgtgtctgatggtgacagctgatcacgggccagccgtctctggagcccacaacaccatcatttgtgcgcgagctgggaaagacctggtctccagcctcacctcggggctgctcaccatcggggatcggtttgggggtgccttggatgcagcagccaagatgttcagtaaagcctttgacagtggcattatccccatggagtttgtgaacaagatgaagaaggaagggaagctgatcatgggcattggtcaccgagtgaagtcgataaacaacccagacatgcgagtgcagatcctcaaagattacgtcaggcagcacttccctgccactcctctgctcgattatgcactggaagtagagaagattaccacctcgaagaagccaaatcttatcctgaatgtagatggtctcatcggagtcgcatttgtagacatgcttagaaactgtgggtcctttactcgggaggaagctgatgaatatattgacattggagccctcaatggcatctttgtgctgggaaggagtatggggttcattggacactatcttgatcagaagaggctgaagcaggggctgtatcgtcatccgtgggatgatatttcatatgttcttccggaacacatgagcatgtaacagagccaggaaccctactgcagtaaactgaagacaagaactcttcccccaagaaaaagtgtacagacagctggcagtggagcctgctttatttagcaggggcctggaatgtaaacagccactggggtacaggcaccgaagaccaacatccacaggctaacaccccttcagtccacacaaagaagcttcatattttttttataagcatagaaataaaaaccaagccaatatttgtgactttgctctgctacctgctgtatttattatatggaagcatctaagtactgtcaggatggggtcttcctcattgtagggcgttaggatgttgctttctttttccattagttaaacatttttttctcctttggaggaagggaatgaaacatttatggcctcaagatactatacatttaaagcaccccaatgtctctctttttttttttttacttccctttcttcttccttatataacatgaagaacattgtattaatctgatttttaaagatctttttgtatgttacgtgttaagggcttgtttggtatcccactgaaatgttctgtgttgcagaccagagtctgtttatgtcagggggatggggccattgcatccttagccattgtcacaaaatatgtggagtagtaacttaatatgtaaagttgtaacatacatacatttaaaatggaaatgcagaaagctgtgaaatgtcttgtgtcttatgttctctgtatttatgcagctgatttgtctgtctgtaactgaagtgtgggtccaaggactcctaactactttgcatctgtaatccacaaagattctgggcagctgccacctcagtctcttctctgtattatcatagtctggtttaaataaactatatagtaacaatgaaggcata

SEQ ID NO: 423829 - DNA, 4447 bp, Homo sapiens
cgcggggccgttctcgccgcgagccgatgggggcggggaaaagtccggctgggccgggacaaaagccggatcccgggaagctaccggctgctggggtgctccggattttgcggggttcgtcgggcctgtggaagaagcgccgcgcacggacttcggcagaggtagagcaggtctctctgcagccatgtcggccaaggcaatttcagagcagacgggcaaagaactcctttacaagttcatctgtaccacctcagccatccagaatcggttcaagtatgctcgggtcactcctgacacagactgggcccgcttgctgcaggaccacccctggctgctcagccagaacttggtagtcaagccagaccagctgatcaaacgtcgtggaaaacttggtctcgttggggtcaacctcactctggatggggtcaagtcctggctgaagccacggctgggacaggaagccacagttggcaaggccacaggcttcctcaagaactttctgatcgagcccttcgtcccccacagtcaggctgaggagttctatgtctgcatctatgccacccgagaaggggactacgtcctgttccaccacgaggggggtgtggacgtgggtgatgtggacgccaaggcccagaagctgcttgttggcgtggatgagaaactgaatcctgaggacatcaaaaaacacctgttggtccacgcccctgaagacaagaaagaaattctggccagttttatctccggcctcttcaatttctacgaggacttgtacttcacctacctcgagatcaatccccttgtagtgaccaaagatggagtctatgtccttgacttggcggccaaggtggacgccactgccgactacatctgcaaagtgaagtggggtgacatcgagttccctccccccttcgggcgggaggcatatccagaggaagcctacattgcagacctcgatgccaaaagtggggcaagcctgaagctgaccttgctgaaccccaaagggaggatctggaccatggtggccgggggtggcgcctctgtcgtgtacagcgataccatctgtgatctagggggtgtcaacgagctggcaaactatggggagtactcaggcgcccccagcgagcagcagacctatgactatgccaagactatcctctccctcatgacccgagagaagcacccagatggcaagatcctcatcattggaggcagcatcgcaaacttcaccaacgtggctgccacgttcaagggcatcgtgagagcaattcgagattaccagggccccctgaaggagcacgaagtcacaatctttgtccgaagaggtggccccaactatcaggagggcttacgggtgatgggagaagtcgggaagaccactgggatccccatccatgtctttggcacagagactcacatgacggccattgtgggcatggccctgggccaccggcccatccccaaccagccacccacagcggcccacactgcaaacttcctcctcaacgccagcgggagcacatcgacgccagcccccagcaggacagcatctttttctgagtccagggccgatgaggtggcgcctgcaaagaaggccaagcctgccatgccacaagattcagtcccaagtccaagatccctgcaaggaaagagcaccaccctcttcagccgccacaccaaggccattgtgtggggcatgcagacccgggccgtgcaaggcatgctggactttgactatgtctgctcccgagacgagccctcagtggctgccatggtctaccctttcactggggaccacaagcagaagttttactgggggcacaaagagatcctgatccctgtcttcaagaacatggctgatgccatgaggaagcacccggaggtagatgtgctcatcaactttgcctctctccgctctgcctatgacagcaccatggagaccatgaactatgcccagatccggaccatcgccatcatagctgaaggcatccctgaggccctcacgagaaagctgatcaagaaggcggaccagaagggagtgaccatcatcggacctgccactgttggaggcatcaagcctgggtgctttaagattggcaacacaggtgggatgctggacaacatcctggcctccaaactgtaccgcccaggcagcgtggcctatgtctcacgttccggaggcatgtccaacgagctcaacaatatcatctctcggaccacggatggcgtctatgagggcgtggccattggtggggacaggtacccgggctccacattcatggatcatgtgttacgctatcaggacactccaggagtcaaaatgattgtggttcttggagagattgggggcactgaggaatataagatttgccggggcatcaaggagggccgcctcactaagcccatcgtctgctggtgcatcgggacgtgtgccaccatgttctcctctgaggtccagtttggccatgctggagcttgtgccaaccaggcttctgaaactgcagtagccaagaaccaggctttgaaggaagcaggagtgtttgtgccccggagctttgatgagcttggagagatcatccagtctgtatacgaagatctcgtggccaatggagtcattgtacctgcccaggaggtgccgcccccaaccgtgcccatggactactcctgggccagggagcttggtttgatccgcaaacctgcctcgttcatgaccagcatctgcgatgagcgaggacaggagctcatctacgcgggcatgcccatcactgaggtcttcaaggaagagatgggcattggcggggtcctcggcctcctctggttccagaaaaggttgcctaagtactcttgccagttcattgagatgtgtctgatggtgacagctgatcacgggccagccgtctctggagcccacaacaccatcatttgtgcgcgagctgggaaagacctggtctccagcctcacctcggggctgctcaccatcggggatcggtttgggggtgccttggatgcagcagccaagatgttcagtaaagcctttgacagtggcattatccccatggagtttgtgaacaagatgaagaaggaagggaagctgatcatgggcattggtcaccgagtgaagtcgataaacaacccagacatgcgagtgcagatcctcaaagattacgtcaggcagcacttccctgccactcctctgctcgattatgcactggaagtagagaagattaccacctcgaagaagccaaatcttatcctgaatgtagatggtctcatcggagtcgcatttgtagacatgcttagaaactgtgggtcctttactcgggaggaagctgatgaatatattgacattggagccctcaatggcatctttgtgctgggaaggagtatggggttcattggacactatcttgatcagaagaggctgaagcaggggctgtatcgtcatccgtgggatgatatttcatatgttcttccggaacacatgagcatgtaacagagccaggaaccctactgcagtaaactgaagacaagaactcttcccccaagaaaaagtgtacagacagctggcagtggagcctgctttatttagcaggggcctggaatgtaaacagccactggggtacaggcaccgaagaccaacatccacaggctaacaccccttcagtccacacaaagaagcttcatattttttttataagcatagaaataaaaaccaagccaatatttgtgactttgctctgctacctgctgtatttattatatggaagcatctaagtactgtcaggatggggtcttcctcattgtagggcgttaggatgttgctttctttttccattagttaaacatttttttctcctttggaggaagggaatgaaacatttatggcctcaagatactatacatttaaagcaccccaatgtctctctttttttttttttacttccctttcttcttccttatataacatgaagaacattgtattaatctgatttttaaagatctttttgtatgttacgtgttaagggcttgtttggtatcccactgaaatgttctgtgttgcagaccagagtctgtttatgtcagggggatggggccattgcatccttagccattgtcacaaaatatgtggagtagtaacttaatatgtaaagttgtaacatacatacatttaaaatggaaatgcagaaagctgtgaaatgtcttgtgtcttatgttctctgtatttatgcagctgatttgtctgtctgtaactgaagtgtgggtccaaggactcctaactactttgcatctgtaatccacaaagattctgggcagctgccacctcagtctcttctctgtattatcatagtctggtttaaataaactatatagtaacaatgaaggcataaaaaaaaaacagcggcgaattccaccgcactggcggccgtttctcgtaagtccgagcatatgt

SEQ ID NO: 423830 - DNA, 4316 bp, Homo sapiens
aattcaggaggctggtgttgtgctctagattcatgggccgttgcgccgacgacctgtagaagaagcgccgcgcacggacttcggcagagacaggtagagcaggtctctctgcagccatgtcggccaaggcaatttcagagcagacgggcaaagaactcctttacaagttcatctgtaccacctcagccatccagaatcggttcaagtatgctcgggtcactcctgacacagactgggcccgcttgctgcaggaccacccctggctgctcagccagaacttggtagtcaagccagaccagctgatcaaacgtcgtggaaaacttggtctcgttggggtcaacctcactctggatggggtcaagtcctggctgaagccacggctgggacaggaagccacagttggcaaggccacaggcttcctcaagaactttctgatcgagcccttcgtcccccacagtcaggctgaggagttctatgtctgcatctatgccacccgagaaggggactacgtcctgttccaccacgaggggggtgtggacgtgggtgatgtggacgccaaggcccagaagctgcttgttggcgtggatgagaaactgaatcctgaggacatcaaaaaacacctgttggtccacgcccctgaagacaagaaagaaattctggccagttttatctccggcctcttcaatttctacgaggacttgtacttcacctacctcgagatcaatccccttgtagtgaccaaagatggagtctatgtccttgacttggcggccaaggtggacgccactgccgactacatctgcaaagtgaagtggggtgacatcgagttccctccccccttcgggcgggaggcatatccagaggaagcctacattgcagacctcgatgccaaaagtggggcaagcctgaagctgaccttgctgaaccccaaagggaggatctggaccatggtggccgggggtggcgcctctgtcgtgtacagcgataccatctgtgatctagggggtgtcaacgagctggcaaactatggggagtactcaggcgcccccagcgagcagcagacctatgactatgccaagactatcctctccctcatgacccgagagaagcacccagatggcaagatcctcatcattggaggcagcatcgcaaacttcaccaacgtggctgccacgttcaagggcatcgtgagagcaattcgagattaccagggccccctgaaggagcacgaagtcacaatctttgtccgaagaggtggccccaactatcaggagggcttacgggtgatgggagaagtcgggaagaccactgggatccccatccatgtctttggcacagagactcacatgacggccattgtgggcatggccctgggccaccggcccatccccaaccagccacccacagcggcccacactgcaaacttcctcctcaacgccagcgggagcacatcgacgccagcccccagcaggacagcatctttttctgagtccagggccgatgaggtggcgcctgcaaagaaggccaagcctgccatgccacaagattcagtcccaagtccaagatccctgcaaggaaagagcaccaccctcttcagccgccacaccaaggccattgtgtggggcatgcagacccgggccgtgcaaggcatgctggactttgactatgtctgctcccgagacgagccctcagtggctgccatggtctaccctttcactggggaccacaagcagaagttttactgggggcacaaagagatcctgatccctgtcttcaagaacatggctgatgccatgaggaagcacccggaggtagatgtgctcatcaactttgcctctctccgctctgcctatgacagcaccatggagaccatgaactatgcccagatccggaccatcgccatcatagctgaaggcatccctgaggccctcacgagaaagctgatcaagaaggcggaccagaagggagtgaccatcatcggacctgccactgttggaggcatcaagcctgggtgctttaagattggcaacacaggtgggatgctggacaacatcctggcctccaaactgtaccgcccaggcagcgtggcctatgtctcacgttccggaggcatgtccaacgagctcaacaatatcatctctcggaccacggatggcgtctatgagggcgtggccattggtggggacaggtacccgggctccacattcatggatcatgtgttacgctatcaggacactccaggagtcaaaatgattgtggttcttggagagattgggggcactgaggaatataagatttgccggggcatcaaggagggccgcctcactaagcccatcgtctgctggtgcatcgggacgtgtgccaccatgttctcctctgaggtccagtttggccatgctggagcttgtgccaaccaggcttctgaaactgcagtagccaagaaccaggctttgaaggaagcaggagtgtttgtgccccggagctttgatgagcttggagagatcatccagtctgtatacgaagatctcgtggccaatggagtcattgtacctgcccaggaggtgccgcccccaaccgtgcccatggactactcctgggccagggagcttggtttgatccgcaaacctgcctcgttcatgaccagcatctgcgatgagcgaggacaggagctcatctacgcgggcatgcccatcactgaggtcttcaaggaagagatgggcattggcggggtcctcggcctcctctggttccagaaaaggttgcctaagtactcttgccagttcattgagatgtgtctgatggtgacagctgatcacgggccagccgtctctggagcccacaacaccatcatttgtgcgcgagctgggaaagacctggtctccagcctcacctcggggctgctcaccatcggggatcggtttgggggtgccttggatgcagcagccaagatgttcagtaaagcctttgacagtggcattatccccatggagtttgtgaacaagatgaagaaggaagggaagctgatcatgggcattggtcaccgagtgaagtcgataaacaacccagacatgcgagtgcagatcctcaaagattacgtcaggcagcacttccctgccactcctctgctcgattatgcactggaagtagagaagattaccacctcgaagaagccaaatcttatcctgaatgtagatggtctcatcggagtcgcatttgtagacatgcttagaaactgtgggtcctttactcgggaggaagctgatgaatatattgacattggagccctcaatggcatctttgtgctgggaaggagtatggggttcattggacactatcttgatcagaagaggctgaagcaggggctgtatcgtcatccgtgggatgatatttcatatgttcttccggaacacatgagcatgtaacagagccaggaaccctactgcagtaaactgaagacaagaactcttcccccaagaaaaagtgtacagacagctggcagtggagcctgctttatttagcaggggcctggaatgtaaacagccactggggtacaggcaccgaagaccaacatccacaggctaacaccccttcagtccacacaaagaagcttcatattttttttataagcatagaaataaaaaccaagccaatatttgtgactttgctctgctacctgctgtatttattatatggaagcatctaagtactgtcaggatggggtcttcctcattgtagggcgttaggatgttgctttctttttccattagttaaacatttttttctcctttggaggaagggaatgaaacatttatggcctcaagatactatacatttaaagcaccccaatgtctctctttttttttttttacttccctttcttcttccttatataacatgaagaacattgtattaatctgatttttaaagatctttttgtatgttacgtgttaagggcttgtttggtatcccactgaaatgttctgtgttgcagaccagagtctgtttatgtcagggggatggggccattgcatccttagccattgtcacaaaatatgtggagtagtaacttaatatgtaaagttgtaacatacatacatttaaaatggaaatgcagaaagctgtgaaatgtcttgtgtcttatgttctctgtatttatgcagctgatttgtctgtctgtaactgaagtgtgggtccaaggactcctaactactttgcatctgtaatccacaaagattctgggcagctgccacctcagtctcttctctgtattatcatagtctggtttaaataaactatatagtaacaatgaaggcata

SEQ ID NO: 423831 - DNA, 2885 bp, Homo sapiens
actctctccttatctcaccccagacgccagcccccagcaggacagcatctttttctgagtccagggccgatgaggtggcgcctgcaaagaaggccaagcctgccatgccacaagattcagtcccaagtccaagatccctgcaaggaaagagcaccaccctcttcagccgccacaccaaggccattgtgtggggcatgcagacccgggccgtgcaaggcatgctggactttgactatgtctgctcccgagacgagccctcagtggctgccatggtctaccctttcactggggaccacaagcagaagttttactgggggcacaaagagatcctgatccctgtcttcaagaacatggctgatgccatgaggaagcacccggaggtagatgtgctcatcaactttgcctctctccgctctgcctatgacagcaccatggagaccatgaactatgcccagatccggaccatcgccatcatagctgaaggcatccctgaggccctcacgagaaagctgatcaagaaggcggaccagaagggagtgaccatcatcggacctgccactgttggaggcatcaagcctgggtgctttaagattggcaacacaggtgggatgctggacaacatcctggcctccaaactgtaccgcccaggcagcgtggcctatgtctcacgttccggaggcatgtccaacgagctcaacaatatcatctctcggaccacggatggcgtctatgagggcgtggccattggtggggacaggtacccgggctccacattcatggatcatgtgttacgctatcaggacactccaggagtcaaaatgattgtggttcttggagagattgggggcactgaggaatataagatttgccggggcatcaaggagggccgcctcactaagcccatcgtctgctggtgcatcgggacgtgtgccaccatgttctcctctgaggtccagtttggccatgctggagcttgtgccaaccaggcttctgaaactgcagtagccaagaaccaggctttgaaggaagcaggagtgtttgtgccccggagctttgatgagcttggagagatcatccagtctgtatacgaagatctcgtggccaatggagtcattgtacctgcccaggaggtgccgcccccaaccgtgcccatggactactcctgggccagggagcttggtttgatccgcaaacctgcctcgttcatgaccagcatctgcgatgagcgaggacaggagctcatctacgcgggcatgcccatcactgaggtcttcaaggaagagatgggcattggcggggtcctcggcctcctctggttccagaaaaggttgcctaagtactcttgccagttcattgagatgtgtctgatggtgacagctgatcacgggccagccgtctctggagcccacaacaccatcatttgtgcgcgagctgggaaagacctggtctccagcctcacctcggggctgctcaccatcggggatcggtttgggggtgccttggatgcagcagccaagatgttcagtaaagcctttgacagtggcattatccccatggagtttgtgaacaagatgaagaaggaagggaagctgatcatgggcattggtcaccgagtgaagtcgataaacaacccagacatgcgagtgcagatcctcaaagattacgtcaggcagcacttccctgccactcctctgctcgattatgcactggaagtagagaagattaccacctcgaagaagccaaatcttatcctgaatgtagatggtctcatcggagtcgcatttgtagacatgcttagaaactgtgggtcctttactcgggaggaagctgatgaatatattgacattggagccctcaatggcatctttgtgctgggaaggagtatggggttcattggacactatcttgatcagaagaggctgaagcaggggctgtatcgtcatccgtgggatgatatttcatatgttcttccggaacacatgagcatgtaacagagccaggaaccctactgcagtaaactgaagacaagaactcttcccccaagaaaaagtgtacagacagctggcagtggagcctgctttatttagcaggggcctggaatgtaaacagccactggggtacaggcaccgaagaccaacatccacaggctaacaccccttcagtccacacaaagaagcttcatattttttttataagcatagaaataaaaaccaagccaatatttgtgactttgctctgctacctgctgtatttattatatggaagcatctaagtactgtcaggatggggtcttcctcattgtagggcgttaggatgttgctttctttttccattagttaaacatttttttctcctttggaggaagggaatgaaacatttatggcctcaagatactatacatttaaagcaccccaatgtctctctttttttttttttacttccctttcttcttccttatataacatgaagaacattgtattaatctgatttttaaagatctttttgtatgttacgtgttaagggcttgtttggtatcccactgaaatgttctgtgttgcagaccagagtctgtttatgtcagggggatggggccattgcatccttagccattgtcacaaaatatgtggagtagtaacttaatatgtaaagttgtaacatacatacatttaaaatggaaatgcagaaagctgtgaaatgtcttgtgtcttatgttctctgtatttatgcagctgatttgtctgtctgtaactgaagtgtgggtccaaggactcctaactactttgcatctgtaatccacaaagattctgggcagctgccacctcagtctcttctctgtattatcatagtctggtttaaataaactatatagtaacaatgaaggcata

SEQ ID NO: 423832 - DNA, 1739 bp, Homo sapiens
cttccctcttccccatctctgcccaggagcttggtttgatccgcaaacctgcctcgttcatgaccagcatctgcgatgagcgaggacaggagctcatctacgcgggcatgcccatcactgaggtcttcaaggaagagatgggcattggcggggtcctcggcctcctctggttccagaaaaggttgcctaagtactcttgccagttcattgagatgtgtctgatggtgacagctgatcacgggccagccgtctctggagcccacaacaccatcatttgtgcgcgagctgggaaagacctggtctccagcctcacctcggggctgctcaccatcggggatcggtttgggggtgccttggatgcagcagccaagatgttcagtaaagcctttgacagtggcattatccccatggagtttgtgaacaagatgaagaaggaagggaagctgatcatgggcattggtcaccgagtgaagtcgataaacaacccagacatgcgagtgcagatcctcaaagattacgtcaggcagcacttccctgccactcctctgctcgattatgcactggaagtagagaagattaccacctcgaagaagccaaatcttatcctgaatgtagatggtctcatcggagtcgcatttgtagacatgcttagaaactgtgggtcctttactcgggaggaagctgatgaatatattgacattggagccctcaatggcatctttgtgctgggaaggagtatggggttcattggacactatcttgatcagaagaggctgaagcaggggctgtatcgtcatccgtgggatgatatttcatatgttcttccggaacacatgagcatgtaacagagccaggaaccctactgcagtaaactgaagacaagaactcttcccccaagaaaaagtgtacagacagctggcagtggagcctgctttatttagcaggggcctggaatgtaaacagccactggggtacaggcaccgaagaccaacatccacaggctaacaccccttcagtccacacaaagaagcttcatattttttttataagcatagaaataaaaaccaagccaatatttgtgactttgctctgctacctgctgtatttattatatggaagcatctaagtactgtcaggatggggtcttcctcattgtagggcgttaggatgttgctttctttttccattagttaaacatttttttctcctttggaggaagggaatgaaacatttatggcctcaagatactatacatttaaagcaccccaatgtctctctttttttttttttacttccctttcttcttccttatataacatgaagaacattgtattaatctgatttttaaagatctttttgtatgttacgtgttaagggcttgtttggtatcccactgaaatgttctgtgttgcagaccagagtctgtttatgtcagggggatggggccattgcatccttagccattgtcacaaaatatgtggagtagtaacttaatatgtaaagttgtaacatacatacatttaaaatggaaatgcagaaagctgtgaaatgtcttgtgtcttatgttctctgtatttatgcagctgatttgtctgtctgtaactgaagtgtgggtccaaggactcctaactactttgcatctgtaatccacaaagattctgggcagctgccacctcagtctcttctctgtattatcatagtctggtttaaataaactatatagtaacaatgaaggcata

SEQ ID NO: 423833 - DNA, 1320 bp, Homo sapiens
ttggcccttcatggagcttctgttctcttcacagggttcctgaaggggccaagcgctttgatggctcttcacctgctggaggatgctcttgagcgtgctgtaaagcagcacttccctgccactcctctgctcgattatgcactggaagtagagaagattaccacctcgaagaagccaaatcttatcctgaatgtagatggtctcatcggagtcgcatttgtagacatgcttagaaactgtgggtcctttactcgggaggaagctgatgaatatattgacattggagccctcaatggcatctttgtgctgggaaggagtatggggttcattggacactatcttgatcagaagaggctgaagcaggggctgtatcgtcatccgtgggatgatatttcatatgttcttccggaacacatgagcatgtaacagagccaggaaccctactgcagtaaactgaagacaagaactcttcccccaagaaaaagtgtacagacagctggcagtggagcctgctttatttagcaggggcctggaatgtaaacagccactggggtacaggcaccgaagaccaacatccacaggctaacaccccttcagtccacacaaagaagcttcatattttttttataagcatagaaataaaaaccaagccaatatttgtgactttgctctgctacctgctgtatttattatatggaagcatctaagtactgtcaggatggggtcttcctcattgtagggcgttaggatgttgctttctttttccattagttaaacatttttttctcctttggaggaagggaatgaaacatttatggcctcaagatactatacatttaaagcaccccaatgtctctctttttttttttttacttccctttcttcttccttatataacatgaagaacattgtattaatctgatttttaaagatctttttgtatgttacgtgttaagggcttgtttggtatcccactgaaatgttctgtgttgcagaccagagtctgtttatgtcagggggatggggccattgcatccttagccattgtcacaaaatatgtggagtagtaacttaatatgtaaagttgtaacatacatacatttaaaatggaaatgcagaaagctgtgaaatgtcttgtgtcttatgttctctgtatttatgcagctgatttgtctgtctgtaactgaagtgtgggtccaaggactcctaactactttgcatctgtaatccacaaagattctgggcagctgccacctcagtctcttctctgtattatcatagtctggtttaaataaactatatagtaacaatgaaggcata

SEQ ID NO: 423834 - DNA, 3061 bp, Homo sapiens
cgcggggccgttctcgccgcgagccgatgggggcggggaaaagtccggctgggccgggacaaaagccggatcccgggaagctaccggctgctggggtgctccggattttgcggggttcgtcgggcctgtggaagaagcgccgcgcacggacttcggcagaggtagagcaggtctctctgcagccatgtcggccaaggcaatttcagagcagacgggcaaagaactcctttacaagttcatctgtaccacctcagccatccagaatcggttcaagtatgctcgggtcactcctgacacagactgggcccgcttgctgcaggaccacccctggctgctcagccagaacttggtagtcaagccagaccagctgatcaaacgtcgtggaaaacttggtctcgttggggtcaacctcactctggatggggtcaagtcctggctgaagccacggctgggacaggaagccacagttggcaaggccacaggcttcctcaagaactttctgatcgagcccttcgtcccccacagtcaggctgaggagttctatgtctgcatctatgccacccgagaaggggactacgtcctgttccaccacgaggggggtgtggacgtgggtgatgtggacgccaaggcccagaagctgcttgttggcgtggatgagaaactgaatcctgaggacatcaaaaaacacctgttggtccacgcccctgaagacaagaaagaaattctggccagttttatctccggcctcttcaatttctacgaggacttgtacttcacctacctcgagatcaatccccttgtagtgaccaaagatggagtctatgtccttgacttggcggccaaggtggacgccactgccgactacatctgcaaagtgaagtggggtgacatcgagttccctccccccttcgggcgggaggcatatccagaggaagcctacattgcagacctcgatgccaaaagtggggcaagcctgaagctgaccttgctgaaccccaaagggaggatctggaccatggtggccgggggtggcgcctctgtcgtgtacagcgataccatctgtgatctagggggtgtcaacgagctggcaaactatggggagtactcaggcgcccccagcgagcagcagacctatgactatgccaagactatcctctccctcatgacccgagagaagcacccagatggcaagatcctcatcattggaggcagcatcgcaaacttcaccaacgtggctgccacgttcaagggcatcgtgagagcaattcgagattaccagggccccctgaaggagcacgaagtcacaatctttgtccgaagaggtggccccaactatcaggagggcttacgggtgatgggagaagtcgggaagaccactgggatccccatccatgtctttggcacagagactcacatgacggccattgtgggcatggccctgggccaccggcccatccccaaccagccacccacagcggcccacactgcaaacttcctcctcaacgccagcgggagcacatcgacgccagcccccagcaggacagcatctttttctgagtccagggccgatgaggtggcgcctgcaaagaaggccaagcctgccatgccacaagattcagtcccaagtccaagatccctgcaaggaaagagcaccaccctcttcagccgccacaccaaggccattgtgtggggcatgcagacccgggccgtgcaaggcatgctggactttgactatgtctgctcccgagacgagccctcagtggctgccatggtctaccctttcactggggaccacaagcagaagttttactgggggcacaaagagatcctgatccctgtcttcaagaacatggctgatgccatgaggaagcacccggaggtagatgtgctcatcaactttgcctctctccgctctgcctatgacagcaccatggagaccatgaactatgcccagatccggaccatcgccatcatagctgaaggcatccctgaggccctcacgagaaagctgatcaagaaggcggaccagaagggagtgaccatcatcggacctgccactgttggaggcatcaagcctgggtgctttaagattggcaacacaggtgggatgctggacaacatcctggcctccaaactgtaccgcccaggcagcgtggcctatgtctcacgttccggaggcatgtccaacgagctcaacaatatcatctctcggaccacggatggcgtctatgagggcgtggccattggtggggacaggtacccgggctccacattcatggatcatgtgttacgctatcaggacactccaggagtcaaaatgattgtggttcttggagagattgggggcactgaggaatataagatttgccggggcatcaaggagggccgcctcactaagcccatcgtctgctggtgcatcgggacgtgtgccaccatgttctcctctgaggtccagtttggccatgctggagcttgtgccaaccaggcttctgaaactgcagtagccaagaaccaggctttgaaggaagcaggagtgtttgtgccccggagctttgatgagcttggagagatcatccagtctgtatacgaagatctcgtggccaatggagtcattgtacctgcccaggaggtgccgcccccaaccgtgcccatggactactcctgggccagggagcttggtttgatccgcaaacctgcctcgttcatgaccagcatctgcgatgagcgaggacaggagctcatctacgcgggcatgcccatcactgaggtcttcaaggaagagatgggcattggcggggtcctcggcctcctctggttccagaaaaggtgagcatggagggcagaagattacagggccctgcagctcagagttaatgattttcccccaacaaaggggtgggagtggacaggcctggggagtgtgtccaagatcaatctttggggccacaggtcaattgagcggccagaggaaggacacataaactattcctaagtcttccaaggacagaaagtccagtcacatgagccactgcacccaaccaaatgcagatctcttgacagc

SEQ ID NO: 423835 - DNA, 4514 bp, Homo sapiens
gccaggcccggggagtgggcacggtggagctgccgaccgttggtcgctgccccaacccacgcactgcgacgccgcgggcctgaattgcagttcctgtgccctggcactaagactggcacctcctgcggcccatgcccttcgcctgcattgcccactgagtcccactcgactgtcttcagcgcggttcacactgagacccagccctctcccgctggccccgagcaggcccacctttaggagggcgtgatggaaaggcccctggagaatggggatgagtccccagactctcagggccatgccaccgactggagatttgctgtgtgcagtttcagggatgcctgggaagaggaggaacctgcttcccagatgcacgttaaggacccaggtcctccaagaccaccagccggggccacccaggatgaggagctacagggcagccccttgtccaggaaattccagttacccccagctgcagatgagtcgggggatgcccagaggggcacagtagaaagctcctcagtcctgtcagaagggccaggcccctctggagtggagagtctcctatgccccatgtcctcccacctcagcttggcacagggtgagagtgacaccccaggggtagggttggtaggggacccaggtccaagcagggcgatgccatctggcttgagccctggggcattggacagcgaccctgtgggccttggagaccctttatcagaaatatcaaagctgctggaggcagcccccagtggatccggcctccctaagcctgctgactgcctcctggcccaagacctctgttgggagctgctggccagtggtatggccaccttgccagggactcgggatgtccaaggccgggcagtgctgcttctgtgtgcccacagcccagcctggcttcagtctgagtgcagcagccaggaactcatccgcctcctgctgtacctgcgaagcatccccaggcccgaagtacaggcactgggactgacagtgctagttgatgcccgaatttgtgctccaagttcttccctcttctctgggctcagccaactacaagaagcagccccaggggccgtgtaccaggtgctgctagtgggaagcacgctgctgaaggaagtgccttccgggctgcagctggagcagttgccttctcagagcctgctgacccacatcccaacggcggggctgcccacttcgctaggaggaggcctgccttactgccaccaggcctggctggatttccgaaggcggctggaagctctactacagaactgccaggcagcttgtgccctgctccagggggccatcgaaagtgtgaaggctgtgccccagcccatggagcctggggaggtcggtcagctgctacagcagacagaggtcctgatgcagcaggtgctagactcgccatggctggcatggctacaatgccaggggggccgggagctgacatggctgaagcaagaggtcccagaggtgaccctgagcccagactacaggacggcaatggacaaggctgacgagctatatgaccgggtggatggattgctgcaccaactgaccctgcagagcaaccagcgaatacaggccctagagttggtccaaacactggaggcccgggaaagcggactgcaccagattgaagtgtggctgcagcaggtgggctggccagcactggaggaggctggggagccctcgctggacatgctgctccaggcccaaggctcttttcaggagctgtaccaggttgcccaggagcaggtcaggcaaggggagaagtttctgcagccgctgactggctgggaggcggctgaactggacccccctggggcacgctttctggccctgcgagcccagctgactgaattctctagggctttggcccagcggtgccagcggctggcggatgctgagaggctgtttcagctcttcagggaggccttgacgtgggctgaggaggggcagcgagtgttggcagagctggagcaggaacgcccgggggttgtgttgcagcagctgcagctgcactggaccaggcaccctgacttgcctcctgcccacttccgaaagatgtgggctctggccacggggctgggctcagaggccatccgccaggagtgccgctgggcctgggcgcggtgccaggacacctggctggccctggaccaaaagcttgaggcttcactgaagctaccaccggtgggcagcacagctagcctgtgtgtcagccaggtccccgctgcacctgcccaccctcccctgaggaaggcctacagcttcgatcggaatctggggcagagtctcagtgaacctgcctgccactgccaccatgcggccactattgctgcctgccgcagaccagaggctggaggaggtgccctgccccaggcatcccctactgtgcctccaccaggcagctctgaccccaggagcctcaacaggctacagctggtgctggcagagatggtggccacggagcgggagtatgtccgggctctagagtacactatggagaactatttccccgagctggatcgccccgatgtgccccagggcctccgcggtcagcgtgcccacctctttggcaacctggagaagctgcgggacttccactgccacttcttcctgcgtgagctggaggcttgcacccggcacccaccacgagtggcctatgccttcctgcgccatagggtgcagtttgggatgtacgcgctctacagcaagaataagcctcgctccgatgccctgatgtcaagctatgggcacaccttcttcaaggacaagcagcaagcactgggggaccacctggacctggcctcctacctgctaaagcccatccagcgcatgggcaagtacgcactgctgctgcaggagctggcacgggcctgcgggggccccacgcaggagctcagtgcgctgcgggaggcccagagccttgtgcacttccagctgcggcacggaaacgacctgctggccatggacgccatccagggctgtgatgttaacctcaaggaacaggggcagctggtgcgacaggatgagtttgtggtgcgcactgggcgccacaagtccgtgcgccgcatcttcctttttgaggagctgctgctcttcagcaagcctcgccatgggcccacaggggttgacacatttgcctacaagcgctccttcaagatggcagaccttggtctcactgagtgctgtgggaacagcaacctgcgcttcgagatctggttccgccgccgcaaggccagggacacctttgtgctgcaggcctccagcctggctatcaagcaggcctggacagctgacatctcccacctgctttggaggcaggccgtccacaacaaggaggtgcgcatggctgagatggtgtccatgggtgtggggaacaaggccttccgagacattgctcccagcgaggaagccatcaacgaccgcaccgtcaactatgtcctgaagtgccgagaagttcgctctcgggcgtccattgccgtagccccgtttgaccatgacagcctctacctgggggcctcgaactcccttcctggagaccctgcctcttgctctgttctggggtccctcaacctgcacctgtacagagacccagctcttctgggtctccgctgtcccctgtatcccagcttcccagaggaagcagcactggaggctgaggcagagctgggcggccagccctctttgactgctgaggactcagagatctcgtcccaatgcccatcagccagtggctccagtggctctgacagcagctgtgtgtcagggcaggccctgggtaggggcctggaggacttaccctgtgtctgagcccgggactggacgagcagtagatccagcagcctgcagctccaaggaacattgcctctctggatctgctgtgaccagggtgtggctgacacctgggctacctccaacctacatgtgcaacgctgttgactaccctttctgatgtgtgtggccattggactaactggcacggggcctctctagggaagtctggttgtagagcctgaataggctcctggccccatgaccccttctcctgtccccagctcccatcccagttgtgggttaagaataggctagagcagacattgggtgtttccatgctgtaggctggtgggggaccatgtgcctctaggcagtgactagggtgcccccacccctcaggaagaacacaggtgggctcctagcagctgatccccaatgcctggccttaaagccgagctcagttaccatagggacaggtccacctctactgggccctcatgcttgcctttcctggcccccaggcccagcccctttttactggggcagtttcgttattttgacttgatgccttttgaataactttcaatagaattgtctaaaattatcttactggttgttaggcctttggtgtctcagagaaggagtctaggtctttgatgtgtgatttaatcttttatttgtttataataaaaaatagactgatatgtaccctctgatgggcacatgca

SEQ ID NO: 423836 - DNA, 4514 bp, Homo sapiens
agcggagtggccgtcgaggccgccgtctgttcgaaggctgtccgacttcacggttccccgcggctcggcccgggggcgcctgaattgcagttcctgtgccctggcactaagactggcacctcctgcggcccatgcccttcgcctgcattgcccactgagtcccactcgactgtcttcagcgcggttcacactgagacccagccctctcccgctggccccgagcaggcccacctttaggagggcgtgatggaaaggcccctggagaatggggatgagtccccagactctcagggccatgccaccgactggagatttgctgtgtgcagtttcagggatgcctgggaagaggaggaacctgcttcccagatgcacgttaaggacccaggtcctccaagaccaccagccggggccacccaggatgaggagctacagggcagccccttgtccaggaaattccagttacccccagctgcagatgagtcgggggatgcccagaggggcacagtagaaagctcctcagtcctgtcagaagggccaggcccctctggagtggagagtctcctatgccccatgtcctcccacctcagcttggcacagggtgagagtgacaccccaggggtagggttggtaggggacccaggtccaagcagggcgatgccatctggcttgagccctggggcattggacagcgaccctgtgggccttggagaccctttatcagaaatatcaaagctgctggaggcagcccccagtggatccggcctccctaagcctgctgactgcctcctggcccaagacctctgttgggagctgctggccagtggtatggccaccttgccagggactcgggatgtccaaggccgggcagtgctgcttctgtgtgcccacagcccagcctggcttcagtctgagtgcagcagccaggaactcatccgcctcctgctgtacctgcgaagcatccccaggcccgaagtacaggcactgggactgacagtgctagttgatgcccgaatttgtgctccaagttcttccctcttctctgggctcagccaactacaagaagcagccccaggggccgtgtaccaggtgctgctagtgggaagcacgctgctgaaggaagtgccttccgggctgcagctggagcagttgccttctcagagcctgctgacccacatcccaacggcggggctgcccacttcgctaggaggaggcctgccttactgccaccaggcctggctggatttccgaaggcggctggaagctctactacagaactgccaggcagcttgtgccctgctccagggggccatcgaaagtgtgaaggctgtgccccagcccatggagcctggggaggtcggtcagctgctacagcagacagaggtcctgatgcagcaggtgctagactcgccatggctggcatggctacaatgccaggggggccgggagctgacatggctgaagcaagaggtcccagaggtgaccctgagcccagactacaggacggcaatggacaaggctgacgagctatatgaccgggtggatggattgctgcaccaactgaccctgcagagcaaccagcgaatacaggccctagagttggtccaaacactggaggcccgggaaagcggactgcaccagattgaagtgtggctgcagcaggtgggctggccagcactggaggaggctggggagccctcgctggacatgctgctccaggcccaaggctcttttcaggagctgtaccaggttgcccaggagcaggtcaggcaaggggagaagtttctgcagccgctgactggctgggaggcggctgaactggacccccctggggcacgctttctggccctgcgagcccagctgactgaattctctagggctttggcccagcggtgccagcggctggcggatgctgagaggctgtttcagctcttcagggaggccttgacgtgggctgaggaggggcagcgagtgttggcagagctggagcaggaacgcccgggggttgtgttgcagcagctgcagctgcactggaccaggcaccctgacttgcctcctgcccacttccgaaagatgtgggctctggccacggggctgggctcagaggccatccgccaggagtgccgctgggcctgggcgcggtgccaggacacctggctggccctggaccaaaagcttgaggcttcactgaagctaccaccggtgggcagcacagctagcctgtgtgtcagccaggtccccgctgcacctgcccaccctcccctgaggaaggcctacagcttcgatcggaatctggggcagagtctcagtgaacctgcctgccactgccaccatgcggccactattgctgcctgccgcagaccagaggctggaggaggtgccctgccccaggcatcccctactgtgcctccaccaggcagctctgaccccaggagcctcaacaggctacagctggtgctggcagagatggtggccacggagcgggagtatgtccgggctctagagtacactatggagaactatttccccgagctggatcgccccgatgtgccccagggcctccgcggtcagcgtgcccacctctttggcaacctggagaagctgcgggacttccactgccacttcttcctgcgtgagctggaggcttgcacccggcacccaccacgagtggcctatgccttcctgcgccatagggtgcagtttgggatgtacgcgctctacagcaagaataagcctcgctccgatgccctgatgtcaagctatgggcacaccttcttcaaggacaagcagcaagcactgggggaccacctggacctggcctcctacctgctaaagcccatccagcgcatgggcaagtacgcactgctgctgcaggagctggcacgggcctgcgggggccccacgcaggagctcagtgcgctgcgggaggcccagagccttgtgcacttccagctgcggcacggaaacgacctgctggccatggacgccatccagggctgtgatgttaacctcaaggaacaggggcagctggtgcgacaggatgagtttgtggtgcgcactgggcgccacaagtccgtgcgccgcatcttcctttttgaggagctgctgctcttcagcaagcctcgccatgggcccacaggggttgacacatttgcctacaagcgctccttcaagatggcagaccttggtctcactgagtgctgtgggaacagcaacctgcgcttcgagatctggttccgccgccgcaaggccagggacacctttgtgctgcaggcctccagcctggctatcaagcaggcctggacagctgacatctcccacctgctttggaggcaggccgtccacaacaaggaggtgcgcatggctgagatggtgtccatgggtgtggggaacaaggccttccgagacattgctcccagcgaggaagccatcaacgaccgcaccgtcaactatgtcctgaagtgccgagaagttcgctctcgggcgtccattgccgtagccccgtttgaccatgacagcctctacctgggggcctcgaactcccttcctggagaccctgcctcttgctctgttctggggtccctcaacctgcacctgtacagagacccagctcttctgggtctccgctgtcccctgtatcccagcttcccagaggaagcagcactggaggctgaggcagagctgggcggccagccctctttgactgctgaggactcagagatctcgtcccaatgcccatcagccagtggctccagtggctctgacagcagctgtgtgtcagggcaggccctgggtaggggcctggaggacttaccctgtgtctgagcccgggactggacgagcagtagatccagcagcctgcagctccaaggaacattgcctctctggatctgctgtgaccagggtgtggctgacacctgggctacctccaacctacatgtgcaacgctgttgactaccctttctgatgtgtgtggccattggactaactggcacggggcctctctagggaagtctggttgtagagcctgaataggctcctggccccatgaccccttctcctgtccccagctcccatcccagttgtgggttaagaataggctagagcagacattgggtgtttccatgctgtaggctggtgggggaccatgtgcctctaggcagtgactagggtgcccccacccctcaggaagaacacaggtgggctcctagcagctgatccccaatgcctggccttaaagccgagctcagttaccatagggacaggtccacctctactgggccctcatgcttgcctttcctggcccccaggcccagcccctttttactggggcagtttcgttattttgacttgatgccttttgaataactttcaatagaattgtctaaaattatcttactggttgttaggcctttggtgtctcagagaaggagtctaggtctttgatgtgtgatttaatcttttatttgtttataataaaaaatagactgatatgtaccctctgatgggcacatgca

SEQ ID NO: 423837 - DNA, 4398 bp, Homo sapiens
gccaggcccggggagtgggcacggtggagctgccgaccgttggtcgctgccccaacccacgcactgcgacgccgcgggcctgaattgcagttcctgtgccctggcactaagactggcacctcctgcggcccatgcccttcgcctgcattgcccactgagtcccactcgactgtcttcagcgcggttcacactgagacccagccctctcccgctggccccgagcaggcccacctttaggagggcgtgatggaaaggcccctggagaatggggatgagtccccagactctcagggccatgccaccgactggagatttgctgtgtgcagtttcagggatgcctgggaagaggaggaacctgcttcccagatgcacgttaaggacccaggtcctccaagaccaccagccggggccacccaggatgaggagctacagggcagccccttgtccaggaaattccagttacccccagctgcagatgagtcgggggatgcccagaggggcacagtagaaagctcctcagtcctgtcagaagggccaggcccctctggagtggagagtctcctatgccccatgtcctcccacctcagcttggcacagggtgagagtgacaccccaggggtagggttggtaggggacccaggtccaagcagggcgatgccatctggcttgagccctggggcattggacagcgaccctgtgggccttggagaccctttatcagaaatatcaaagctgctggaggcagcccccagtggatccggcctccctaagcctgctgactgcctcctggcccaagacctctgttgggagctgctggccagtggtatggccaccttgccagggactcgggatgtccaaggccgggcagtgctgcttctgtgtgcccacagcccagcctggcttcagtctgagtgcagcagccaggaactcatccgcctcctgctgtacctgcgaagcatccccaggcccgaagtacaggcactgggactgacagtgctagttgatgcccgaatttgtgctccaagttcttccctcttctctgggctcagccaactacaagaagcagccccaggggccgtgtaccaggtgctgctagtgggaagcacgctgctgaaggaagtgccttccgggctgcagctggagcagttgccttctcagagcctgctgacccacatcccaacggcggggctgcccacttcgctaggaggaggcctgccttactgccaccaggcctggctggatttccgaaggcggctggaagctctactacagaactgccaggcagcttgtgccctgctccagggggccatcgaaagtgtgaaggctgtgccccagcccatggagcctggggaggtcggtcagctgctacagcagacagaggtcctgatgcagcaggtgctagactcgccatggctggcatggctacaatgccaggggggccgggagctgacatggctgaagcaagaggtcccagaggtgaccctgagcccagactacaggacggcaatggacaaggctgacgagctatatgaccgggtggatggattgctgcaccaactgaccctgcagagcaaccagcgaatacaggccctagagttggtccaaacactggaggcccgggaaagcggactgcaccagattgaagtgtggctgcagcaggtgggctggccagcactggaggaggctggggagccctcgctggacatgctgctccaggcccaaggctcttttcaggagctgtaccaggttgcccaggagcaggtcaggcaaggggagaagtttctgcagccgctgactggctgggaggcggctgaactggacccccctggggcacgctttctggccctgcgagcccagctgactgaattctctagggctttggcccagcggtgccagcggctggcggatgctgagaggctgtttcagctcttcagggaggccttgacgtgggctgaggaggggcagcgagtgttggcagagctggagcaggaacgcccgggggttgtgttgcagcagctgcagctgcactggaccaggcaccctgacttgcctcctgcccacttccgaaagatgtgggctctggccacggggctgggctcagaggccatccgccaggagtgccgctgggcctgggcgcggtgccaggacacctggctggccctggaccaaaagcttgaggcttcactgaagctaccaccggtgggcagcacagctagcctgtgtgtcagccaggtccccgctgcacctgcccaccctcccctgaggaaggcctacagcttcgatcggaatctggggcagagtctcagtgaacctgcctgccactgccaccatgcggccactattgctgcctgccgcagaccagaggctggaggaggtgccctgccccaggcatcccctactgtgcctccaccaggcagctctgaccccaggagcctcaacaggctacagctggtgctggcagagatggtggccacggagcgggagtatgtccgggctctagagtacactatggagaactatttccccgagctggatcgccccgatgtgccccagggcctccgcggtcagcgtgcccacctctttggcaacctggagaagctgcgggacttccactgccacttcttcctgcgtgagctggaggcttgcacccggcacccaccacgagtggcctatgccttcctgcgccatagggtgcagtttgggatgtacgcgctctacagcaagaataagcctcgctccgatgccctgatgtcaagctatgggcacaccttcttcaaggacaagcagcaagcactgggggaccacctggacctggcctcctacctgctaaagcccatccagcgcatgggcaagtacgcactgctgctgcaggagctggcacgggcctgcgggggccccacgcaggagctcagtgcgctgcgggaggcccagagccttgtgcacttccagctgcggcacggaaacgacctgctggccatggacgccatccagggctgtgatgttaacctcaaggaacaggggcagctggtgcgacaggatgagtttgtggtgcgcactgggcgccacaagtccgtgcgccgcatcttcctttttgaggagctgctgctcttcagcaagcctcgccatgggcccacaggggttgacacatttgcctacaagcgctccttcaagatggcagaccttggtctcactgagtgctgtgggaacagcaacctgcgcttcgagatctggttccgccgccgcaaggccagggacacctttgtgctgcaggcctccagcctggctatcaagcaggcctggacagctgacatctcccacctgctttggaggcaggccgtccacaacaaggaggtgcgcatggctgagatggtgtccatgggtgtggggaacaaggccttccgagacattgctcccagcgaggaagccatcaacgaccgcaccgtcaactatgtcctgaagtgccgagaagttcgctctcgggcgtccattgccgtagccccgtttgaccatgacagcctctacctgggggcctcgaactcccttcctggagaccctgcctcttgctctgttctggggtccctcaacctgcacctgtacagagacccagctcttctgggtctccgctgtcccctgtatcccagcttcccagaggaagcagcactggaggctgaggcagagctgggcggccagccctctttgagtctgagcccgggactggacgagcagtagatccagcagcctgcagctccaaggaacattgcctctctggatctgctgtgaccagggtgtggctgacacctgggctacctccaacctacatgtgcaacgctgttgactaccctttctgatgtgtgtggccattggactaactggcacggggcctctctagggaagtctggttgtagagcctgaataggctcctggccccatgaccccttctcctgtccccagctcccatcccagttgtgggttaagaataggctagagcagacattgggtgtttccatgctgtaggctggtgggggaccatgtgcctctaggcagtgactagggtgcccccacccctcaggaagaacacaggtgggctcctagcagctgatccccaatgcctggccttaaagccgagctcagttaccatagggacaggtccacctctactgggccctcatgcttgcctttcctggcccccaggcccagcccctttttactggggcagtttcgttattttgacttgatgccttttgaataactttcaatagaattgtctaaaattatcttactggttgttaggcctttggtgtctcagagaaggagtctaggtctttgatgtgtgatttaatcttttatttgtttataataaaaaatagactgatatgtaccctctgatgggcacatgca

SEQ ID NO: 423838 - DNA, 1483 bp, Homo sapiens
tagaggtctcattatattgcccagactggtcttgaactcctgggctcaaacaatcctcctacctcggcctcccaaagtgttgggattacaggcgtgagccactgcgcccagccaggggcctcatctttaaaaggggaatatggcacctgccccacaggattgttgggaggagagcacctggcactagaaaggctcagctcacaggacagttaatgtgctggatggaggtgtacaggaaagacttatctggggggtggtagaggcccaaggacaggcttatgtccagaagcatcccacttatgtccactctccacccagaggtgcgcatggctgagatggtgtccatgggtgtggggaacaaggccttccgagacattgctcccagcgaggaagccatcaacgaccgcaccgtcaactatgtcctgaagtgccgagaagttcgctctcgggcgtccattgccgtagccccgtttgaccatgacagcctctacctgggggcctcgaactcccttcctggagaccctgcctcttgctctgttctggggtccctcaacctgcacctgtacagagacccagctcttctgggtctccgctgtcccctgtatcccagcttcccagaggaagcagcactggaggctgaggcagagctgggcggccagccctctttgactgctgaggactcagagatctcgtcccaatgcccatcagccagtggctccagtggctctgacagcagctgtgtgtcagggcaggccctgggtaggggcctggaggacttaccctgtgtctgagcccgggactggacgagcagtagatccagcagcctgcagctccaaggaacattgcctctctggatctgctgtgaccagggtgtggctgacacctgggctacctccaacctacatgtgcaacgctgttgactaccctttctgatgtgtgtggccattggactaactggcacggggcctctctagggaagtctggttgtagagcctgaataggctcctggccccatgaccccttctcctgtccccagctcccatcccagttgtgggttaagaataggctagagcagacattgggtgtttccatgctgtaggctggtgggggaccatgtgcctctaggcagtgactagggtgcccccacccctcaggaagaacacaggtgggctcctagcagctgatccccaatgcctggccttaaagccgagctcagttaccatagggacaggtccacctctactgggccctcatgcttgcctttcctggcccccaggcccagcccctttttactggggcagtttcgttattttgacttgatgccttttgaataactttcaatagaattgtctaaaattatcttactggttgttaggcctttggtgtctcagagaaggagtctaggtctttgatgtgtgatttaatcttttatttgtttataataaaaaatagactgatatgtaccctctgatgggcacatgca

SEQ ID NO: 423839 - DNA, 1449 bp, Homo sapiens
ctcagcaccagcctcctgcaccggactttgtggagaagggggcctgaattgcagttcctgtgccctggcactaagactggcacctcctgcggcccatgcccttcgcctgcattgcccactgagtcccactcgactgtcttcagcgcggttcacactgagacccagccctctcccgctggccccgagcaggcccacctttaggagggcgtgatggaaaggcccctggagaatggggatgagtccccagactctcagggccatgccaccgactggagatttgctgtgtgcagtttcagggatgcctgggaagaggaggaacctgcttcccagatgcacgttaaggacccagggactcgggatgtccaaggccgggcagtgctgcttctgtgtgcccacagcccagcctggcttcagtctgagtgcagcagccaggaactcatccgcctcctgctgtacctgcgaagcatccccaggcccgaagtacaggcactgggactgacagtgctagttgatgcccgaatttgtgctccaagttcttccctcttctctgggtctccgctgtcccctgtatcccagcttcccagaggaagcagcactggaggctgaggcagagctgggcggccagccctctttgactgctgaggactcagagatctcgtcccaatgcccatcagccagtggctccagtggctctgacagcagctgtgtgtcagggcaggccctgggtaggggcctggaggacttaccctgtgtctgagcccgggactggacgagcagtagatccagcagcctgcagctccaaggaacattgcctctctggatctgctgtgaccagggtgtggctgacacctgggctacctccaacctacatgtgcaacgctgttgactaccctttctgatgtgtgtggccattggactaactggcacggggcctctctagggaagtctggttgtagagcctgaataggctcctggccccatgaccccttctcctgtccccagctcccatcccagttgtgggttaagaataggctagagcagacattgggtgtttccatgctgtaggctggtgggggaccatgtgcctctaggcagtgactagggtgcccccacccctcaggaagaacacaggtgggctcctagcagctgatccccaatgcctggccttaaagccgagctcagttaccatagggacaggtccacctctactgggccctcatgcttgcctttcctggcccccaggcccagcccctttttactggggcagtttcgttattttgacttgatgccttttgaataactttcaatagaattgtctaaaattatcttactggttgttaggcctttggtgtctcagagaaggagtctaggtctttgatgtgtgatttaatcttttatttgtttataataaaaaatagactgatatgtaccctctgatgggcacatgca

SEQ ID NO: 423840 - DNA, 461 bp, Homo sapiens
ataggctcctggccccatgaccccttctcctgtccccagctcccatcccagttgtgggttaagaataggctagagcagacattgggtgtttccatgctgtaggctggtgggggaccatgtgcctctaggcagtgactagggtgcccccacccctcaggaagaacacaggtgggctcctagcagctgatccccaatgcctggccttaaagccgagctcagttaccatagggacaggtccacctctactgggccctcatgcttgcctttcctggcccccaggcccagcccctttttactggggcagtttcgttattttgacttgatgccttttgaataactttcaatagaattgtctaaaattatcttactggttgttaggcctttggtgtctcagagaaggagtctaggtctttgatgtgtgatttaatcttttatttgtttataataaaaaatagactgat

SEQ ID NO: 423841 - DNA, 792 bp, Homo sapiens
gctgttggtcccactgtgcctgttgtaatccccaggttcatgaaagaggtgcctgccttagagccagggaagccgttgcacccggtgccccctctccccagggaccatgggcctgggcacactgtggggctcagggtcttctcctggtcgcagagctgaccttcccacaatcttcccacaaattctggggagtgtcgggccaggcccacatgccctaaagggacctcaaatcgcacagctacccacttgggtagctttcatcagttcaggattccctgactgcgggtgaaatgagggggcagggcaccaacacagcccgagtgctggcagcgggtgaacgtataacacagggagtcttccccagtcctcacggcaaccccaggagaaaaatgactttccatttttacaggtgaggagggtgaggctcaaagagcagagttcctggagcgcccccagcaggtaagtggagaagccaggcctgggctgggggctctggctccagaaccccacctcagcaccagcctcctgcaccggactttgtggagaagggggtaagggggtgccagggatggcaaaggggtagaggatctggtggactctggcaggcctgggtcagctccacccattggtctcactcccacccggatggcagccccatcccacgtgggatcatgcgacctgtctctgggtgcccgcggcgaggcagcaccccgcttccctacacagaaggccttcccctcccgtcggctcattcagccgcggaagcccctgggagaccccgccccgccccgt

SEQ ID NO: 423842 - DNA, 4487 bp, Homo sapiens
gtgaggagggtgaggctcaaagagcagagttcctggagcgcccccagcaggcctgaattgcagttcctgtgccctggcactaagactggcacctcctgcggcccatgcccttcgcctgcattgcccactgagtcccactcgactgtcttcagcgcggttcacactgagacccagccctctcccgctggccccgagcaggcccacctttaggagggcgtgatggaaaggcccctggagaatggggatgagtccccagactctcagggccatgccaccgactggagatttgctgtgtgcagtttcagggatgcctgggaagaggaggaacctgcttcccagatgcacgttaaggacccaggtcctccaagaccaccagccggggccacccaggatgaggagctacagggcagccccttgtccaggaaattccagttacccccagctgcagatgagtcgggggatgcccagaggggcacagtagaaagctcctcagtcctgtcagaagggccaggcccctctggagtggagagtctcctatgccccatgtcctcccacctcagcttggcacagggtgagagtgacaccccaggggtagggttggtaggggacccaggtccaagcagggcgatgccatctggcttgagccctggggcattggacagcgaccctgtgggccttggagaccctttatcagaaatatcaaagctgctggaggcagcccccagtggatccggcctccctaagcctgctgactgcctcctggcccaagacctctgttgggagctgctggccagtggtatggccaccttgccagggactcgggatgtccaaggccgggcagtgctgcttctgtgtgcccacagcccagcctggcttcagtctgagtgcagcagccaggaactcatccgcctcctgctgtacctgcgaagcatccccaggcccgaagtacaggcactgggactgacagtgctagttgatgcccgaatttgtgctccaagttcttccctcttctctgggctcagccaactacaagaagcagccccaggggccgtgtaccaggtgctgctagtgggaagcacgctgctgaaggaagtgccttccgggctgcagctggagcagttgccttctcagagcctgctgacccacatcccaacggcggggctgcccacttcgctaggaggaggcctgccttactgccaccaggcctggctggatttccgaaggcggctggaagctctactacagaactgccaggcagcttgtgccctgctccagggggccatcgaaagtgtgaaggctgtgccccagcccatggagcctggggaggtcggtcagctgctacagcagacagaggtcctgatgcagcaggtgctagactcgccatggctggcatggctacaatgccaggggggccgggagctgacatggctgaagcaagaggtcccagaggtgaccctgagcccagactacaggacggcaatggacaaggctgacgagctatatgaccgggtggatggattgctgcaccaactgaccctgcagagcaaccagcgaatacaggccctagagttggtccaaacactggaggcccgggaaagcggactgcaccagattgaagtgtggctgcagcaggtgggctggccagcactggaggaggctggggagccctcgctggacatgctgctccaggcccaaggctcttttcaggagctgtaccaggttgcccaggagcaggtcaggcaaggggagaagtttctgcagccgctgactggctgggaggcggctgaactggacccccctggggcacgctttctggccctgcgagcccagctgactgaattctctagggctttggcccagcggtgccagcggctggcggatgctgagaggctgtttcagctcttcagggaggccttgacgtgggctgaggaggggcagcgagtgttggcagagctggagcaggaacgcccgggggttgtgttgcagcagctgcagctgcactggaccaggcaccctgacttgcctcctgcccacttccgaaagatgtgggctctggccacggggctgggctcagaggccatccgccaggagtgccgctgggcctgggcgcggtgccaggacacctggctggccctggaccaaaagcttgaggcttcactgaagctaccaccggtgggcagcacagctagcctgtgtgtcagccaggtccccgctgcacctgcccaccctcccctgaggaaggcctacagcttcgatcggaatctggggcagagtctcagtgaacctgcctgccactgccaccatgcggccactattgctgcctgccgcagaccagaggctggaggaggtgccctgccccaggcatcccctactgtgcctccaccaggcagctctgaccccaggagcctcaacaggctacagctggtgctggcagagatggtggccacggagcgggagtatgtccgggctctagagtacactatggagaactatttccccgagctggatcgccccgatgtgccccagggcctccgcggtcagcgtgcccacctctttggcaacctggagaagctgcgggacttccactgccacttcttcctgcgtgagctggaggcttgcacccggcacccaccacgagtggcctatgccttcctgcgccatagggtgcagtttgggatgtacgcgctctacagcaagaataagcctcgctccgatgccctgatgtcaagctatgggcacaccttcttcaaggacaagcagcaagcactgggggaccacctggacctggcctcctacctgctaaagcccatccagcgcatgggcaagtacgcactgctgctgcaggagctggcacgggcctgcgggggccccacgcaggagctcagtgcgctgcgggaggcccagagccttgtgcacttccagctgcggcacggaaacgacctgctggccatggacgccatccagggctgtgatgttaacctcaaggaacaggggcagctggtgcgacaggatgagtttgtggtgcgcactgggcgccacaagtccgtgcgccgcatcttcctttttgaggagctgctgctcttcagcaagcctcgccatgggcccacaggggttgacacatttgcctacaagcgctccttcaagatggcagaccttggtctcactgagtgctgtgggaacagcaacctgcgcttcgagatctggttccgccgccgcaaggccagggacacctttgtgctgcaggcctccagcctggctatcaagcaggcctggacagctgacatctcccacctgctttggaggcaggccgtccacaacaaggaggtgcgcatggctgagatggtgtccatgggtgtggggaacaaggccttccgagacattgctcccagcgaggaagccatcaacgaccgcaccgtcaactatgtcctgaagtgccgagaagttcgctctcgggcgtccattgccgtagccccgtttgaccatgacagcctctacctgggggcctcgaactcccttcctggagaccctgcctcttgctctgttctggggtccctcaacctgcacctgtacagagacccagctcttctgggtctccgctgtcccctgtatcccagcttcccagaggaagcagcactggaggctgaggcagagctgggcggccagccctctttgactgctgaggactcagagatctcgtcccaatgcccatcagccagtggctccagtggctctgacagcagctgtgtgtcagggcaggccctgggtaggggcctggaggacttaccctgtgtctgagcccgggactggacgagcagtagatccagcagcctgcagctccaaggaacattgcctctctggatctgctgtgaccagggtgtggctgacacctgggctacctccaacctacatgtgcaacgctgttgactaccctttctgatgtgtgtggccattggactaactggcacggggcctctctagggaagtctggttgtagagcctgaataggctcctggccccatgaccccttctcctgtccccagctcccatcccagttgtgggttaagaataggctagagcagacattgggtgtttccatgctgtaggctggtgggggaccatgtgcctctaggcagtgactagggtgcccccacccctcaggaagaacacaggtgggctcctagcagctgatccccaatgcctggccttaaagccgagctcagttaccatagggacaggtccacctctactgggccctcatgcttgcctttcctggcccccaggcccagcccctttttactggggcagtttcgttattttgacttgatgccttttgaataactttcaatagaattgtctaaaattatcttactggttgttaggcctttggtgtctcagagaaggagtctaggtctttgatgtgtgatttaatcttttatttgtttataataaaaaatagactgatatgtaccctctgatgggcacatgca

SEQ ID NO: 423843 - DNA, 4762 bp, Homo sapiens
agcggagtggccgtcgaggccgccgtctgttcgaaggctgtccgacttcacggttccccgcggctcggcccgggggcgtgagtgtcgccagcgggcgacgggggggcgcgcggtaggccctgcaacaaggccagggcctgggggggccggcaggagagcgaacccgaggcatcgtggtgccatggcggggccgccccacgggcatgggcctgcagagcgtggccgtgaggacgctgagggtgggcgcgcacggagcagaggcccacgggcgtccgacgggggacctggacagagggacacccttaacgttattccctcttcccaggcctgaattgcagttcctgtgccctggcactaagactggcacctcctgcggcccatgcccttcgcctgcattgcccactgagtcccactcgactgtcttcagcgcggttcacactgagacccagccctctcccgctggccccgagcaggcccacctttaggagggcgtgatggaaaggcccctggagaatggggatgagtccccagactctcagggccatgccaccgactggagatttgctgtgtgcagtttcagggatgcctgggaagaggaggaacctgcttcccagatgcacgttaaggacccaggtcctccaagaccaccagccggggccacccaggatgaggagctacagggcagccccttgtccaggaaattccagttacccccagctgcagatgagtcgggggatgcccagaggggcacagtagaaagctcctcagtcctgtcagaagggccaggcccctctggagtggagagtctcctatgccccatgtcctcccacctcagcttggcacagggtgagagtgacaccccaggggtagggttggtaggggacccaggtccaagcagggcgatgccatctggcttgagccctggggcattggacagcgaccctgtgggccttggagaccctttatcagaaatatcaaagctgctggaggcagcccccagtggatccggcctccctaagcctgctgactgcctcctggcccaagacctctgttgggagctgctggccagtggtatggccaccttgccagggactcgggatgtccaaggccgggcagtgctgcttctgtgtgcccacagcccagcctggcttcagtctgagtgcagcagccaggaactcatccgcctcctgctgtacctgcgaagcatccccaggcccgaagtacaggcactgggactgacagtgctagttgatgcccgaatttgtgctccaagttcttccctcttctctgggctcagccaactacaagaagcagccccaggggccgtgtaccaggtgctgctagtgggaagcacgctgctgaaggaagtgccttccgggctgcagctggagcagttgccttctcagagcctgctgacccacatcccaacggcggggctgcccacttcgctaggaggaggcctgccttactgccaccaggcctggctggatttccgaaggcggctggaagctctactacagaactgccaggcagcttgtgccctgctccagggggccatcgaaagtgtgaaggctgtgccccagcccatggagcctggggaggtcggtcagctgctacagcagacagaggtcctgatgcagcaggtgctagactcgccatggctggcatggctacaatgccaggggggccgggagctgacatggctgaagcaagaggtcccagaggtgaccctgagcccagactacaggacggcaatggacaaggctgacgagctatatgaccgggtggatggattgctgcaccaactgaccctgcagagcaaccagcgaatacaggccctagagttggtccaaacactggaggcccgggaaagcggactgcaccagattgaagtgtggctgcagcaggtgggctggccagcactggaggaggctggggagccctcgctggacatgctgctccaggcccaaggctcttttcaggagctgtaccaggttgcccaggagcaggtcaggcaaggggagaagtttctgcagccgctgactggctgggaggcggctgaactggacccccctggggcacgctttctggccctgcgagcccagctgactgaattctctagggctttggcccagcggtgccagcggctggcggatgctgagaggctgtttcagctcttcagggaggccttgacgtgggctgaggaggggcagcgagtgttggcagagctggagcaggaacgcccgggggttgtgttgcagcagctgcagctgcactggaccaggcaccctgacttgcctcctgcccacttccgaaagatgtgggctctggccacggggctgggctcagaggccatccgccaggagtgccgctgggcctgggcgcggtgccaggacacctggctggccctggaccaaaagcttgaggcttcactgaagctaccaccggtgggcagcacagctagcctgtgtgtcagccaggtccccgctgcacctgcccaccctcccctgaggaaggcctacagcttcgatcggaatctggggcagagtctcagtgaacctgcctgccactgccaccatgcggccactattgctgcctgccgcagaccagaggctggaggaggtgccctgccccaggcatcccctactgtgcctccaccaggcagctctgaccccaggagcctcaacaggctacagctggtgctggcagagatggtggccacggagcgggagtatgtccgggctctagagtacactatggagaactatttccccgagctggatcgccccgatgtgccccagggcctccgcggtcagcgtgcccacctctttggcaacctggagaagctgcgggacttccactgccacttcttcctgcgtgagctggaggcttgcacccggcacccaccacgagtggcctatgccttcctgcgccatagggtgcagtttgggatgtacgcgctctacagcaagaataagcctcgctccgatgccctgatgtcaagctatgggcacaccttcttcaaggacaagcagcaagcactgggggaccacctggacctggcctcctacctgctaaagcccatccagcgcatgggcaagtacgcactgctgctgcaggagctggcacgggcctgcgggggccccacgcaggagctcagtgcgctgcgggaggcccagagccttgtgcacttccagctgcggcacggaaacgacctgctggccatggacgccatccagggctgtgatgttaacctcaaggaacaggggcagctggtgcgacaggatgagtttgtggtgcgcactgggcgccacaagtccgtgcgccgcatcttcctttttgaggagctgctgctcttcagcaagcctcgccatgggcccacaggggttgacacatttgcctacaagcgctccttcaagatggcagaccttggtctcactgagtgctgtgggaacagcaacctgcgcttcgagatctggttccgccgccgcaaggccagggacacctttgtgctgcaggcctccagcctggctatcaagcaggcctggacagctgacatctcccacctgctttggaggcaggccgtccacaacaaggaggtgcgcatggctgagatggtgtccatgggtgtggggaacaaggccttccgagacattgctcccagcgaggaagccatcaacgaccgcaccgtcaactatgtcctgaagtgccgagaagttcgctctcgggcgtccattgccgtagccccgtttgaccatgacagcctctacctgggggcctcgaactcccttcctggagaccctgcctcttgctctgttctggggtccctcaacctgcacctgtacagagacccagctcttctgggtctccgctgtcccctgtatcccagcttcccagaggaagcagcactggaggctgaggcagagctgggcggccagccctctttgactgctgaggactcagagatctcgtcccaatgcccatcagccagtggctccagtggctctgacagcagctgtgtgtcagggcaggccctgggtaggggcctggaggacttaccctgtgtctgagcccgggactggacgagcagtagatccagcagcctgcagctccaaggaacattgcctctctggatctgctgtgaccagggtgtggctgacacctgggctacctccaacctacatgtgcaacgctgttgactaccctttctgatgtgtgtggccattggactaactggcacggggcctctctagggaagtctggttgtagagcctgaataggctcctggccccatgaccccttctcctgtccccagctcccatcccagttgtgggttaagaataggctagagcagacattgggtgtttccatgctgtaggctggtgggggaccatgtgcctctaggcagtgactagggtgcccccacccctcaggaagaacacaggtgggctcctagcagctgatccccaatgcctggccttaaagccgagctcagttaccatagggacaggtccacctctactgggccctcatgcttgcctttcctggcccccaggcccagcccctttttactggggcagtttcgttattttgacttgatgccttttgaataactttcaatagaattgtctaaaattatcttactggttgttaggcctttggtgtctcagagaaggagtctaggtctttgatgtgtgatttaatcttttatttgtttataataaaaaatagactgatatgtaccctctgatgggcacatgca

SEQ ID NO: 423844 - DNA, 4676 bp, Homo sapiens
agcggagtggccgtcgaggccgccgtctgttcgaaggctgtccgacttcacggttccccgcggctcggcccgggggcgtgagtgtcgccagcgggcgacgggggggcgcgcggtaggccctgcaacaaggccagggcctgggggggccggcaggagagcgaacccgaggcatcgtggtgccatggcggggccgccccacgggcatgggcctgcagagcgtggccgtgaggacgctgagggcctgaattgcagttcctgtgccctggcactaagactggcacctcctgcggcccatgcccttcgcctgcattgcccactgagtcccactcgactgtcttcagcgcggttcacactgagacccagccctctcccgctggccccgagcaggcccacctttaggagggcgtgatggaaaggcccctggagaatggggatgagtccccagactctcagggccatgccaccgactggagatttgctgtgtgcagtttcagggatgcctgggaagaggaggaacctgcttcccagatgcacgttaaggacccaggtcctccaagaccaccagccggggccacccaggatgaggagctacagggcagccccttgtccaggaaattccagttacccccagctgcagatgagtcgggggatgcccagaggggcacagtagaaagctcctcagtcctgtcagaagggccaggcccctctggagtggagagtctcctatgccccatgtcctcccacctcagcttggcacagggtgagagtgacaccccaggggtagggttggtaggggacccaggtccaagcagggcgatgccatctggcttgagccctggggcattggacagcgaccctgtgggccttggagaccctttatcagaaatatcaaagctgctggaggcagcccccagtggatccggcctccctaagcctgctgactgcctcctggcccaagacctctgttgggagctgctggccagtggtatggccaccttgccagggactcgggatgtccaaggccgggcagtgctgcttctgtgtgcccacagcccagcctggcttcagtctgagtgcagcagccaggaactcatccgcctcctgctgtacctgcgaagcatccccaggcccgaagtacaggcactgggactgacagtgctagttgatgcccgaatttgtgctccaagttcttccctcttctctgggctcagccaactacaagaagcagccccaggggccgtgtaccaggtgctgctagtgggaagcacgctgctgaaggaagtgccttccgggctgcagctggagcagttgccttctcagagcctgctgacccacatcccaacggcggggctgcccacttcgctaggaggaggcctgccttactgccaccaggcctggctggatttccgaaggcggctggaagctctactacagaactgccaggcagcttgtgccctgctccagggggccatcgaaagtgtgaaggctgtgccccagcccatggagcctggggaggtcggtcagctgctacagcagacagaggtcctgatgcagcaggtgctagactcgccatggctggcatggctacaatgccaggggggccgggagctgacatggctgaagcaagaggtcccagaggtgaccctgagcccagactacaggacggcaatggacaaggctgacgagctatatgaccgggtggatggattgctgcaccaactgaccctgcagagcaaccagcgaatacaggccctagagttggtccaaacactggaggcccgggaaagcggactgcaccagattgaagtgtggctgcagcaggtgggctggccagcactggaggaggctggggagccctcgctggacatgctgctccaggcccaaggctcttttcaggagctgtaccaggttgcccaggagcaggtcaggcaaggggagaagtttctgcagccgctgactggctgggaggcggctgaactggacccccctggggcacgctttctggccctgcgagcccagctgactgaattctctagggctttggcccagcggtgccagcggctggcggatgctgagaggctgtttcagctcttcagggaggccttgacgtgggctgaggaggggcagcgagtgttggcagagctggagcaggaacgcccgggggttgtgttgcagcagctgcagctgcactggaccaggcaccctgacttgcctcctgcccacttccgaaagatgtgggctctggccacggggctgggctcagaggccatccgccaggagtgccgctgggcctgggcgcggtgccaggacacctggctggccctggaccaaaagcttgaggcttcactgaagctaccaccggtgggcagcacagctagcctgtgtgtcagccaggtccccgctgcacctgcccaccctcccctgaggaaggcctacagcttcgatcggaatctggggcagagtctcagtgaacctgcctgccactgccaccatgcggccactattgctgcctgccgcagaccagaggctggaggaggtgccctgccccaggcatcccctactgtgcctccaccaggcagctctgaccccaggagcctcaacaggctacagctggtgctggcagagatggtggccacggagcgggagtatgtccgggctctagagtacactatggagaactatttccccgagctggatcgccccgatgtgccccagggcctccgcggtcagcgtgcccacctctttggcaacctggagaagctgcgggacttccactgccacttcttcctgcgtgagctggaggcttgcacccggcacccaccacgagtggcctatgccttcctgcgccatagggtgcagtttgggatgtacgcgctctacagcaagaataagcctcgctccgatgccctgatgtcaagctatgggcacaccttcttcaaggacaagcagcaagcactgggggaccacctggacctggcctcctacctgctaaagcccatccagcgcatgggcaagtacgcactgctgctgcaggagctggcacgggcctgcgggggccccacgcaggagctcagtgcgctgcgggaggcccagagccttgtgcacttccagctgcggcacggaaacgacctgctggccatggacgccatccagggctgtgatgttaacctcaaggaacaggggcagctggtgcgacaggatgagtttgtggtgcgcactgggcgccacaagtccgtgcgccgcatcttcctttttgaggagctgctgctcttcagcaagcctcgccatgggcccacaggggttgacacatttgcctacaagcgctccttcaagatggcagaccttggtctcactgagtgctgtgggaacagcaacctgcgcttcgagatctggttccgccgccgcaaggccagggacacctttgtgctgcaggcctccagcctggctatcaagcaggcctggacagctgacatctcccacctgctttggaggcaggccgtccacaacaaggaggtgcgcatggctgagatggtgtccatgggtgtggggaacaaggccttccgagacattgctcccagcgaggaagccatcaacgaccgcaccgtcaactatgtcctgaagtgccgagaagttcgctctcgggcgtccattgccgtagccccgtttgaccatgacagcctctacctgggggcctcgaactcccttcctggagaccctgcctcttgctctgttctggggtccctcaacctgcacctgtacagagacccagctcttctgggtctccgctgtcccctgtatcccagcttcccagaggaagcagcactggaggctgaggcagagctgggcggccagccctctttgactgctgaggactcagagatctcgtcccaatgcccatcagccagtggctccagtggctctgacagcagctgtgtgtcagggcaggccctgggtaggggcctggaggacttaccctgtgtctgagcccgggactggacgagcagtagatccagcagcctgcagctccaaggaacattgcctctctggatctgctgtgaccagggtgtggctgacacctgggctacctccaacctacatgtgcaacgctgttgactaccctttctgatgtgtgtggccattggactaactggcacggggcctctctagggaagtctggttgtagagcctgaataggctcctggccccatgaccccttctcctgtccccagctcccatcccagttgtgggttaagaataggctagagcagacattgggtgtttccatgctgtaggctggtgggggaccatgtgcctctaggcagtgactagggtgcccccacccctcaggaagaacacaggtgggctcctagcagctgatccccaatgcctggccttaaagccgagctcagttaccatagggacaggtccacctctactgggccctcatgcttgcctttcctggcccccaggcccagcccctttttactggggcagtttcgttattttgacttgatgccttttgaataactttcaatagaattgtctaaaattatcttactggttgttaggcctttggtgtctcagagaaggagtctaggtctttgatgtgtgatttaatcttttatttgtttataataaaaaatagactgatatgtaccctctgatgggcacatgca

SEQ ID NO: 423845 - DNA, 4363 bp, Homo sapiens
gccaggcccggggagtgggcacggtggagctgccgaccgttggtcgctgccccaacccacgcactgcgacgccgcgggcctgaattgcagttcctgtgccctggcactaagactggcacctcctgcggcccatgcccttcgcctgcattgcccactgagtcccactcgactgtcttcagcgcggttcacactgagacccagccctctcccgctggccccgagcaggcccacctttaggagggcgtgatggaaaggcccctggagaatggggatgagtccccagactctcagggccatgccaccgactggagatttgctgtgtgcagtttcagggatgcctgggaagaggaggaacctgcttcccagatgcacgttaaggacccaggtcctccaagaccaccagccggggccacccaggatgaggagctacagggcagccccttgtccaggaaattccagttacccccagctgcagatgagtcgggggatgcccagaggggcacagtagaaagctcctcagtcctgtcagaagggccaggcccctctggagtggagagtctcctatgccccatgtcctcccacctcagcttggcacagggtgagagtgacaccccaggggtagggttggtaggggacccaggtccaagcagggcgatgccatctggcttgagccctggggcattggacagcgaccctgtgggccttggagaccctttatcagaaatatcaaagctgctggaggcagcccccagtggatccggcctccctaagcctgctgactgcctcctggcccaagacctctgttgggagctgctggccagtggtatggccaccttgccagggactcgggatgtccaaggccgggcagtgctgcttctgtgtgcccacagcccagcctggcttcagtctgagtgcagcagccaggaactcatccgcctcctgctgtacctgcgaagcatccccaggcccgaagtacaggcactgggactgacagtgctagttgatgcccgaatttgtgctccaagttcttccctcttctctgggctcagccaactacaagaagcagccccaggggccgtgtaccaggtgctgctagtgggaagcacgctgctgaaggaagtgccttccgggctgcagctggagcagttgccttctcagagcctgctgacccacatcccaacggcggggctgcccacttcgctaggaggaggcctgccttactgccaccaggcctggctggatttccgaaggcggctggaagctctactacagaactgccaggcagcttgtgccctgctccagggggccatcgaaagtgtgaaggctgtgccccagcccatggagcctggggaggtcggtcagctgctacagcagacagaggtcctgatgcagcaggtgctagactcgccatggctggcatggctacaatgccaggggggccgggagctgacatggctgaagcaagaggtcccagaggtgaccctgagcccagactacaggacggcaatggacaaggctgacgagctatatgaccgggtggatggattgctgcaccaactgaccctgcagagcaaccagcgaatacaggccctagagttggtccaaacactggaggcccgggaaagcggactgcaccagattgaagtgtggctgcagcaggtgggctggccagcactggaggaggctggggagccctcgctggacatgctgctccaggcccaaggctcttttcaggagctgtaccaggttgcccaggagcaggtcaggcaaggggagaagtttctgcagccgctgactggctgggaggcggctgaactggacccccctggggcacgctttctggccctgcgagcccagctgactgaattctctagggctttggcccagcggtgccagcggctggcggatgctgagaggctgtttcagctcttcagggaggccttgacgtgggctgaggaggggcagcgagtgttggcagagctggagcaggaacgcccgggggttgtgttgcagcagctgcagctgcactggaccaggcaccctgacttgcctcctgcccacttccgaaagatgtgggctctggccacggggctgggctcagaggccatccgccaggagtgccgctgggcctgggcgcggtgccaggacacctggctggccctggaccaaaagcttgaggcttcactgaagctaccaccggtgggcagcacagctagcctgtgtgtcagccaggtccccgctgcacctgcccaccctcccctgaggaaggcctacagcttcgatcggaatctggggcagagtctcagtgaacctgcctgccactgccaccatgcggccactattgctgcctgccgcagaccagaggctggaggaggtgccctgccccaggcatcccctactgtgcctccaccaggcagctctgaccccaggagcctcaacaggctacagctggtgctggcagagatggtggccacggagcgggagtatgtccgggctctagagtacactatggagaactatttccccgagctggatcgccccgatgtgccccagggcctccgcggtcagcgtgcccacctctttggcaacctggagaagctgcgggacttccactgccacttcttcctgcgtgagctggaggcttgcacccggcacccaccacgagtggcctatgccttcctgcgccatagggtgcagtttgggatgtacgcgctctacagcaagaataagcctcgctccgatgccctgatgtcaagctatgggcacaccttcttcaaggacaagcagcaagcactgggggaccacctggacctggcctcctacctgctaaagcccatccagcgcatgggcaagtacgcactgctgctgcaggagctggcacgggcctgcgggggccccacgcaggagctcagtgcgctgcgggaggcccagagccttgtgcacttccagctgcggcacggaaacgacctgctggccatggacgccatccagggctgtgatgttaacctcaaggaacaggggcagctggtgcgacaggatgagtttgtggtgcgcactgggcgccacaagtccgtgcgccgcatcttcctttttgaggagctgctgctcttcagcaagcctcgccatgggcccacaggggttgacacatttgcctacaagcgctccttcaagatggcagaccttggtctcactgagtgctgtgggaacagcaacctgcgcttcgagatctggttccgccgccgcaaggccagggacacctttgtgctgcaggcctccagcctggctatcaagcaggcctggacagctgacatctcccacctgctttggaggcaggccgtccacaacaaggaggtgcgcatggctgagatggtgtccatgggtgtggggaacaaggccttccgagacattgctcccagcgaggaagccatcaacgaccgcaccgtcaactatgtcctgaagtgccgagaagttcgctctcgggcgtccattgccgtagccccgtttgaccatgacagcctctacctgggggcctcgaactcccttcctggagaccctgcctcttgctctgttctggggtccctcaacctgcacctgtacagagacccagctcttctgggtctccgctgtcccctgtatcccagcttcccagaggaagcagcactggaggctgaggcagagctgggcggccagccctctttgactgctgaggactcagagatctcgtcccaatgcccatcagccagtggctccagtggctctgacagcagctgtgtgtcagggcaggccctgggtaggggcctggaggacttaccctgtgtctgagcccgggactggacgagcagtagatccagcagcctgcagctccaaggaacattgcctctctggatctgctgtgaccagggtgtggctgacacctgggctacctccaacctacatgtgcaacgctgttgactaccctttctgatgtgtgtggctgacatggctgaagcaagaggtcccagaggtgaccctgagcccagactacaggacggcaatggacaaggctgacgagctatatgaccgggtggatggattgctgcaccaactgaccctgcagagcaaccagcgaatacaggccctagagttggtccaaacactggaggcccgggaaagcggactgcaccagattgaagtgtggctgcagcaggtgggctggccagcactggaggaggctggggagccctcgctggacatgctgctccaggcccaaggctcttttcaggagctgtaccaggttgcccaggagcaggtcaggcaaggggagaagtttctgcagccgctgactggctgggaggcggctgaactggacccccctggggcacgc

SEQ ID NO: 423846 - DNA, 462 bp, Homo sapiens
ctcagagatctcgtcccaatgcccatcagccagtggctccagtggctctgacagcagctgtgtgtcagggcaggccctgggtaggggcctggaggacttaccctgtgtgagtgccatttgccctatacccaccagcccttccccagcccaagctgagcctgtgactgtgaccagcccctccccagcccaggctaggcctttactttgggtagagcttggggtgggtgggccagagccattccccagacacctcctgggtccagagtcagggaagcaggcattcatgcctggcctggccctgcaggtctgagcccgggactggacgagcagtagatccagcagcctgcagctccaaggaacattgcctctctggatctgctgtgaccagggtgtggctgacacctgggctacctccaacctacatgtgcaacgctgttgactaccctttctgatgtgtgtggc

SEQ ID NO: 423847 - DNA, 549 bp, Homo sapiens
agcagctgcttaaattcaccagcgcaggagtcctcttcttccaatagaacagaatcctttgtaaattagatttttatattgaaaaagaatatttacacatggttttaggaattccaactgtacaaatgaacatggactcaaagtgtttttatctaatcccaaacctctaactccccagacccctgtttcctacccagaagggaccctcagtgagtgacataatcttccagaaagatgctatacttataaaagcatcaatgcagacctatgctcatcttgctctttttaaaaaatttaatactacattttggagattgtcccgtttccattgacataagctctacctcattcttgtaatggctacattgtactccattatacaaatgtctccgtttctcagcttcatctccctctcccaggaggcactttgccatcttgtatctgctaagatgtccacaccgtcttgtgatagagtctgtgctaagcagagtggtttgtaggctaaaagagcacactccagacccaaaactgcctgcattccagtcctgg

SEQ ID NO: 423848 - DNA, 418 bp, Homo sapiens
cagtaggcaagtctgcagggaagtgatggtcatgatagtggggtctcaagagagaaagagccttgtccttgatctccagacaccagggcaagggctacatgggtggaacaagagggtgtccaacgcagtttgggagaaccagtgcctgaggaccgggtgatggggtgtagctgctgggttcacagttccagggtcttggctgacctccattcctggcccccattctctcagcaatctatgaggcatgtgtcagtcctgggactggttttaccatgcaggtagcttctggaggtgtggtggtagaaagagattctggaaggcagggcagggagaggacacttgtctgtcggtggcacccatggaaatgttgctgaacactgctgagatggagggggagctgggcaaatcagtttttatt

SEQ ID NO: 423849 - DNA, 877 bp, Homo sapiens
agcggatcgaagcgcagggtggcagccccggagccggggaatgtgaagagctctcggctgtgcagtggtaccgtcggggcctgggccgcgaaggatcttctgccacagctgcaacatgggcggcaagaacaagaaacacaaggctccagcggccgcggtggtccgggccgccgtgtctgcttccagagccaaatctgccgaggctggaattgccggggaggcccaaagcaagaagccagtgtccaggccggccaccgctgccgctgccgctgccggctccagggagccccgtgtcaagcaaggtccaaaaatttatagttttaattctacaaatgattctagtggtcctgcaaatctggataaatctattttgaaagtggtaattaataacaaactagagcaaagaattattggagtgatcaatgagcataaaaagcaaaataatgacaaaggaatgatttctggaagacttactgccaaaaaattgcaggatttatacatggctttacaagcattttcatttaagacaaaggacattgaagatgccatgaccaatacactcttatatggaggtgaccttcattctgccttggattggctctgtttaaacctttcagatgatgcacttcctgaaggattcagtcaggaatttgaagagcagcaacctaaaagtaggcctaaatttcagtctcctcaaatacaagccactatttcacctccattgcaacctaaaacaaaaacatatgaagaggaccctaagagtaagaattgttcccttcagccgaaacggaggatcaatggggtacttgcagagtggtttgattgtgaccccatggaaaagatgaaattacgttgacaagaatggccagaagatcct

SEQ ID NO: 423850 - DNA, 610 bp, Homo sapiens
agttgccttattttgggaagagttaccagatttaataaggaaattgacaggtttgcatgcctagctagcagaaataatttgtatttttcccattgtgttttccattaaaagcaagatgtgctaaggcagattgtaatataggcttgccttgatttacttaaacacattcacactgccctggattgactttgtccattttttcaactcctcttaacaggcccctgtaaagatagctgtcattttcaagcagctgagagttctcattgattcagttttaagaaaaaagcttgaaaatccaaagatgtcccttgaaaatgacaagattctgcagatcattacggaattgataaaaacagagaataactgaaactgaaattcatggtcaactgctttaaaaattaagatgaagatacagtcatgaaattatctgaaaatgggtcatcacattaagtatttcattacttaaaatgttggtactagccattaacttaaaggtggtgggaaaaaagcacatactttaaacatgtataattttctagttcctttttaatgatgattattctgaatgtatttgccactacatttacaataaattctttggtattatgca

SEQ ID NO: 423851 - DNA, 1159 bp, Homo sapiens
tgttccaacttcaaacaagtgacctctctttttcccctccctcccacttttttgttgttgtttctaatgccactgtaaccattgcaactattgaaagcgacagcattctctgagtatctaacgtaaatgtagaatttcagttttgcagccctgataattgtaacttcctaaagagtggttgtgaggttcttaggaagtcacaatttcagagttaactattaagtagaagcagttgttaacaaaacccctttagcaaataatgcagcctctgttgctctgtttgtcaaattaattggtatttgattcctttgttgtgtagagaggtctgtcacttccgcattgacacctctccaagagcgcttccctgttagaattttttgtttcctttggactaaacatggagaaactggtaacagttctttcttccttgctcatactttggaaattctgccatactctgaagaacactgaagagtcagtagagccttcagtatattgcagccaagtgaaaaagttgagaaacttactttcttcaaggaatttttatagaataaaatttataattccttataaagaagtaacatttcacactcatattatctctttggggtttagcctatacaaatgttatctgttttcaaaatgttaacttttgtcaaactaggtatggcataacctacagcaataaaatctatgtagggcaaaaaatattttataggtgtctctagttttattactggtgttaattctgtattctaatgtaaaaatttttagtgacatatacctcttatttacatgtgcataccttggaaaattagacaatgttgcatttattcgtggcttttttttttccttccactcagatgacaagattctgcagatcattacggaattgataaaaacagagaataactgaaactgaaattcatggtcaactgctttaaaaattaagatgaagatacagtcatgaaattatctgaaaatgggtcatcacattaagtatttcattacttaaaatgttggtactagccattaacttaaaggtggtgggaaaaaagcacatactttaaacatgtataattttctagttcctttttaatgatgattattctgaatgtatttgccactacatttacaataaattctttggtattatgca

SEQ ID NO: 423852 - DNA, 430 bp, Homo sapiens
aaatcagaatggagcacatgtaacagttcaaagagtataaatattaggtttctataacatttttacttcttacaaataactaattggtttgctagacttttctatcattgcttgttttagttatataacaaaccactccaaaatgtagtggcttaaaccaactattatttctcatgattctgcagtctgtgctgggctcagcaaggtgtttcttcggttccaggaagtatcttccaaggctggaacatccaaagtggcttcttcactcccatgactaagctggagactagccaggcatccctctgtttacatgttttttccacatgactagcttgggtttcctcacatatagtggtcttagggtggctggacttcttattgcatctggcttccaagaatattttaagatgataagccaaaatgtacaaat

SEQ ID NO: 423853 - DNA, 403 bp, Homo sapiens
tttgccagacttttaatttgtagtatatttagtatgcaatgtttactaaattatttaaatatgaagcataatttgagaactattggtccacaataatggattttttaagcctgtgtttaacttagttgtaagagtcaaatccagctttttccaattttgacttaagtcaattatctacatattctctcctaaaacatttctttaggtaccatgaaagcagtcagatgagttctttggtggagacgtttgtcagtaaagccagtgctttgcagcgccagggaagagctgggcgggtcagagatggcttctgtttccgaatgtacacaagagaaagctttggaggaattatgccttcatattatggtaatctcaagggaactcggatggattttgtccttcgccc

SEQ ID NO: 423854 - DNA, 4750 bp, Homo sapiens
agcggatcgaagcgcagggtggcagccccggagccggggaatgtgaagagctctcggctgtgcagtggtaccgtcggggcctgggccgcgaaggatcttctgccacagctgcaacatgggcggcaagaacaagaaacacaaggctccagcggccgcggtggtccgggccgccgtgtctgcttccagagccaaatctgccgaggctggaattgccggggaggcccaaagcaagaagccagtgtccaggccggccaccgctgccgctgccgctgccggctccagggagccccgtgtcaagcaaggtccaaaaatttatagttttaattctacaaatgattctagtggtcctgcaaatctggataaatctattttgaaagtggtaattaataacaaactagagcaaagaattattggagtgatcaatgagcataaaaagcaaaataatgacaaaggaatgatttctggaagacttactgccaaaaaattgcaggatttatacatggctttacaagcattttcatttaagacaaaggacattgaagatgccatgaccaatacactcttatatggaggtgaccttcattctgccttggattggctctgtttaaacctttcagatgatgcacttcctgaaggattcagtcaggaatttgaagagcagcaacctaaaagtaggcctaaatttcagtctcctcaaatacaagccactatttcacctccattgcaacctaaaacaaaaacatatgaagaggaccctaagagtaagccaaaaaaggaagaaaaaaatatggaagtaaatatgaaagagtggattttacgatatgctgaacaacaaaatgaagaagaaaagaatgagaattctaaaagtttagaagaggaggaaaaatttgaccctaatgaaaggtacttacatcttgcagcaaaactgctggatgcaaaagaacaagcagctacctttaaactagaaaaaaacaagcaaggccaaaaagaggctcaggaaaaaataaggaaatttcaaagagaaatggaaactttagaagaccatccagtatttaacccagccatgaagatttcacatcaacaaaatgaaaggaaaaagcctcctgtagccacagaaggagaaagtgcattgaattttaatttatttgaaaaatctgcagctgctactgaagaagagaaagataaaaagaaagaacctcatgatgtaagaaattttgactatactgctcgaagttggactggaaaatctcccaaacaatttctgattgattgggtcaggaagaatcttcccaagagtccaaatccttcctttgaaaaagttccagtaggtagatactggaaatgtaggtatgttttttgttgttgttgtttttaattaactgaatgaactttagaaaaatttaaggtggaaatctttttgttccctgtgaggtaagcagacatttaggaagctctcaattctacatctcaggtttattgtctgatagattatcattatctaataatgccttccatggaaatatttaaataattaacaaacttgagtttaatgttaatggaattctgagttttttttatctgactttgtcaactttatttttttaaaatgcgtttgcttctttgtagggttagggtaatcaagtctgaagatgatgtcctgggtagtatgccctacaatcttaacagaagatgggcatgcaagctcagcacctggggagctactttagccctttaccgtttagttaaagggcagtcagttcatcagttacttcctcccacttaccgagatgtttggctggagtggagtgatgcagaaaagaaaagggaagaattaaataaaatggaaaccaataaaccacgtgatctttttattgccaaacttctgaataaactgaaacagcagcaacagcagcaacaacagcattctgaaaataagagagaaaactctgaagatcccgaggaatcttgggaaaatttagtttcggatgaggatttttctgcactgtccttggaatcagcaaatgtggaagatttggaacctgttagaaacctctttagaaagttgcaaagcacacctaagtatcagaaacttctaaaggaaagacaacagctacctgtatttaaacatcgggactcaattgttgaaactcttaaaaggcatcgggtagtggttgtggcaggtgaaacagggagtggtaaaagtactcaggtaccacattttctattggaagatttgcttctaaatgagtgggaagcaagtaaatgtaacattgtctgtacccaaccccgaagaatctcagcagttagtttagccaacagagtatgtgatgaattgggctgtgaaaatggacctggaggaaggaattccttgtgtggatatcagatccggatggaatctcgagcttgtgaatctaccaggttactctattgtacaacaggggttttgctaaggaaacttcaagaagatggtcttctaagtaatgtgtctcatgttattgtagatgaggttcatgaaagaagtgtccagtcagacttcctactaattatcttgaaggaaattttacagaaacgttctgatctacacttgattctaatgagtgccactgtggacagcgaaaaattttctacatatttcacacactgccccattctcagaatttcaggaagaagttatcctgttgaggtttttcatcttgaagatataatagaagaaacaggctttgtactggaaaaagactcagaatattgtcagaaatttctggaagaggaagaagaagtaaccattaatgttacaagcaaagcagggggaataaaaaaatatcaggaatacatcccagttcagactggagcacatgctgatttaaatccattttaccaaaagtacagcagccgcactcagcatgctattctatacatgaatcctcataaaatcaacctggatctcattttggaacttcttgcatacttagataaaagtccccaattcagaaatattgaaggagcagtattgatctttttaccaggacttgctcatattcagcagttgtatgatcttctatcaaatgatagaagattttattctgaacgatataaagtgatagctctgcattctattctttcaacccaagatcaagctgcagcattcacacttccccctccaggagtcaggaagattgttttagcaaccaatattgcagagacgggtatcactattcctgatgttgtatttgtaattgatactggaagaacaaaagaaaataagtaccatgaaagcagtcagatgagttctttggtggagacgtttgtcagtaaagccagtgctttgcagcgccagggaagagctgggcgggtcagagatggcttctgtttccgaatgtacacaagagaaagatttgaaggctttatggattattctgttcctgaaatcttacgtgtacctttggaggaattatgccttcatattatgaaatgtaatcttggttctcctgaagatttcctctccaaagccttagatcctcctcagctccaagtgatcagcaatgcaatgaatttgctccgaaaaattggagcttgtgaattaaatgagcctaaactgactccgttgggccaacaccttgcagctttacctgtgaatgtcaagattggcaagatgcttatttttggtgccatatttggctgccttgacccagtggcaacactagctgcagttatgacagagaagtctccttttaccacaccaattggtcgaaaagatgaagcagatcttgcaaaatcagctttggccatggcggattcagaccacctgacgatctacaatgcatatctaggatggaagaaagcacgacaagaaggaggttatcgttctgaaatcacatactgccggaggaactttcttaatagaacatcactgttaaccctagaggatgtaaagcaggagttaataaagttggttaaggcagcaggattttcatcttccacaacttctaccagctgggaaggaaacagagcctcacagaccctctcattccaagaaattgcccttcttaaagctgtactggtggctggactgtatgacaatgtggggaagataatctatacaaagtcagtggatgttacagaaaaattggcttgcattgtggagacggcccaaggcaaagcacaagtacacccatcctcagtaaatcgagatttgcaaactcatggatggctcttataccaggagaagataaggtatgccagagtgtatttgagagaaactaccctaataaccccttttccagttttactttttggtggtgatatagaagttcagcaccgagaacgtcttctttctattgatggctggatctattttcaggcccctgtaaagatagctgtcattttcaagcagctgagagttctcattgattcagttttaagaaaaaagcttgaaaatccaaagatgtcccttgaaaatgacaagattctgcagatcattacggaattgataaaaacagagaataactgaaactgaaattcatggtcaactgctttaaaaattaagatgaagatacagtcatgaaattatctgaaaatgggtcatcacattaagtatttcattacttaaaatgttggtactagccattaacttaaaggtggtgggaaaaaagcacatactttaaacatgtataattttctagttcctttttaatgatgattattctgaatgtatttgccactacatttacaataaattctttggtattatgca

SEQ ID NO: 423855 - DNA, 4676 bp, Homo sapiens
agcggatcgaagcgcagggtggcagccccggagccggggaatgtgaagagctctcggctgtgcagtggtaccgtcggggcctgggccgcgaaggatcttctgccacagctgcaacatgggcggcaagaacaagaaacacaaggctccagcggccgcggtggtccgggccgccgtgtctgcttccagagccaaatctgccgaggctggaattgccggggaggcccaaagcaagaagccagtgtccaggccggccaccgctgccgctgccgctgccggctccagggagccccgtgtcaagcaaggtggtaattaataacaaactagagcaaagaattattggagtgatcaatgagcataaaaagcaaaataatgacaaaggaatgatttctggaagacttactgccaaaaaattgcaggatttatacatggctttacaagcattttcatttaagacaaaggacattgaagatgccatgaccaatacactcttatatggaggtgaccttcattctgccttggattggctctgtttaaacctttcagatgatgcacttcctgaaggattcagtcaggaatttgaagagcagcaacctaaaagtaggcctaaatttcagtctcctcaaatacaagccactatttcacctccattgcaacctaaaacaaaaacatatgaagaggaccctaagagtaagccaaaaaaggaagaaaaaaatatggaagtaaatatgaaagagtggattttacgatatgctgaacaacaaaatgaagaagaaaagaatgagaattctaaaagtttagaagaggaggaaaaatttgaccctaatgaaaggtacttacatcttgcagcaaaactgctggatgcaaaagaacaagcagctacctttaaactagaaaaaaacaagcaaggccaaaaagaggctcaggaaaaaataaggaaatttcaaagagaaatggaaactttagaagaccatccagtatttaacccagccatgaagatttcacatcaacaaaatgaaaggaaaaagcctcctgtagccacagaaggagaaagtgcattgaattttaatttatttgaaaaatctgcagctgctactgaagaagagaaagataaaaagaaagaacctcatgatgtaagaaattttgactatactgctcgaagttggactggaaaatctcccaaacaatttctgattgattgggtcaggaagaatcttcccaagagtccaaatccttcctttgaaaaagttccagtaggtagatactggaaatgtaggtatgttttttgttgttgttgtttttaattaactgaatgaactttagaaaaatttaaggtggaaatctttttgttccctgtgaggtaagcagacatttaggaagctctcaattctacatctcaggtttattgtctgatagattatcattatctaataatgccttccatggaaatatttaaataattaacaaacttgagtttaatgttaatggaattctgagttttttttatctgactttgtcaactttatttttttaaaatgcgtttgcttctttgtagggttagggtaatcaagtctgaagatgatgtcctgggtagtatgccctacaatcttaacagaagatgggcatgcaagctcagcacctggggagctactttagccctttaccgtttagttaaagggcagtcagttcatcagttacttcctcccacttaccgagatgtttggctggagtggagtgatgcagaaaagaaaagggaagaattaaataaaatggaaaccaataaaccacgtgatctttttattgccaaacttctgaataaactgaaacagcagcaacagcagcaacaacagcattctgaaaataagagagaaaactctgaagatcccgaggaatcttgggaaaatttagtttcggatgaggatttttctgcactgtccttggaatcagcaaatgtggaagatttggaacctgttagaaacctctttagaaagttgcaaagcacacctaagtatcagaaacttctaaaggaaagacaacagctacctgtatttaaacatcgggactcaattgttgaaactcttaaaaggcatcgggtagtggttgtggcaggtgaaacagggagtggtaaaagtactcaggtaccacattttctattggaagatttgcttctaaatgagtgggaagcaagtaaatgtaacattgtctgtacccaaccccgaagaatctcagcagttagtttagccaacagagtatgtgatgaattgggctgtgaaaatggacctggaggaaggaattccttgtgtggatatcagatccggatggaatctcgagcttgtgaatctaccaggttactctattgtacaacaggggttttgctaaggaaacttcaagaagatggtcttctaagtaatgtgtctcatgttattgtagatgaggttcatgaaagaagtgtccagtcagacttcctactaattatcttgaaggaaattttacagaaacgttctgatctacacttgattctaatgagtgccactgtggacagcgaaaaattttctacatatttcacacactgccccattctcagaatttcaggaagaagttatcctgttgaggtttttcatcttgaagatataatagaagaaacaggctttgtactggaaaaagactcagaatattgtcagaaatttctggaagaggaagaagaagtaaccattaatgttacaagcaaagcagggggaataaaaaaatatcaggaatacatcccagttcagactggagcacatgctgatttaaatccattttaccaaaagtacagcagccgcactcagcatgctattctatacatgaatcctcataaaatcaacctggatctcattttggaacttcttgcatacttagataaaagtccccaattcagaaatattgaaggagcagtattgatctttttaccaggacttgctcatattcagcagttgtatgatcttctatcaaatgatagaagattttattctgaacgatataaagtgatagctctgcattctattctttcaacccaagatcaagctgcagcattcacacttccccctccaggagtcaggaagattgttttagcaaccaatattgcagagacgggtatcactattcctgatgttgtatttgtaattgatactggaagaacaaaagaaaataagtaccatgaaagcagtcagatgagttctttggtggagacgtttgtcagtaaagccagtgctttgcagcgccagggaagagctgggcgggtcagagatggcttctgtttccgaatgtacacaagagaaagatttgaaggctttatggattattctgttcctgaaatcttacgtgtacctttggaggaattatgccttcatattatgaaatgtaatcttggttctcctgaagatttcctctccaaagccttagatcctcctcagctccaagtgatcagcaatgcaatgaatttgctccgaaaaattggagcttgtgaattaaatgagcctaaactgactccgttgggccaacaccttgcagctttacctgtgaatgtcaagattggcaagatgcttatttttggtgccatatttggctgccttgacccagtggcaacactagctgcagttatgacagagaagtctccttttaccacaccaattggtcgaaaagatgaagcagatcttgcaaaatcagctttggccatggcggattcagaccacctgacgatctacaatgcatatctaggatggaagaaagcacgacaagaaggaggttatcgttctgaaatcacatactgccggaggaactttcttaatagaacatcactgttaaccctagaggatgtaaagcaggagttaataaagttggttaaggcagcaggattttcatcttccacaacttctaccagctgggaaggaaacagagcctcacagaccctctcattccaagaaattgcccttcttaaagctgtactggtggctggactgtatgacaatgtggggaagataatctatacaaagtcagtggatgttacagaaaaattggcttgcattgtggagacggcccaaggcaaagcacaagtacacccatcctcagtaaatcgagatttgcaaactcatggatggctcttataccaggagaagataaggtatgccagagtgtatttgagagaaactaccctaataaccccttttccagttttactttttggtggtgatatagaagttcagcaccgagaacgtcttctttctattgatggctggatctattttcaggcccctgtaaagatagctgtcattttcaagcagctgagagttctcattgattcagttttaagaaaaaagcttgaaaatccaaagatgtcccttgaaaatgacaagattctgcagatcattacggaattgataaaaacagagaataactgaaactgaaattcatggtcaactgctttaaaaattaagatgaagatacagtcatgaaattatctgaaaatgggtcatcacattaagtatttcattacttaaaatgttggtactagccattaacttaaaggtggtgggaaaaaagcacatactttaaacatgtataattttctagttcctttttaatgatgattattctgaatgtatttgccactacatttacaataaattctttggtattatgca

SEQ ID NO: 423856 - DNA, 3956 bp, Homo sapiens
cccttataccaaacagacacaaaagaaggaaaaaagaaaacaataataataaagaaaggacaaataataaaagttcagaagaggaggaaaaatttgaccctaatgaaaggtacttacatcttgcagcaaaactgctggatgcaaaagaacaagcagctacctttaaactagaaaaaaacaagcaaggccaaaaagaggctcaggaaaaaataaggaaatttcaaagagaaatggaaactttagaagaccatccagtatttaacccagccatgaagatttcacatcaacaaaatgaaaggaaaaagcctcctgtagccacagaaggagaaagtgcattgaattttaatttatttgaaaaatctgcagctgctactgaagaagagaaagataaaaagaaagaacctcatgatgtaagaaattttgactatactgctcgaagttggactggaaaatctcccaaacaatttctgattgattgggtcaggaagaatcttcccaagagtccaaatccttcctttgaaaaagttccagtaggtagatactggaaatgtaggtatgttttttgttgttgttgtttttaattaactgaatgaactttagaaaaatttaaggtggaaatctttttgttccctgtgaggtaagcagacatttaggaagctctcaattctacatctcaggtttattgtctgatagattatcattatctaataatgccttccatggaaatatttaaataattaacaaacttgagtttaatgttaatggaattctgagttttttttatctgactttgtcaactttatttttttaaaatgcgtttgcttctttgtagggttagggtaatcaagtctgaagatgatgtcctgggtagtatgccctacaatcttaacagaagatgggcatgcaagctcagcacctggggagctactttagccctttaccgtttagttaaagggcagtcagttcatcagttacttcctcccacttaccgagatgtttggctggagtggagtgatgcagaaaagaaaagggaagaattaaataaaatggaaaccaataaaccacgtgatctttttattgccaaacttctgaataaactgaaacagcagcaacagcagcaacaacagcattctgaaaataagagagaaaactctgaagatcccgaggaatcttgggaaaatttagtttcggatgaggatttttctgcactgtccttggaatcagcaaatgtggaagatttggaacctgttagaaacctctttagaaagttgcaaagcacacctaagtatcagaaacttctaaaggaaagacaacagctacctgtatttaaacatcgggactcaattgttgaaactcttaaaaggcatcgggtagtggttgtggcaggtgaaacagggagtggtaaaagtactcaggtaccacattttctattggaagatttgcttctaaatgagtgggaagcaagtaaatgtaacattgtctgtacccaaccccgaagaatctcagcagttagtttagccaacagagtatgtgatgaattgggctgtgaaaatggacctggaggaaggaattccttgtgtggatatcagatccggatggaatctcgagcttgtgaatctaccaggttactctattgtacaacaggggttttgctaaggaaacttcaagaagatggtcttctaagtaatgtgtctcatgttattgtagatgaggttcatgaaagaagtgtccagtcagacttcctactaattatcttgaaggaaattttacagaaacgttctgatctacacttgattctaatgagtgccactgtggacagcgaaaaattttctacatatttcacacactgccccattctcagaatttcaggaagaagttatcctgttgaggtttttcatcttgaagatataatagaagaaacaggctttgtactggaaaaagactcagaatattgtcagaaatttctggaagaggaagaagaagtaaccattaatgttacaagcaaagcagggggaataaaaaaatatcaggaatacatcccagttcagactggagcacatgctgatttaaatccattttaccaaaagtacagcagccgcactcagcatgctattctatacatgaatcctcataaaatcaacctggatctcattttggaacttcttgcatacttagataaaagtccccaattcagaaatattgaaggagcagtattgatctttttaccaggacttgctcatattcagcagttgtatgatcttctatcaaatgatagaagattttattctgaacgatataaagtgatagctctgcattctattctttcaacccaagatcaagctgcagcattcacacttccccctccaggagtcaggaagattgttttagcaaccaatattgcagagacgggtatcactattcctgatgttgtatttgtaattgatactggaagaacaaaagaaaataagtaccatgaaagcagtcagatgagttctttggtggagacgtttgtcagtaaagccagtgctttgcagcgccagggaagagctgggcgggtcagagatggcttctgtttccgaatgtacacaagagaaagatttgaaggctttatggattattctgttcctgaaatcttacgtgtacctttggaggaattatgccttcatattatgaaatgtaatcttggttctcctgaagatttcctctccaaagccttagatcctcctcagctccaagtgatcagcaatgcaatgaatttgctccgaaaaattggagcttgtgaattaaatgagcctaaactgactccgttgggccaacaccttgcagctttacctgtgaatgtcaagattggcaagatgcttatttttggtgccatatttggctgccttgacccagtggcaacactagctgcagttatgacagagaagtctccttttaccacaccaattggtcgaaaagatgaagcagatcttgcaaaatcagctttggccatggcggattcagaccacctgacgatctacaatgcatatctaggatggaagaaagcacgacaagaaggaggttatcgttctgaaatcacatactgccggaggaactttcttaatagaacatcactgttaaccctagaggatgtaaagcaggagttaataaagttggttaaggcagcaggattttcatcttccacaacttctaccagctgggaaggaaacagagcctcacagaccctctcattccaagaaattgcccttcttaaagctgtactggtggctggactgtatgacaatgtggggaagataatctatacaaagtcagtggatgttacagaaaaattggcttgcattgtggagacggcccaaggcaaagcacaagtacacccatcctcagtaaatcgagatttgcaaactcatggatggctcttataccaggagaagataaggtatgccagagtgtatttgagagaaactaccctaataaccccttttccagttttactttttggtggtgatatagaagttcagcaccgagaacgtcttctttctattgatggctggatctattttcaggcccctgtaaagatagctgtcattttcaagcagctgagagttctcattgattcagttttaagaaaaaagcttgaaaatccaaagatgtcccttgaaaatgacaagattctgcagatcattacggaattgataaaaacagagaataactgaaactgaaattcatggtcaactgctttaaaaattaagatgaagatacagtcatgaaattatctgaaaatgggtcatcacattaagtatttcattacttaaaatgttggtactagccattaacttaaaggtggtgggaaaaaagcacatactttaaacatgtataattttctagttcctttttaatgatgattattctgaatgtatttgccactacatttacaataaattctttggtattatgca

SEQ ID NO: 423857 - DNA, 3087 bp, Homo sapiens
agcggatcgaagcgcagggtggcagccccggagccggggaatgtgaagagctctcggctgtgcagtggtaccgtcggggcctgggccgcgaaggatcttctgccacagctgcaacatgggcggcaagaacaagaaacacaaggctccagcggccgcggtggtccgggccgccgtgtctgcttccagagccaaatctgccgaggctggaattgccggggaggcccaaagcaagaagccagtgtccaggccggccaccgctgccgctgccgctgccggctccagggagccccgtgtcaagcaaggtccaaaaatttatagttttaattctacaaatgattctagtggtcctgcaaatctggataaatctattttgaaagtggtaattaataacaaactagagcaaagaattattggagtgatcaatgagcataaaaagcaaaataatgacaaaggaatgatttctggaagacttactgccaaaaaattgcaggatttatacatggctttacaagcattttcatttaagacaaaggacattgaagatgccatgaccaatacactcttatatggaggtgaccttcattctgccttggattggctctgtttaaacctttcagatgatgcacttcctgaaggattcagtcaggaatttgaagagcagcaacctaaaagtaggcctaaatttcagtctcctcaaatacaagccactatttcacctccattgcaacctaaaacaaaaacatatgaagaggaccctaagagtaagccaaaaaaggaagaaaaaaatatggaagtaaatatgaaagagtggattttacgatatgctgaacaacaaaatgaagaagaaaagaatgagaattctaaaagtttagaagaggaggaaaaatttgaccctaatgaaaggtacttacatcttgcagcaaaactgctggatgcaaaagaacaagcagctacctttaaactagaaaaaaacaagcaaggccaaaaagaggctcaggaaaaaataaggaaatttcaaagagaaatggaaactttagaagaccatccagtatttaacccagccatgaagatttcacatcaacaaaatgaaaggaaaaagcctcctgtagccacagaaggagaaagtgcattgaattttaatttatttgaaaaatctgcagctgctactgaagaagagaaagataaaaagaaagaacctcatgatgtaagaaattttgactatactgctcgaagttggactggaaaatctcccaaacaatttctgattgattgggtcaggaagaatcttcccaagagtccaaatccttcctttgaaaaagttccagtaggtagatactggaaatgtaggtatgttttttgttgttgttgtttttaattaactgaatgaactttagaaaaatttaaggtggaaatctttttgttccctgtgaggtaagcagacatttaggaagctctcaattctacatctcaggtttattgtctgatagattatcattatctaataatgccttccatggaaatatttaaataattaacaaacttgagtttaatgttaatggaattctgagttttttttatctgactttgtcaactttatttttttaaaatgcgtttgcttctttgtagggttagggtaatcaagtctgaagatgatgtcctgggtagtatgccctacaatcttaacagaagatgggcatgcaagctcagcacctggggagctactttagccctttaccgtttagttaaagggcagtcagttcatcagttacttcctcccacttaccgagatgtttggctggagtggagtgatgcagaaaagaaaagggaagaattaaataaaatggaaaccaataaaccacgtgatctttttattgccaaacttctgaataaactgaaacagcagcaacagcagcaacaacagcattctgaaaataagagagaaaactctgaagatcccgaggaatcttgggaaaatttagtttcggatgaggatttttctgcactgtccttggaatcagcaaatgtggaagatttggaacctgttagaaacctctttagaaagttgcaaagcacacctaagtatcagaaacttctaaaggaaagacaacagctacctgtatttaaacatcgggactcaattgttgaaactcttaaaaggcatcgggtagtggttgtggcaggtgaaacagggagtggtaaaagtactcaggtaccacattttctattggaagatttgcttctaaatgagtgggaagcaagtaaatgtaacattgtctgtacccaaccccgaagaatctcagcagttagtttagccaacagagtatgtgatgaattgggctgtgaaaatggacctggaggaagggtaagctgtcattcaactccacctcagtgaatgatggtgacattactcacctttgcttttgtgatccaaatggaatgtgtaccatatgtgagttttcactgctattggttgatcagtagcacatttcaggcacttttcacattttctttgatagatgtgatagtatgccactgtcctatgagaaggattatcagtagagttctgtcattaaaattctcatataaaagaaaaaatatattaactataataattgaatattcaaatatgttacacactaaattgaacagccaaagaatgtggacaaactcaaattctactaaaatatatctcaagtttttgcaaaccttttctgtggaatatattcctgaatgattttcattaattcttttcagtgagcagaagggaaaaacagtataaattaaaatgttagtattttccaaccccatatttaaaaaaaaaatgagaaaaatacttaaatatctattgtcatgcattttgccatgcaagtatatgcaaaactggccaaaccttaaccagagtgacggcaaagtataggaattagtttaattaattaaactagttagaaccaaatatgacaaattgcaagttcatgtaattctgattatttatactttgaattgttctttctggagatggcatattatatttttatctctaaactgggtaccccttcattaaaagttttctatttagcaaattgtctg

SEQ ID NO: 423858 - DNA, 335 bp, Homo sapiens
attaattgacattttatttatctagatggaagaaagcacgacaagaaggaggttatcgttctgaaatcacatactgccggaggaactttcttaatagaacatcactgttaaccctagaggtaattcttaatatggatctctcactcagagtcatgggtaactataataagttattctggaaaaaagaatgcctaggaaaatacttgtcacatagtaagggcttagtaaacatttgttgaattagtacatttgtgattgtacttctttcttccagcaagtaacttgtacgtattacacagtgatttaaaatagtatttaataatcataatatgttc

SEQ ID NO: 423859 - DNA, 338 bp, Homo sapiens
gacgtttgtcagtaaagccagtgctttgcagcgccagggaagagctgggcgggtcagagatggcttctgtttccgaatgtacacaagagaaagcatagcactggaaatgtaaaacacataaaccagtattgtgtgacatttctgataatatgtatttagtattactttatttttcagatttgaaggctttatggattattctgttcctgaaatcttacgtgtacctttggaggaattatgccttcatattatggtaatctcaagggaactcggatggattttgtccttcgcccctttctagaaaagaaaaaaaatgaacacctaaacttaccttatat

SEQ ID NO: 423860 - DNA, 455 bp, Homo sapiens
gtaaaaaatcttaaagttgcttgctatatgcaaataaattttgttattctttgcagtgtcttctaaagagaaactcttgctaagaactatgattttaactttcagatataaagtgatagctctgcattctattctttcaacccaagatcaagctgcagcattcacacttccccctccaggagtcaggaaggtaaaatttagtacagcaaatttatatgtgatccacctgagagtattttatgatggccgtataactttttatcatcaaagacagttgttaacattaagtgccttatagcgcattgccaactccaagtgttctgcaccttgccatcatcagaagtgaacccaatgttacaattcaagcatttgaatatttacattatgtgctatttaagggagaagacttcattgagggagtgctagttgaaaaacatagtatggatgttgcctgt

SEQ ID NO: 423861 - DNA, 811 bp, Homo sapiens
agggaatagaagaaaattaggtgctctaagtctaggcaaggtttacaaatgcttaacaaatatttgtgtgttttatgtatcatatgcctgtttattttcagcatagtttcttttattttaagatgcacttcctgaaggattcagtcaggaatttgaagagcagcaacctaaaagtaggcctaaatttcagtctcctcaaatacaagccactatttcacctccattgcaacctaaaacaaaaacatatgaagaggaccctaagagtaaggtaatttgagaattaagcatttaaagttgtataaaatcagaatggagcacatgtaacagttcaaagagtataaatattaggtttctataacatttttacttcttacaaataactaattggtttgctagacttttctatcattgcttgttttagttatataacaaaccactccaaaatgtagtggcttaaaccaactattatttctcatgattctgcagtctgtgctgggctcagcaaggtgtttcttcggttccaggaagtatcttccaaggctggaacatccaaagtggcttcttcactcccatgactaagctggagactagccaggcatccctctgtttacatgttttttccacatgactagcttgggtttcctcacatatagtggtcttagggtggctggacttcttattgcatctggcttccaagaatattttaagatgataagccaaaatgtacaaattcttatcaaactcctgctttattattcttgctaatgtcccattgactgaagtaagtcacatgaccaagcccagagtctgt

SEQ ID NO: 423862 - DNA, 505 bp, Homo sapiens
gacattttatttatctagatggaagaaagcacgacaagaaggaggttatcgttctgaaatcacatactgccggaggaactttcttaatagaacatcactgttaaccctagaggcccctgtaaagatagctgtcattttcaagcagctgagagttctcattgattcagttttaagaaaaaagcttgaaaatccaaagatgtcccttgaaaatgacaagattctgcagatcattacggaattgataaaaacagagaataactgaaactgaaattcatggtcaactgctttaaaaattaagatgaagatacagtcatgaaattatctgaaaatgggtcatcacattaagtatttcattacttaaaatgttggtactagccattaacttaaaggtggtgggaaaaaagcacatactttaaacatgtataattttctagttcctttttaatgatgattattctgaatgtatttgccactacatttacaataaattctttggtattatgca

SEQ ID NO: 423863 - DNA, 4471 bp, Homo sapiens
agcggatcgaagcgcagggtggcagccccggagccggggaatgtgaagagctctcggctgtgcagtggtaccgtcggggcctgggccgcgaaggatcttctgccacagctgcaacatgggcggcaagaacaagaaacacaaggctccagcggccgcggtggtccgggccgccgtgtctgcttccagagccaaatctgccgaggctggaattgccggggaggcccaaagcaagaagccagtgtccaggccggccaccgctgccgctgccgctgccggctccagggagccccgtgtcaagcaaggtccaaaaatttatagttttaattctacaaatgattctagtggtcctgcaaatctggataaatctattttgaaagtggtaattaataacaaactagagcaaagaattattggagtgatcaatgagcataaaaagcaaaataatgacaaaggaatgatttctggaagacttactgccaaaaaattgcaggatttatacatggctttacaagcattttcatttaagacaaaggacattgaagatgccatgaccaatacactcttatatggaggtgaccttcattctgccttggattggctctgtttaaacctttcagatgatgcacttcctgaaggattcagtcaggaatttgaagagcagcaacctaaaagtaggcctaaatttcagtctcctcaaatacaagccactatttcacctccattgcaacctaaaacaaaaacatatgaagaggaccctaagagtaagccaaaaaaggaagaaaaaaatatggaagtaaatatgaaagagtggattttacgatatgctgaacaacaaaatgaagaagaaaagaatgagaattctaaaagtttagaagaggaggaaaaatttgaccctaatgaaaggtacttacatcttgcagcaaaactgctggatgcaaaagaacaagcagctacctttaaactagaaaaaaacaagcaaggccaaaaagaggctcaggaaaaaataaggaaatttcaaagagaaatggaaactttagaagaccatccagtatttaacccagccatgaagatttcacatcaacaaaatgaaaggaaaaagcctcctgtagccacagaaggagaaagtgcattgaattttaatttatttgaaaaatctgcagctgctactgaagaagagaaagataaaaagaaagaacctcatgatgtaagaaattttgactatactgctcgaagttggactggaaaatctcccaaacaatttctgattgattgggtcaggaagaatcttcccaagagtccaaatccttcctttgaaaaagttccagtaggtagatactggaaatgtagggttagggtaatcaagtctgaagatgatgtcctgggtagtatgccctacaatcttaacagaagatgggcatgcaagctcagcacctggggagctactttagccctttaccgtttagttaaagggcagtcagttcatcagttacttcctcccacttaccgagatgtttggctggagtggagtgatgcagaaaagaaaagggaagaattaaataaaatggaaaccaataaaccacgtgatctttttattgccaaacttctgaataaactgaaacagcagcaacagcagcaacaacagcattctgaaaataagagagaaaactctgaagatcccgaggaatcttgggaaaatttagtttcggatgaggatttttctgcactgtccttggaatcagcaaatgtggaagatttggaacctgttagaaacctctttagaaagttgcaaagcacacctaagtatcagaaacttctaaaggaaagacaacagctacctgtatttaaacatcgggactcaattgttgaaactcttaaaaggcatcgggtagtggttgtggcaggtgaaacagggagtggtaaaagtactcaggtaccacattttctattggaagatttgcttctaaatgagtgggaagcaagtaaatgtaacattgtctgtacccaaccccgaagaatctcagcagttagtttagccaacagagtatgtgatgaattgggctgtgaaaatggacctggaggaaggaattccttgtgtggatatcagatccggatggaatctcgagcttgtgaatctaccaggttactctattgtacaacaggggttttgctaaggaaacttcaagaagatggtcttctaagtaatgtgtctcatgttattgtagatgaggttcatgaaagaagtgtccagtcagacttcctactaattatcttgaaggaaattttacagaaacgttctgatctacacttgattctaatgagtgccactgtggacagcgaaaaattttctacatatttcacacactgccccattctcagaatttcaggaagaagttatcctgttgaggtttttcatcttgaagatataatagaagaaacaggctttgtactggaaaaagactcagaatattgtcagaaatttctggaagaggaagaagaagtaaccattaatgttacaagcaaagcagggggaataaaaaaatatcaggaatacatcccagttcagactggagcacatgctgatttaaatccattttaccaaaagtacagcagccgcactcagcatgctattctatacatgaatcctcataaaatcaacctggatctcattttggaacttcttgcatacttagataaaagtccccaattcagaaatattgaaggagcagtattgatctttttaccaggacttgctcatattcagcagttgtatgatcttctatcaaatgatagaagattttattctgaacgatataaagtgatagctctgcattctattctttcaacccaagatcaagctgcagcattcacacttccccctccaggagtcaggaagattgttttagcaaccaatattgcagagacgggtatcactattcctgatgttgtatttgtaattgatactggaagaacaaaagaaaataagtaccatgaaagcagtcagatgagttctttggtggagacgtttgtcagtaaagccagtgctttgcagcgccagggaagagctgggcgggtcagagatggcttctgtttccgaatgtacacaagagaaagatttgaaggctttatggattattctgttcctgaaatcttacgtgtacctttggaggaattatgccttcatattatgaaatgtaatcttggttctcctgaagatttcctctccaaagccttagatcctcctcagctccaagtgatcagcaatgcaatgaatttgctccgaaaaattggagcttgtgaattaaatgagcctaaactgactccgttgggccaacaccttgcagctttacctgtgaatgtcaagattggcaagatgcttatttttggtgccatatttggctgccttgacccagtggcaacactagctgcagttatgacagagaagtctccttttaccacaccaattggtcgaaaagatgaagcagatcttgcaaaatcagctttggccatggcggattcagaccacctgacgatctacaatgcatatctaggatggaagaaagcacgacaagaaggaggttatcgttctgaaatcacatactgccggaggaactttcttaatagaacatcactgttaaccctagaggatgtaaagcaggagttaataaagttggttaaggcagcaggattttcatcttccacaacttctaccagctgggaaggaaacagagcctcacagaccctctcattccaagaaattgcccttcttaaagctgtactggtggctggactgtatgacaatgtggggaagataatctatacaaagtcagtggatgttacagaaaaattggcttgcattgtggagacggcccaaggcaaagcacaagtacacccatcctcagtaaatcgagatttgcaaactcatggatggctcttataccaggagaagataaggtatgccagagtgtatttgagagaaactaccctaataaccccttttccagttttactttttggtggtgatatagaagttcagcaccgagaacgtcttctttctattgatggctggatctattttcaggcccctgtaaagatagctgtcattttcaagcagctgagagttctcattgattcagttttaagaaaaaagcttgaaaatccaaagatgtcccttgaaaatgacaagattctgcagatcattacggaattgataaaaacagagaataactgaaactgaaattcatggtcaactgctttaaaaattaagatgaagatacagtcatgaaattatctgaaaatgggtcatcacattaagtatttcattacttaaaatgttggtactagccattaacttaaaggtggtgggaaaaaagcacatactttaaacatgtataattttctagttcctttttaatgatgattattctgaatgtatttgccactacatttacaataaattctttggtattatgca

SEQ ID NO: 423864 - DNA, 5009 bp, Homo sapiens
  misc_feature (5009)..(5009): n is a, c, g, or t
agcggatcgaagcgcagggtggcagccccggagccggggaatgtgaagagctctcggctgtgcagtggtaccgtcggggcctgggccgcgaaggatcttctgccacagctgcaacatgggcggcaagaacaagaaacacaaggctccagcggccgcggtggtccgggccgccgtgtctgcttccagagccaaatctgccgaggctggaattgccggggaggcccaaagcaagaagccagtgtccaggccggccaccgctgccgctgccgctgccggctccagggagccccgtgtcaagcaaggtccaaaaatttatagttttaattctacaaatgattctagtggtcctgcaaatctggataaatctattttgaaagtggtaattaataacaaactagagcaaagaattattggagtgatcaatgagcataaaaagcaaaataatgacaaaggaatgatttctggaagacttactgccaaaaaattgcaggatttatacatggctttacaagcattttcatttaagacaaaggacattgaagatgccatgaccaatacactcttatatggaggtgaccttcattctgccttggattggctctgtttaaacctttcagatgatgcacttcctgaaggattcagtcaggaatttgaagagcagcaacctaaaagtaggcctaaatttcagtctcctcaaatacaagccactatttcacctccattgcaacctaaaacaaaaacatatgaagaggaccctaagagtaagccaaaaaaggaagaaaaaaatatggaagtaaatatgaaagagtggattttacgatatgctgaacaacaaaatgaagaagaaaagaatgagaattctaaaagtttagaagaggaggaaaaatttgaccctaatgaaaggtacttacatcttgcagcaaaactgctggatgcaaaagaacaagcagctacctttaaactagaaaaaaacaagcaaggccaaaaagaggctcaggaaaaaataaggaaatttcaaagagaaatggaaactttagaagaccatccagtatttaacccagccatgaagatttcacatcaacaaaatgaaaggaaaaagcctcctgtagccacagaaggagaaagtgcattgaattttaatttatttgaaaaatctgcagctgctactgaagaagagaaagataaaaagaaagaacctcatgatgtaagaaattttgactatactgctcgaagttggactggaaaatctcccaaacaatttctgattgattgggtcaggaagaatcttcccaagagtccaaatccttcctttgaaaaagttccagtaggtagatactggaaatgtaggtatgttttttgttgttgttgtttttaattaactgaatgaactttagaaaaatttaaggtggaaatctttttgttccctgtgaggtaagcagacatttaggaagctctcaattctacatctcaggtttattgtctgatagattatcattatctaataatgccttccatggaaatatttaaataattaacaaacttgagtttaatgttaatggaattctgagttttttttatctgactttgtcaactttatttttttaaaatgcgtttgcttctttgtagggttagggtaatcaagtctgaagatgatgtcctgggtagtatgccctacaatcttaacagaagatgggcatgcaagctcagcacctggggagctactttagccctttaccgtttagttaaagggcagtcagttcatcagttacttcctcccacttaccgagatgtttggctggagtggagtgatgcagaaaagaaaagggaagaattaaataaaatggaaaccaataaaccacgtgatctttttattgccaaacttctgaataaactgaaacagcagcaacagcagcaacaacagcattctgaaaataagagagaaaactctgaagatcccgaggaatcttgggaaaatttagtttcggatgaggatttttctgcactgtccttggaatcagcaaatgtggaagatttggaacctgttagaaacctctttagaaagttgcaaagcacacctaagtatcagaaacttctaaaggaaagacaacagctacctgtatttaaacatcgggactcaattgttgaaactcttaaaaggcatcgggtagtggttgtggcaggtgaaacagggagtggtaaaagtactcaggtaccacattttctattggaagatttgcttctaaatgagtgggaagcaagtaaatgtaacattgtctgtacccaaccccgaagaatctcagcagttagtttagccaacagagtatgtgatgaattgggctgtgaaaatggacctggaggaaggaattccttgtgtggatatcagatccggatggaatctcgagcttgtgaatctaccaggttactctattgtacaacaggggttttgctaaggaaacttcaagaagatggtcttctaagtaatgtgtctcatgttattgtagatgaggttcatgaaagaagtgtccagtcagacttcctactaattatcttgaaggaaattttacagaaacgttctgatctacacttgattctaatgagtgccactgtggacagcgaaaaattttctacatatttcacacactgccccattctcagaatttcaggaagaagttatcctgttgaggtttttcatcttgaagatataatagaagaaacaggctttgtactggaaaaagactcagaatattgtcagaaatttctggaagaggaagaagaagtaaccattaatgttacaagcaaagcagggggaataaaaaaatatcaggaatacatcccagttcagactggagcacatgctgatttaaatccattttaccaaaagtacagcagccgcactcagcatgctattctatacatgaatcctcataaaatcaacctggatctcattttggaacttcttgcatacttagataaaagtccccaattcagaaatattgaaggagcagtattgatctttttaccaggacttgctcatattcagcagttgtatgatcttctatcaaatgatagaagattttattctgaacgatataaagtgatagctctgcattctattctttcaacccaagatcaagctgcagcattcacacttccccctccaggagtcaggaagattgttttagcaaccaatattgcagagacgggtatcactattcctgatgttgtatttgtaattgatactggaagaacaaaagaaaataagtaccatgaaagcagtcagatgagttctttggtggagacgtttgtcagtaaagccagtgctttgcagcgccagggaagagctgggcgggtcagagatggcttctgtttccgaatgtacacaagagaaagatttgaaggctttatggattattctgttcctgaaatcttacgtgtacctttggaggaattatgccttcatattatgaaatgtaatcttggttctcctgaagatttcctctccaaagccttagatcctcctcagctccaagtgatcagcaatgcaatgaatttgctccgaaaaattggagcttgtgaattaaatgagcctaaactgactccgttgggccaacaccttgcagctttacctgtgaatgtcaagattggcaagatgcttatttttggtgccatatttggctgccttgacccagtggcaacactagctgcagttatgacagagaagtctccttttaccacaccaattggtcgaaaagatgaagcagatcttgcaaaatcagctttggccatggcggattcagaccacctgacgatctacaatgcatatctaggatggaagaaagcacgacaagaaggaggttatcgttctgaaatcacatactgccggaggaactttcttaatagaacatcactgttaaccctagaggatgtaaagcaggagttaataaagttggttaaggcagcaggattttcatcttccacaacttctaccagctgggaaggaaacagagcctcacagaccctctcattccaagaaattgcccttcttaaagctgtactggtggctggactgtatgacaatgtggggaagataatctatacaaagtcagtggatgttacagaaaaattggcttgcattgtggagacggcccaaggcaaagcacaagtacacccatcctcagtaaatcgagatttgcaaactcatggatggctcttataccaggagaagataaggtatgccagagtgtatttgagagaaactaccctaataaccccttttccagttttactttttggtggtgatatagaagttcagcaccgagaacgtcttctttctattgatggctggatctattttcaggcccctgtaaagatagctgtcattttcaagcagctgagagttctcattgattcagttttaagaaaaaagcttgaaaatccaaagatgtcccttgaaaatgacaagattctgcagatcattacggaattgataaaaacagagaataactgaaactgaaattcatggtcaactgctttaaaaattaagatgaagatacagtcatgaaattatctgaaaatgggtcatcacattaagtatttcattacttaaaatgttggtactagccattaacttaaaggtggtgggaaaaaagcacatactttaaacatgtataattttctagttcctttttaatgatgattattctgaatgtatttgccactacatttacaataaattctttggtattatgcaaaaaaaaaataaagcaactcttcccttccccgccctgctctttcccccccccgcaccgtacgcgtgttgaggcatatcccccatacggccttttgccgagccaatagtaacctggggcaccttttttttttttgagagcgcactcttcacccctcgctccgcatgtcctaaccgttggggcgcacgaccacgctacatccatccgccatcctaagaaggcgccgctgctcctatccaacactgatcgagtgaccccagn

SEQ ID NO: 423865 - DNA, 2410 bp, Homo sapiens
gccggtggggaggggacaagtgtcagcaggattggcgtgtgggaaagctcttgagctgggcactggccccccggacgaggtggctgtgtgttcacacacacacacacacacacacacacacacacacacaggctctcgccccaggatagaagctgcccagaaactgctgcctggctttttttcttccgagcttgtcttatctcaaaccccttccagtcaaggaactagaatcagcaacgagagttggaagccttcccacagcttcccccagagcgaagaggctgtagtcatgtccccatcccccactggattccctacaaggagaggccttgggcccagatgagccagtacagactccagacagaggggcccttggggccctccaacctcaggtgatgagctgagaaagatgttcacgtctaagcgtccagtgtgcacccagcgctccatagacgcctttgtgaactgaaaagagactggcagagtcccgagaagatggggccctggctttccagggagtgcagcaagcagccggcctgcaggtgagcatggaggcccggccctcaccgcctcgaagccatgccccagatgccactgccacagcgggcgctcgctcctccctaggctgttttagtatttggatttgcattccatcccttgggagggagtcctcagggccactagtgatgagccaagaggagtgggggttgggggcgctcctttctgtttccgttaggccacagactcttcacctggctctgaagagccactcttacctcggtcccctcccagtggtcccaccttctccaccctgccctgccaagtcccctgcatgcccaccgctctccatcctccctcctctccctcttcctcccgtggagacagtatttctttctgtctgtccctttggcccagacccagcctgaccaacgatgagcatttcttaggctcagctcttgatacggaaacgagtgtcttcactccagccagcatcatggtcttcggtgcttcccgggcccggggtctgtcgggagggaagagaactgggcctgacctacctgaactgactggccctccgaggtgggtctgggacatcctagaggccctacatttgtccttggataggggaccggggggggcttggaatgttgcaaaaaaaaaagttacccaagggatgtcagttttttatccctctgcatgggttggattttccaaaatcataatttgcagaaggaaggccagcatttacgatgcaatatgtaattatatatagggtggccacactagggcggggtccttcccccctcacagctttggcccctttcagagattagaaactgggttagaggattgcagaagacgagtggggggagggcagggaagatgcctgtcgggtttttagcacagttcatttcactgggattttgaagcatttctgtctgaacacaaagcctgttctagtcctggcggaacacactgggggtgggggcggggggaagatgcggtaatgaaaccggttagtcaattttgtcttaatattgttgacaattctgtaaagttcctttttatgaatatttctgtttaagctatttcacctttcttttgaaatccttcccttttaaggagaaaatgtgacacttgtgaaaaagcttgtaagaaagcccctcccttttttctttaaacctttaaatgacaaatctaggtaattaaggttgtgaatttttatttttgctttgtttttaatgaacatttgtctttcagaataggattgtgtgataatgtttaaatggcaaaaacaaaacatgattttgtgcaattaacaaagctactgcaagaaaaataaaacacttcttggtaacacaaaaaaaaaaaaaaaaaaaaaaaaaaaaaaaaaaaaaaaagagagaagagaagaaaaaaaaaaaaaaaaagaaagagagagggaagcccaaaaaaaaaaaaaaaaaaaaagaaaaaaaaaaacagaaacaacaaaaaataagaaaaaaaaaaaaaaacaaaaaaagaaaaaaaaaaaaaaaaaaacaaaaagaaaaaaaaaaagaggagaagaatagggagagagaggagaaaagagggaattgacccccggaaaaaaggagaaaaagggaaaagaaaaagtggggagaaaagggagaaaagaagaaaagagagagaagaaaagacacaacaccaagaagcaataaagggctcaacaaaccacacaagaagccagcgcacaagacaacagccgaagacaaaaagaaaaaaaaaaacaacagaaagaaaagagaaggcaaagcgaggaaggggaagagcccgagaaacaacagagagaaagcagacaagaaaaggagcaggagagagcggcggggaggggataggggagcgcaccaaagagcgcgggaga

SEQ ID NO: 423866 - DNA, 2390 bp, Homo sapiens
  misc_feature (63)..(63): n is a, c, g, or t
gcttctgtgacaaaaaccaagagcaggatgatgacaaacgtggcaagtccacagcgactttcncggattgtggcacacacgccacacacacacacacacacacacacacaggctctcgccccaggatagaagctgcccagaaactgctgcctggctttttttcttccgagcttgtcttatctcaaaccccttccagtcaaggaactagaatcagcaacgagagttggaagccttcccacagcttcccccagagcgaagaggctgtagtcatgtccccatcccccactggattccctacaaggagaggccttgggcccagatgagccagtacagactccagacagaggggcccttggggccctccaacctcaggtgatgagctgagaaagatgttcacgtctaagcgtccagtgtgcacccagcgctccatagacgcctttgtgaactgaaaagagactggcagagtcccgagaagatggggccctggctttccagggagtgcagcaagcagccggcctgcaggtgagcatggaggcccggccctcaccgcctcgaagccatgccccagatgccactgccacagcgggcgctcgctcctccctaggctgttttagtatttggatttgcattccatcccttgggagggagtcctcagggccactagtgatgagccaagaggagtgggggttgggggcgctcctttctgtttccgttaggccacagactcttcacctggctctgaagagccactcttacctcggtcccctcccagtggtcccaccttctccaccctgccctgccaagtcccctgcatgcccaccgctctccatcctccctcctctccctcttcctcccgtggagacagtatttctttctgtctgtccctttggcccagacccagcctgaccaacgatgagcatttcttaggctcagctcttgatacggaaacgagtgtcttcactccagccagcatcatggtcttcggtgcttcccgggcccggggtctgtcgggagggaagagaactgggcctgacctacctgaactgactggccctccgaggtgggtctgggacatcctagaggccctacatttgtccttggataggggaccggggggggcttggaatgttgcaaaaaaaaaagttacccaagggatgtcagttttttatccctctgcatgggttggattttccaaaatcataatttgcagaaggaaggccagcatttacgatgcaatatgtaattatatatagggtggccacactagggcggggtccttcccccctcacagctttggcccctttcagagattagaaactgggttagaggattgcagaagacgagtggggggagggcagggaagatgcctgtcgggtttttagcacagttcatttcactgggattttgaagcatttctgtctgaacacaaagcctgttctagtcctggcggaacacactgggggtgggggcggggggaagatgcggtaatgaaaccggttagtcaattttgtcttaatattgttgacaattctgtaaagttcctttttatgaatatttctgtttaagctatttcacctttcttttgaaatccttcccttttaaggagaaaatgtgacacttgtgaaaaagcttgtaagaaagcccctcccttttttctttaaacctttaaatgacaaatctaggtaattaaggttgtgaatttttatttttgctttgtttttaatgaacatttgtctttcagaataggattgtgtgataatgtttaaatggcaaaaacaaaacatgattttgtgcaattaacaaagctactgcaagaaaaataaaacacttcttggtaacacaaaaaaaaaaaaaaaaaaaaaaaaaaaaaaaaaaaaaaaagagagaagagaagaaaaaaaaaaaaaaaaagaaagagagagggaagcccaaaaaaaaaaaaaaaaaaaaagaaaaaaaaaaacagaaacaacaaaaaataagaaaaaaaaaaaaaaacaaaaaaagaaaaaaaaaaaaaaaaaaacaaaaagaaaaaaaaaaagaggagaagaatagggagagagaggagaaaagagggaattgacccccggaaaaaaggagaaaaagggaaaagaaaaagtggggagaaaagggagaaaagaagaaaagagagagaagaaaagacacaacaccaagaagcaataaagggctcaacaaaccacacaagaagccagcgcacaagacaacagccgaagacaaaaagaaaaaaaaaaacaacagaaagaaaagagaaggcaaagcgaggaaggggaagagcccgagaaacaacagagagaaagcagacaagaaaaggagcaggagagagcggcggggaggggataggggagcgcaccaaagagcgcgggaga

SEQ ID NO: 423867 - DNA, 1489 bp, Homo sapiens
gccggtggggaggggacaagtgtcagcaggattggcgtgtgggaaagctcttgagctgggcactggccccccggacgaggtggctgtgtgttcacacacacacacacacacacacacacacacacacacaggctctcgccccaggatagaagctgcccagaaactgctgcctggctttttttcttccgagcttgtcttatctcaaaccccttccagtcaaggaactagaatcagcaacgagagttggaagccttcccacagcttcccccagagcgaagaggctgtagtcatgtccccatcccccactggattccctacaaggagaggccttgggcccagatgagccagtacagactccagacagaggggcccttggggccctccaacctcaggtgatgagctgagaaagatgttcacgtctaagcgtccagtgtgcacccagcgctccatagacgcctttgtgaactgaaaagagactggcagagtcccgagaagatggggccctggctttccagggagtgcagcaagcagccggcctgcagacccagcctgaccaacgatgagcatttcttaggctcagctcttgatacggaaacgagtgtcttcactccagccagcatcatggtcttcggtgcttcccgggcccggggtctgtcgggagggaagagaactgggcctgacctacctgaactgactggccctccgaggtgggtctgggacatcctagaggccctacatttgtccttggataggggaccggggggggcttggaatgttgcaaaaaaaaaagttacccaagggatgtcagttttttatccctctgcatgggttggattttccaaaatcataatttgcagaaggaaggccagcatttacgatgcaatatgtaattatatatagggtggccacactagggcggggtccttcccccctcacagctttggcccctttcagagattagaaactgggttagaggattgcagaagacgagtggggggagggcagggaagatgcctgtcgggtttttagcacagttcatttcactgggattttgaagcatttctgtctgaacacaaagcctgttctagtcctggcggaacacactgggggtgggggcggggggaagatgcggtaatgaaaccggttagtcaattttgtcttaatattgttgacaattctgtaaagttcctttttatgaatatttctgtttaagctatttcacctttcttttgaaatccttcccttttaaggagaaaatgtgacacttgtgaaaaagcttgtaagaaagcccctcccttttttctttaaacctttaaatgacaaatctaggtaattaaggttgtgaatttttatttttgctttgtttttaatgaacatttgtctttcagaataggattgtgtgataatgtttaaatggcaaaaacaaaacatgattttgtgcaattaacaaagctactgcaagaaaaataaaacacttcttggtaacaca

SEQ ID NO: 423868 - DNA, 855 bp, Homo sapiens
ctgatagaaatcaggaaatgagccaaaacagcagcaggattctgatctgaggtctgtagggctcctgagcatctgcccgggagcctgggctattgcttctcccttgtgtccccacagctggtgctgggccccagtggtgtgctgcaagggatccgccctgggaagtgctacgtggacatgtcaacagtggacgctgacaccgtcactgagctggcccaggtgattgtgtccaggggggggcgctttctggaagcccccgtctcagggaatcagcagctgtctaatgacgggatgttggtgatcttagcggctggagacaggggcttatatgaggactgcagcagctgcttccaggcgatggggaagacctccttcttcctaggtaacacgcctgcacctgtcaggcctggagcctggggccacatctcctctgtttcacactgatgacagcgtcagtcccacacggcctttctgccggggaccggggggaagatgcggtaatgaaaccggttagtcaattttgtcttaatattgttgacaattctgtaaagttcctttttatgaatatttctgtttaagctatttcacctttcttttgaaatccttcccttttaaggagaaaatgtgacacttgtgaaaaagcttgtaagaaagcccctcccttttttctttaaacctttaaatgacaaatctaggtaattaaggttgtgaatttttatttttgctttgtttttaatgaacatttgtctttcagaataggattgtgtgataatgtttaaatggcaaaaacaaaacatgattttgtgcaattaacaaagctactgcaagaaaaataaaacacttcttggtaacaca

SEQ ID NO: 423869 - DNA, 925 bp, Homo sapiens
  misc_feature (19)..(19): n is a, c, g, or t
  misc_feature (73)..(73): n is a, c, g, or t
gagagagagagagagaganagagagagaggagagagagagagagagagagagagagagagagagaggtaaagnttcctttttatgaatatttctgtttaagctatttcacctttcttttgaaatccttcccttttaaggagaaaatgtgacacttgtgaaaaagcttgtaagaaagcccctcccttttttctttaaacctttaaatgacaaatctaggtaattaaggttgtgaatttttatttttgctttgtttttaatgaacatttgtctttcagaataggattgtgtgataatgtttaaatggcaaaaacaaaacatgattttgtgcaattaacaaagctactgcaagaaaaataaaacacttcttggtaacacaaaaaaaaaaaaaaaaaaaaaaaaaaaaaaaaaaaaaaaagagagaagagaagaaaaaaaaaaaaaaaaagaaagagagagggaagcccaaaaaaaaaaaaaaaaaaaaagaaaaaaaaaaacagaaacaacaaaaaataagaaaaaaaaaaaaaaacaaaaaaagaaaaaaaaaaaaaaaaaaacaaaaagaaaaaaaaaaagaggagaagaatagggagagagaggagaaaagagggaattgacccccggaaaaaaggagaaaaagggaaaagaaaaagtggggagaaaagggagaaaagaagaaaagagagagaagaaaagacacaacaccaagaagcaataaagggctcaacaaaccacacaagaagccagcgcacaagacaacagccgaagacaaaaagaaaaaaaaaaacaacagaaagaaaagagaaggcaaagcgaggaaggggaagagcccgagaaacaacagagagaaagcagacaagaaaaggagcaggagagagcggcggggaggggataggggagcgcaccaaagagcgcgggaga

SEQ ID NO: 423870 - DNA, 2404 bp, Homo sapiens
aatttgctggaaaatgtacctggagactggatagtcacctgcgcagccgtcgcagtcctggtaaatgtggctgctgcatttttggacagagcatgccacacacacacacacacacacacacacaggctctcgccccaggatagaagctgcccagaaactgctgcctggctttttttcttccgagcttgtcttatctcaaaccccttccagtcaaggaactagaatcagcaacgagagttggaagccttcccacagcttcccccagagcgaagaggctgtagtcatgtccccatcccccactggattccctacaaggagaggccttgggcccagatgagccagtacagactccagacagaggggcccttggggccctccaacctcaggtgatgagctgagaaagatgttcacgtctaagcgtccagtgtgcacccagcgctccatagacgcctttgtgaactgaaaagagactggcagagtcccgagaagatggggccctggctttccagggagtgcagcaagcagccggcctgcaggtgagcatggaggcccggccctcaccgcctcgaagccatgccccagatgccactgccacagcgggcgctcgctcctccctaggctgttttagtatttggatttgcattccatcccttgggagggagtcctcagggccactagtgatgagccaagaggagtgggggttgggggcgctcctttctgtttccgttaggccacagactcttcacctggctctgaagagccactcttacctcggtcccctcccagtggtcccaccttctccaccctgccctgccaagtcccctgcatgcccaccgctctccatcctccctcctctccctcttcctcccgtggagacagtatttctttctgtctgtccctttggcccagacccagcctgaccaacgatgagcatttcttaggctcagctcttgatacggaaacgagtgtcttcactccagccagcatcatggtcttcggtgcttcccgggcccggggtctgtcgggagggaagagaactgggcctgacctacctgaactgactggccctccgaggtgggtctgggacatcctagaggccctacatttgtccttggataggggaccggggggggcttggaatgttgcaaaaaaaaaagttacccaagggatgtcagttttttatccctctgcatgggttggattttccaaaatcataatttgcagaaggaaggccagcatttacgatgcaatatgtaattatatatagggtggccacactagggcggggtccttcccccctcacagctttggcccctttcagagattagaaactgggttagaggattgcagaagacgagtggggggagggcagggaagatgcctgtcgggtttttagcacagttcatttcactgggattttgaagcatttctgtctgaacacaaagcctgttctagtcctggcggaacacactgggggtgggggcggggggaagatgcggtaatgaaaccggttagtcaattttgtcttaatattgttgacaattctgtaaagttcctttttatgaatatttctgtttaagctatttcacctttcttttgaaatccttcccttttaaggagaaaatgtgacacttgtgaaaaagcttgtaagaaagcccctcccttttttctttaaacctttaaatgacaaatctaggtaattaaggttgtgaatttttatttttgctttgtttttaatgaacatttgtctttcagaataggattgtgtgataatgtttaaatggcaaaaacaaaacatgattttgtgcaattaacaaagctactgcaagaaaaataaaacacttcttggtaacacaaaaaaaaaaaaaaaaaaaaaaaaaaaaaaaaaaaaaaaagagagaagagaagaaaaaaaaaaaaaaaaagaaagagagagggaagcccaaaaaaaaaaaaaaaaaaaaagaaaaaaaaaaacagaaacaacaaaaaataagaaaaaaaaaaaaaaacaaaaaaagaaaaaaaaaaaaaaaaaaacaaaaagaaaaaaaaaaagaggagaagaatagggagagagaggagaaaagagggaattgacccccggaaaaaaggagaaaaagggaaaagaaaaagtggggagaaaagggagaaaagaagaaaagagagagaagaaaagacacaacaccaagaagcaataaagggctcaacaaaccacacaagaagccagcgcacaagacaacagccgaagacaaaaagaaaaaaaaaaacaacagaaagaaaagagaaggcaaagcgaggaaggggaagagcccgagaaacaacagagagaaagcagacaagaaaaggagcaggagagagcggcggggaggggataggggagcgcaccaaagagcgcgggaga

SEQ ID NO: 423871 - DNA, 1862 bp, Homo sapiens
gccggtggggaggggacaagtgtcagcaggattggcgtgtgggaaagctcttgagctgggcactggccccccggacgaggtggctgtgtgttcacacacacacacacacacacacacacacacacacacaggctctcgccccaggatagaagctgcccagaaactgctgcctggctttttttcttccgagcttgtcttatctcaaaccccttccagtcaaggaactagaatcagcaacgagagttggaagccttcccacagcttcccccagagcgaagaggctgtagtcatgtccccatcccccactggattccctacaaggagaggccttgggcccagatgagccagtacagactccagacagaggggcccttggggccctccaacctcaggtgatgagctgagaaagatgttcacgtctaagcgtccagtgtgcacccagcgctccatagacgcctttgtgaactgaaaagagactggcagagtcccgagaagatggggccctggctttccagggagtgcagcaagcagccggcctgcaggtgagcatggaggcccggccctcaccgcctcgaagccatgccccagatgccactgccacagcgggcgctcgctcctccctaggctgttttagtatttggatttgcattccatcccttgggagggagtcctcagggccactagtgatgagccaagaggagtgggggttgggggcgctcctttctgtttccgttaggccacagactcttcacctggctctgaagagccactcttacctcggtcccctcccagtggtcccaccttctccaccctgccctgccaagtcccctgcatgcccaccgctctccatcctccctcctctccctcttcctcccgtggagacagtatttctttctgtctgtccctttggcccagacccagcctgaccaacgatgagcatttcttaggctcagctcttgatacggaaacgagtgtcttcactccagccagcatcatggtcttcggtgcttcccgggcccggggtctgtcgggagggaagagaactgggcctgacctacctgaactgactggccctccgaggtgggtctgggacatcctagaggccctacatttgtccttggataggggaccggggggggcttggaatgttgcaaaaaaaaaagttacccaagggatgtcagttttttatccctctgcatgggttggattttccaaaatcataatttgcagaaggaaggccagcatttacgatgcaatatgtaattatatatagggtggccacactagggcggggtccttcccccctcacagctttggcccctttcagagattagaaactgggttagaggattgcagaagacgagtggggggagggcagggaagatgcctgtcgggtttttagcacagttcatttcactgggattttgaagcatttctgtctgaacacaaagcctgttctagtcctggcggaacacactgggggtgggggcggggggaagatgcggtaatgaaaccggttagtcaattttgtcttaatattgttgacaattctgtaaagttcctttttatgaatatttctgtttaagctatttcacctttcttttgaaatccttcccttttaaggagaaaatgtgacacttgtgaaaaagcttgtaagaaagcccctcccttttttctttaaacctttaaatgacaaatctaggtaattaaggttgtgaatttttatttttgctttgtttttaatgaacatttgtctttcagaataggattgtgtgataatgtttaaatggcaaaaacaaaacatgattttgtgcaattaacaaagctactgcaagaaaaataaaacacttcttggtaacaca

SEQ ID NO: 423872 - DNA, 1792 bp, Homo sapiens
gccggtggggaggggacaagtgtcagcaggattggcgtgtgggaaagctcttgagctgggcactggccccccggacgaggtggctgtgtgttcacacacacacacacacacacacacacacacacacacaggctctcgccccaggatagaagctgcccagaaactgctgcctggctttttttcttccgagcttgtcttatctcaaaccccttccagtcaaggaactagaatcagcaacgagagttggaagccttcccacagcttcccccagagcgaagaggctgtagtcatgtccccatcccccactggattccctacaaggagaggccttgggcccagatgagccagtacagactccagacagaggggcccttggggccctccaacctcaggtgatgagctgagaaagatgttcacgtctaagcgtccagtgtgcacccagcgctccatagacgcctttgtgaactgaaaagagactggcagagtcccgagaagatggggccctggctttccagggagtgcagcaagcagccggcctgcaggtgagcatggaggcccggccctcaccgcctcgaagccatgccccagatgccactgccacagcgggcgctcgctcctccctaggctgttttagtatttggatttgcattccatcccttgggagggagtcctcagggccactagtgatgagccaagaggagtgggggttgggggcgctcctttctgtttccgttaggccacagactcttcacctggctctgaagagccactcttacctcggtcccctcctctccctcttcctcccgtggagacagtatttctttctgtctgtccctttggcccagacccagcctgaccaacgatgagcatttcttaggctcagctcttgatacggaaacgagtgtcttcactccagccagcatcatggtcttcggtgcttcccgggcccggggtctgtcgggagggaagagaactgggcctgacctacctgaactgactggccctccgaggtgggtctgggacatcctagaggccctacatttgtccttggataggggaccggggggggcttggaatgttgcaaaaaaaaaagttacccaagggatgtcagttttttatccctctgcatgggttggattttccaaaatcataatttgcagaaggaaggccagcatttacgatgcaatatgtaattatatatagggtggccacactagggcggggtccttcccccctcacagctttggcccctttcagagattagaaactgggttagaggattgcagaagacgagtggggggagggcagggaagatgcctgtcgggtttttagcacagttcatttcactgggattttgaagcatttctgtctgaacacaaagcctgttctagtcctggcggaacacactgggggtgggggcggggggaagatgcggtaatgaaaccggttagtcaattttgtcttaatattgttgacaattctgtaaagttcctttttatgaatatttctgtttaagctatttcacctttcttttgaaatccttcccttttaaggagaaaatgtgacacttgtgaaaaagcttgtaagaaagcccctcccttttttctttaaacctttaaatgacaaatctaggtaattaaggttgtgaatttttatttttgctttgtttttaatgaacatttgtctttcagaataggattgtgtgataatgtttaaatggcaaaaacaaaacatgattttgtgcaattaacaaagctactgcaagaaaaataaaacacttcttggtaacaca

SEQ ID NO: 423873 - DNA, 697 bp, Homo sapiens
attccaccaccactactctgacagcacaaaacatataccaggagctggggttatgtggtgggggagtccttcctattgtaagccctaacattatgaccctctggggttaaattttataattttcatattgtggagtcccatattttgttctgctttccactagtccaggcttctgaggtcttctctgtgttcattgcttattaattttattcagcaaagattaattgagctcctgcaatgagacacacacactatgttaggtgctggggaacaaaatagggaagggccctaccctcagaaagcttgcaatttatgaaagaatactaacaaaacctgcaaagtggtattttaagttattttgtttcatttttgctattgaaacaaagaaactgagaatttggtatgattcaaaaaatgtttaggtacaagaaaaagaaaaaagcaagaagcacttgccagatttaactataattcctaaaaatgatgaacattttcatcttcaggaacatgaaacatcatcgactattctctacagacaacaggcaaaggttcttactggtccagtacatacaagtccttcaggaagaaaaacatgattctaccaggattgggttgaatagagagagaattgcagtttaagattcatgagtatggaaataaacagctcttatggctaataaactctctatgaacttta

SEQ ID NO: 423874 - DNA, 679 bp, Homo sapiens
attccaccaccactactctgacagcacaaaacatataccaggagctggggttatgtggtgggggagtccttcctattgtaagccctaacattatgaccctctggggttaaattttataattttcatattgtggagtcccatattttgttctgctttccactagtccaggcttctgaggtcttctctgtgttcattgcttattaattttattcagcaaagattaattgagctcctgcaatgagacacacacactatgttaggtgctggggaacaaaatagggaagggccctaccctcagaaagcttgcaatttatgaaagaatactaacaaaacctgcaaagtggtattttaagttattttgtttcatttttgctattgaaacaaagaaactgagaatttggtatgattcaaaaaatgtttaggtacaagaaaaagaaaaaagcaagaagcacttgccagatttaactataattcctaaaaatgatgaacattttcatcttcaggaacatgaaacatcatcgactattctctacagacaacaggcaaaggttctcacatggccactcaatacctttaagacagcactgtctgtaaaagcatgaagtgcccccttctttattaacacataactgcatttgctgataatatttatttgcctagattcagcccttattggacc

SEQ ID NO: 423875 - DNA, 755 bp, Homo sapiens
aattttttgtggaaacttgaaaaaagatgttaaaatattaacaatgattaacttaatgggaaaaactgcaaatccctcaaaatatttccaaatgattaataattacataatttaaaaattggtggccaagtgtattgtaaactgaaattacacagttttattatgatcatgcctttttactagaaataatgtaccctccatttcaatgtcttatgaaccatacccttgtttccatgcatcagaaattttgcatgtagtttttgtgactcttagaccctaatttattagtaattgctattgtaatgtatacatttcttatcctagaaaaatatatgaaagtactattaagtgctggtatttacataagatatgtatgctcaaatattgataattccaattggaatttagatgtgataaaatgctagaaaaaaaaagttagcaacctcaacttgggtgcttgttctggagtaagctctatgcggaccataagagagaaggatgagaagatgttaaaagcatattaatggggaaatatgcttcagtggttgcagattgaggttgtctgagcacagcctgaagctgtgcaccctgtttctgcatcctgcagcatttttatgtgaatttaaaagtcatcctacttcaaattctttatttcaaactattgagaaattgtcttaatataatgatatttcttaaacaaaatatgttactaccatctgttggaaaattgttgtaataaaaattcaaatctatga

SEQ ID NO: 423876 - DNA, 4388 bp, Homo sapiens
  misc_feature (2015)..(2015): n is a, c, g, or t
ggcgaaagccgtcgcggaggcgtggggaggagaaatgggcgggaggctgtggggatagcgagacacccagcgacgacgaggttgtcatggtgccgcggggccgtgctcgcgcatgcgccacctgacccacaggccggtcgtggagctgcgaccccggccctagggcagtccagatgaaaagagtaccaatgaatctgcctccagctgaataaaccatggagaggaaaaacccatccagagagagccccagaagactctctgccaaagtaggcaaaggcacagagatgaagaaagtggctcgtcagcttgggatggctgctgctgagtcagacaaggactctggcttttcagatgggagctcggaatgtctgagctctgcagagcagatggagtccgaggacatgctgagcgccttaggctggagcagagaagacaggccgaggcagaactccaaaactgcaaagaatgccttccctaccctgtctcccatggtcgtcatgaagaatgtgcttgtcaaacagggcagcagctcatcccagctccagtcgtggactgtccagccctcctttgaagtgatctcagcacagccacagctcttattccttcatccacctgtaccatctcctgtcagtccatgtcacactggtgagaaaaagtccgactccaggaactacttgcccattctgaattcttacaccaaaatagccccacatccaggcaaaaggggcctttcccttggcccagaagaaaaaggaacaagtggagtgcagaagaaaatctgtactgagagacttgggcctagcttgtcttccagtgagccaaccaaggctggtgctgtcccatccagtccctcgacgccagcaccacccagcgccaaacttgccgaggactcagctctgcagggtgtgccctctctggtggcaggtggaagtccacagactcttcagccggtatccagcagtcacgtggctaaagctcccagtctgaccttcgcttcccccgccagtcctgtctgcgcatcagacagcactctccatgggttagagagcaactctcccctttcaccactgtccgctaattatagctcacctttatgggctgcagagcacctctgccgcagcccagatatcttttcagagcagcggcagagcaaacataggcgctttcagaataccctagtagtcctacataaatctggtttgctggagatcactttgaaaaccaaggagttgattcgtcagaatcaggcaactcaggtagaactagaccagctaaaggagcaaacccagctgtttatagaagccaccaagagcagggcccctcaggcttgggccaagctgcaggcatctttaacacctgggtccagtaatacaggcagtgacctagaagcattctctgatcacccagccatatagcacagaggcatattttcctgttacttgagtggttcttttagctcatttgctgttacctactcctgtttcccaaagcttatgtaagagcttttccttctaaacttaaactgtgttgtggttcacttaggaagccacgtgccaatacctggctgctgtcttaactcgtagtctgggcacaggatacatatgtccccgtcccactgaggacctcagtttgggagtgcccttgagccccttttccttagcctgcaggtgcttcaatggatcatggggcaaagcaggagatgattgtgtggggctcttcctgctgtcacctcccatcatcccactctctcaccaggatcaagggtacagtaacacgaatgagcatacagagcaacgcctgttgagccagggagtaggtgacacaaggaaaccttcatggatcttcccttgcctgtcttagtcacagagagaaataagaggaggttgtttgcatcccacaaggcatcgtactagttgggcgagacctaaaattccctgggcacaggttgcacctgggtgtgagcacttaatcactcaacgctttgttttcttacacttgaaaatcaagggaaagantagtaccatctgactcctacactttcattacaagtcagatttttcttaaactagcaggcaaaaacagtacttccaaattttaaggtatggaatgaatgcagtacatctggaattgtagtcgatgaattgcttttttgacttagaagctgaagaaaatagacatagccggcatatctcatggtcaggagctggacgattctggtaacttaggctttttttctctcttcttttgaaacagtgtaacctgttttatgtctaaaaatcttaaggatagtttcagtggttcctgggatgtagtataagttaactctgctgccatcttgtttttttttttttcctttattttgataagtgattattatgcttgataaactttgaattaaatacagttgtcttgagggtatgataagtccacaaaaaattggaaagcatcttacccattttcttcacatcccaaatttttatttgttccatgtcatagtgatgggaagcagttacagagcagcgtcttctgtgtttccttcatgtgttagatattggcaacaaagccagaggtgtaatgttggttatatgaagttcatctcaaaatggagaccatgaccagagtttccagatgatacacgttcttttcagcttcattaaataggcaactatgtttctaaatagtaaagtttcaaaatattctctcaatttaaaatttcatcctcttgaaaatctttgttctttacaaaattatcttaataagttctatatggtcagcttcatcttccttttttttttttttgagatggagtttcgctcttgttgcccaggcggagtacaatggtgggatctcggctcactgcaacctccgcctcctgggttcaagtgattctcctgccacagcctcccaagtagctgggattacaggtgcctgccaccatgcccagctaatttttgtatttttagtagaaatggggttttaccgtgttggccaggctggtctcgaactcctgacctcagttgatccgcctgcctcagcctcccaaagtgctgggcttacaggcctgagccaccacgctcagctcagcttcaccctgtctgcaaagaaaagttttaccaagaccagaagttaaatatgacatttcctaggtagttgtaactctaacatagtttaaaaagtatgtggcttcagattgcctatactttgttcacaaacgtgtgatttagatatgactgatttagaagtgaacaacttggtaacatccctagactccactcatgaacgcagaattattacctgctgtttgctttctgaaagaatttcagaaatcagagcaaatgtgtctttaggcagattcagctccttttaatatttttctcttggcccactctctttgcctcccctgaatctgtgtggtactatagcagctctactctgtgcaccatgctaggaagcttcctttttggcagaatatgtttggcagcaaagctatagagacaggtgcattcagaacatcctgggcaccagtcatgagtcttactgtgtcaaaaatctgaaaacacttgctgagaaccaaatttattccattggaaaaaccctctgtggagctataagcctcttggactcttcttcctagattaaggcttgcatttccctccctgtttcagtaaaagatgatgaaagccactatcaatcctcactgctgagtggcagggagaagcagcaccactctcagctcttttctaatcttgtaacttagtgctagaagtctctccaggctattaccatgggcatttgttctctgttggagctgtaagcagatgaacccaagtagagaagatagatcttggaaggagagatccattgagtccagaagccagatcagcaaatggaggaacctcggaggtgaccagaaagatctccatcggttgcccaaggctgtaagtagtgatggttttagcgatgaataacgtaattggctatgaagtactgtggcagagctgctgttttctgaaggtgagaagccatttttagctcagagcaacccttaagagaacttttggcagattttgttggcattattgaaatatatatagaaaagttgctgattgcaatggttatgggaatggaatttaatgacatttgtaatttattacactcattggtttttattgattatagtattgtctgactttttattttctactatggttcctttagcagaaaagtaacttttgtgcatatattgaagtggtttttcagctatgaattctttagggtagaaatttatttagcaaatgtgaattcttttgagaaagtatgaagttttgcagaaattgactgtgaaatgtcagagaaaaataaaagtcacttacttgaaacctaaaaag

SEQ ID NO: 423877 - DNA, 816 bp, Homo sapiens
gctgcaggattcggcacgagagaaaattggtggtattttcacattcatagtgtttctatccaatttcagtacccacatttaatgaggaaaaaatgttttaccaatgaaggaggaattcttaaattagctgtaatgttaggttggagaaaatttggtatttagggtattttcaaggtaccatcaaatcagatttctgtttttttgttaaaaaaaatttttttaatcagtattgtttttacaagtaatatactttgaaactcttgaactaatagtctcaaaaactctagaggacagtctgagaacacgtatttctattgttctaaataaatacatgtttttgaatagttcaatcatgaattattgactatgtcttcatctttctcccaggaaattggaaggtagaattgtaaattcatagaacttcttttataatggtgtacctcagcagctgcctttcaatttatgccaagtccttacagagtttatacttgaatagtaaatatgtcttctgagttttacagtgtcttaaactcaatgcacatttttttttcttctttttccaccccttcttgtttgtagttcattatacctgtcctattacagaactgatttccttcctggctgtacatgttggggtgctggatttttttccgtgtctttagtcttccataaatccacacacacacacacacacaaaaaatatatatatatataaatatatatgtaggatacatgttctcttctttagcttgtggtgaatacagtaatttgcattgaagaataaaacatctgttgccttttttgactaaaatttca

SEQ ID NO: 423878 - DNA, 1050 bp, Homo sapiens
aggattttctcacctaagaatcaaaacttggtaaccatgtttactcactttttatagccaaaaatttagtgatgtgattgctagtttctagaaaaaagtatggtggctcttgcccataatcccagcactttgggaagctaaggccagagcattgcttcaggccaggaattcgagaccagggtgggcagcatagcaagactcaatctctacaaaaaattttaaaaaatcagccaggcatggtggcatgcacctatgttcctagctacttgggatgctgaggcggggggatcacttgagcccagtagttcaaggttacagtgatccatagttgtgccactgcactccagcctaggcaacagagtgagaccctgtgactaaaaaaaaggaaaacaaaatagtcaaagctctttggctatgttttccctagaaattttaattgaagtctaatctagtctccaattctttaattgcctcttccccctccttagcaatactaatttgctgagcaaatcattctaccctttcattgttaattcaaggattatgtctttccaaacaggtgaaaataaattgactatttctgaatccagtattagtgaccggcttgtcacattggagtcctgggctaatgatcctgattatctgaaacgtcaagttggtttctgtgcccagtggagcttagacaatctctgtaagtgggagttgtcctttattaaaatgtccgtttccatttccagactcatttctttcataggctcactggtcttccttttgcaatggtaagtatgagtcctcataaggacctctactggcaggttggatatattctagcagaaaagtatcctagagaccctttagacaagaattacatggtatgcttctaatttcagcattttcctgttcaaaaacctttactggcacccagtttcctgctgcatcaaagcccttaattatatggcactgtctaaccagctctttccaacacaaatcatcccactgtcctacaaacaggtcctgatgattcctacctctggcctattcccctcactt

SEQ ID NO: 423879 - DNA, 4175 bp, Homo sapiens
  misc_feature (569)..(569): n is a, c, g, or t
accgaggaaggggcgtttcctaggggagtgagggagggctggggcggtacgaagcgggggtgggctctgcgcgtaatggcagcgccgtggcctcgcgtccatctttgccgttctctcggacctgtcacaaaggagtcgcgccgccgccgccgccccctccctccggtgggcccgggaggtagagaaagtcagtgccacagcccgaccgcgctgctctgagccctgggcacgcggaacgggagggagtctgagggttggggacgtctgtgagggaggggaacagccgctcgagcctggggcgggcggaccggactggggccggggtaggctctggaaagggcccgggagagaggtggcgttggtcagaacctgagaaacagccgagaggttttccaccgaggcccgcgcttgagggatctgaagaggttcctagaagagggtgttccctctttcgggggtcctcaccagaagaggttcttgggggtcgcccttctgaggaggctgcggctaacagggcccaggtgagaggcagctatctatctcctggggtggctcctggtaccgatggngtcctgacctactcaggggtgcccgggatagaaagggtagatgaagggacgctttaggagggttctttttgtggagtttacggtctaggtggcacggatgaggcatacctccccggggagatttagaaacgccttgggatagaaagagaatggggctaggaagcaggagctagaactagcggaatgtcctactacggaagccggagctgaaaattggaactgccattggatgtccagaatcccctgtagttgataatgttgggaataagctctgcaactttctttggcattcagttgttaaaaacaaataggatgcaaattcctcaactccaggttatgaaaacagtacttggaaaactgaaaactacctaaatgatcgtctttggttgggccgtgttcttagcgagcagaagccttggccagggtctgttgttgactctcgaagagcacatagcccacttcctagggactggaggtgccgctactaccatgggtaattcctgtatctgccgagatgacagtggaacagatgacagtgttgacacccaacagcaacaggccgagaacagtgcagtacccactgctgacacaaggagccaaccacgggaccctgttcggccaccaaggaggggccgaggacctcatgagccaaggagaaagaaacaaaatgtggatgggctagtgttggacacactggcagtaatacggactcttgtagataatgatcaggaacctccctattcaatgataacattacacgaaatggcagaaacagatgaaggatggttggatgttgtccagtctttaattagagttattccactggaagatccactgggaccagctgttataacattgttactagatgaatgtccattgcccactaaagatgcactccagaaattgactgaaattctcaatttaaatggagaagtagcttgccaggactcaagccatcctgccaaacacaggaacacatctgcagtcctaggctgcttggccgagaaactagcaggtcctgcaagtataggtttacttagcccaggaatactggaatacttgctacagtgtctgaagttacagtcccaccccacagtcatgctttttgcacttatcgcactggaaaagtttgcacagacaagtgaaaataaattgactatttctgaatccagtattagtgaccggcttgtcacattggagtcctgggctaatgatcctgattatctgaaacgtcaagttggtttctgtgcccagtggagcttagacaatctctttttaaaagaaggtagacagctgacctatgagaaagtgaacttgagtagcattagggccatgctgaatagcaatgatgtcagcgagtacctgaagatctcacctcatggcttagaggctcgctgtgatgcctcctcttttgaaagtgtgcgttgcaccttttgtgtggatgccggggtatggtactatgaagtaacagtggtcacttctggcgtcatgcagattggctgggccactcgagacagcaaattcctcaatcatgaaggctacggcattggggatgatgaatactcctgtgcgtatgatggctgccggcagctgatttggtacaatgccagaagtaagcctcacatacacccatgctggaaagaaggagatacagtaggatttctgttagacttgaatgaaaagcaaatgatcttctttttaaatggcaaccagctgcctcctgaaaagcaagtcttttcatctactgtatctggattttttgctgcagctagtttcatgtcatatcaacaatgtgagttcaattttggagcaaaaccattcaaatacccaccatctatgaaatttagcacttttaatgactacgccttcctaacagctgaagaaaaaatcattttgccaaggcacaggcgtcttgctctgttgaagcaagtcagtatccgagaaaactgctgttccctttgttgtgatgaggtagcagacacacaattgaagccatgtggacacagtgacctgtgcatggattgtgccttgcagctggagacctgcccattgtgtcgtaaagaaatagtatctagaatcagacagatttctcatatttcatgacacatgtgaagaggcatcgtggacttttttctactcaattccagccaatgttgaaaagaaaaagaaaaaaaaaactctctaatcagttgtacacacattgaaacttatagccatggccagattttatgctaaaaatggtagtttgtcaaagacaaaattctcttagaatctaatccaacttgccagccctgagaaaatcccttttaaggccaaggaaagctgaatgctagcagccaggcctgtggtacttccatgagaaaccatagcagacaatgccctcccaagtactgaaatcacactggaatcccccttgttgggttcatttgattgtttaacacaggatgtgttgtgtcattctgaagtttttatttggggcagaagtctttatggagatgtaaatgacagcgtttctgggttatgcataacttctcactggtcagagacaccggtgtgtcaagcatggatattgcattgcaagacttgaatctataaaaattagaatcacacagtcagtactacaagcaaaacagagaacctgaaagaaggtgcacagactgtaagaaaaaacccaagtttgtgatatttcagtgattccaaagaacattctaggtttttgtttgtttttttgtttttgggttttttttttttactgcagaaaattggtggtattttcacattcatagtgtttctatccaatttcagtacccacatttaatgaggaaaaaatgttttaccaatgaaggaggaattcttaaattagctgtaatgttaggttggagaaaatttggtatttagggtattttcaaggtaccatcaaatcagatttctgtttttttgttaaaaaaaatttttttaatcagtattgtttttacaagtaatatactttgaaactcttgaactaatagtctcaaaaactctagaggacagtctgagaacacgtatttctattgttctaaataaatacatgtttttgaatagttcaatcatgaattattgactatgtcttcatcaaaagtgttaatccctctcagggtctctggtgaagaccttcaagagtttggttttttctcccaggaaattggaaggtagaattgtaaattcatagaacttcttttataatggtgtacctcagcagctgcctttcaatttatgccaagtccttacagagtttatacttgaatagtaaatatgtcttctgagttttacagtgtcttaaactcaatgcacatttttttttcttctttttccaccccttcttgtttgtagttcattatacctgtcctattacagaactgatttccttcctggctgtacatgttggggtgctggatttttttccgtgtctttagtcttccataaatccacacacacacacacacacaaaaaatatatatatatataaatatatatgtaggatacatgttctcttctttagcttgtggtgaatacagtaatttgcattgaagaataaaacatctgttgccttttttgactaaaatttca

SEQ ID NO: 423880 - DNA, 3567 bp, Homo sapiens
ttgatatcgaattcggcacgaggggagggctggggcggtacgaagcgggggtgggctctgcgcgtaatggcagcgccgtggcctcgcgtccatctttgccgttctctcggacctgtcacaaaggagtcgcgccgccgccgccgccccctccctccggtgggcccgggaggtagagaaaaactgccattggatgtccagaatcccctgtagttgataatgttgggaataagctctgcaactttctttggcattcagttgttaaaaacaaataggatgcaaattcctcaactccaggttatgaaaacagtacttggaaaactgaaaactacctaaatgatcgtctttggttgggccgtgttcttagcgagcagaagccttggccagggtctgttgttgactctcgaagagcacatagcccacttcctagggactggaggtgccgctactaccatgggtaattcctgtatctgccgagatgacagtggaacagatgacagtgttgacacccaacagcaacaggccgagaacagtgcagtacccactgctgacacaaggagccaaccacgggaccctgttcggccaccaaggaggggccgaggacctcatgagccaaggagaaagaaacaaaatgtggatgggctagtgttggacacactggcagtaatacggactcttgtagataatgatcaggaacctccctattcaatgataacattacacgaaatggcagaaacagatgaaggatggttggatgttgtccagtctttaattagagttattccactggaagatccactgggaccagctgttataacattgttactagatgaatgtccattgcccactaaagatgcactccagaaattgactgaaattctcaatttaaatggagaagtagcttgccaggactcaagccatcctgccaaacacaggaacacatctgcagtcctaggctgcttggccgagaaactagcaggtcctgcaagtataggtttacttagcccaggaatactggaatacttgctacagtgtctgaagttacagtcccaccccacagtcatgctttttgcacttatcgcactggaaaagtttgcacagacaagtgaaaataaattgactatttctgaatccagtattagtgaccggcttgtcacattggagtcctgggctaatgatcctgattatctgaaacgtcaagttggtttctgtgcccagtggagcttagacaatctctttttaaaagaaggtagacagctgacctatgagaaagtgaacttgagtagcattagggccatgctgaatagcaatgatgtcagcgagtacctgaagatctcacctcatggcttagaggctcgctgtgatgcctcctcttttgaaagtgtgcgttgcaccttttgtgtggatgccggggtatggtactatgaagtaacagtggtcacttctggcgtcatgcagattggctgggccactcgagacagcaaattcctcaatcatgaaggctacggcattggggatgatgaatactcctgtgcgtatgatggctgccggcagctgatttggtacaatgccagaagtaagcctcacatacacccatgctggaaagaaggagatacagtaggatttctgttagacttgaatgaaaagcaaatgatcttctttttaaatggcaaccagctgcctcctgaaaagcaagtcttttcatctactgtatctggattttttgctgcagctagtttcatgtcatatcaacaatgtgagttcaattttggagcaaaaccattcaaatacccaccatctatgaaatttagcacttttaatgactacgccttcctaacagctgaagaaaaaatcattttgccaaggcacaggcgtcttgctctgttgaagcaagtcagtatccgagaaaactgctgttccctttgttgtgatgaggtagcagacacacaattgaagccatgtggacacagtgacctgtgcatggattgtgccttgcagctggagacctgcccattgtgtcgtaaagaaatagtatctagaatcagacagatttctcatatttcatgacacatgtgaagaggcatcgtggacttttttctactcaattccagccaatgttgaaaagaaaaagaaaaaaaaaactctctaatcagttgtacacacattgaaacttatagccatggccagattttatgctaaaaatggtagtttgtcaaagacaaaattctcttagaatctaatccaacttgccagccctgagaaaatcccttttaaggccaaggaaagctgaatgctagcagccaggcctgtggtacttccatgagaaaccatagcagacaatgccctcccaagtactgaaatcacactggaatcccccttgttgggttcatttgattgtttaacacaggatgtgttgtgtcattctgaagtttttatttggggcagaagtctttatggagatgtaaatgacagcgtttctgggttatgcataacttctcactggtcagagacaccggtgtgtcaagcatggatattgcattgcaagacttgaatctataaaaattagaatcacacagtcagtactacaagcaaaacagagaacctgaaagaaggtgcacagactgtaagaaaaaacccaagtttgtgatatttcagtgattccaaagaacattctaggtttttgtttgtttttttgtttttgggttttttttttttactgcagaaaattggtggtattttcacattcatagtgtttctatccaatttcagtacccacatttaatgaggaaaaaatgttttaccaatgaaggaggaattcttaaattagctgtaatgttaggttggagaaaatttggtatttagggtattttcaaggtaccatcaaatcagatttctgtttttttgttaaaaaaaatttttttaatcagtattgtttttacaagtaatatactttgaaactcttgaactaatagtctcaaaaactctagaggacagtctgagaacacgtatttctattgttctaaataaatacatgtttttgaatagttcaatcatgaattattgactatgtcttcatcaaaagtgttaatccctctcagggtctctggtgaagaccttcaagagtttggttttttctcccaggaaattggaaggtagaattgtaaattcatagaacttcttttataatggtgtacctcagcagctgcctttcaatttatgccaagtccttacagagtttatacttgaatagtaaatatgtcttctgagttttacagtgtcttaaactcaatgcacatttttttttcttctttttccaccccttcttgtttgtagttcattatacctgtcctattacagaactgatttccttcctggctgtacatgttggggtgctggatttttttccgtgtctttagtcttccataaatccacacacacacacacacacaaaaaatatatatatatataaatatatatgtaggatacatgttctcttctttagcttgtggtgaatacagtaatttgcattgaagaataaaacatctgttgccttttttgactaaaatttca

SEQ ID NO: 423881 - DNA, 3901 bp, Homo sapiens
ttgatatcgaattcggcacgaggggagggctggggcggtacgaagcgggggtgggctctgcgcgtaatggcagcgccgtggcctcgcgtccatctttgccgttctctcggacctgtcacaaaggagtcgcgccgccgccgccgccccctccctccggtgggcccgggaggtagagaaagtcagtgccacagcccgaccgcgctgctctgagccctgggcacgcggaacgggagggagtctgagggttggggacgtctgtgagggaggggaacagccgctcgagcctggggcgggcggaccggactggggccggggtaggctctggaaagggcccgggagagaggtggcgttggtcagaacctgagaaacagccgagaggttttccaccgaggcccgcgcttgagggatctgaagaggttcctagaagagggtgttccctctttcgggggtcctcaccagaagaggttcttgggggtcgcccttctgaggaggctgcggctaacagggcccagaactgccattggatgtccagaatcccctgtagttgataatgttgggaataagctctgcaactttctttggcattcagttgttaaaaacaaataggatgcaaattcctcaactccaggttatgaaaacagtacttggaaaactgaaaactacctaaatgatcgtctttggttgggccgtgttcttagcgagcagaagccttggccagggtctgttgttgactctcgaagagcacatagcccacttcctagggactggaggtgccgctactaccatgggtaattcctgtatctgccgagatgacagtggaacagatgacagtgttgacacccaacagcaacaggccgagaacagtgcagtacccactgctgacacaaggagccaaccacgggaccctgttcggccaccaaggaggggccgaggacctcatgagccaaggagaaagaaacaaaatgtggatgggctagtgttggacacactggcagtaatacggactcttgtagataatgatcaggaacctccctattcaatgataacattacacgaaatggcagaaacagatgaaggatggttggatgttgtccagtctttaattagagttattccactggaagatccactgggaccagctgttataacattgttactagatgaatgtccattgcccactaaagatgcactccagaaattgactgaaattctcaatttaaatggagaagtagcttgccaggactcaagccatcctgccaaacacaggaacacatctgcagtcctaggctgcttggccgagaaactagcaggtcctgcaagtataggtttacttagcccaggaatactggaatacttgctacagtgtctgaagttacagtcccaccccacagtcatgctttttgcacttatcgcactggaaaagtttgcacagacaagtgaaaataaattgactatttctgaatccagtattagtgaccggcttgtcacattggagtcctgggctaatgatcctgattatctgaaacgtcaagttggtttctgtgcccagtggagcttagacaatctctttttaaaagaaggtagacagctgacctatgagaaagtgaacttgagtagcattagggccatgctgaatagcaatgatgtcagcgagtacctgaagatctcacctcatggcttagaggctcgctgtgatgcctcctcttttgaaagtgtgcgttgcaccttttgtgtggatgccggggtatggtactatgaagtaacagtggtcacttctggcgtcatgcagattggctgggccactcgagacagcaaattcctcaatcatgaaggctacggcattggggatgatgaatactcctgtgcgtatgatggctgccggcagctgatttggtacaatgccagaagtaagcctcacatacacccatgctggaaagaaggagatacagtaggatttctgttagacttgaatgaaaagcaaatgatcttctttttaaatggcaaccagctgcctcctgaaaagcaagtcttttcatctactgtatctggattttttgctgcagctagtttcatgtcatatcaacaatgtgagttcaattttggagcaaaaccattcaaatacccaccatctatgaaatttagcacttttaatgactacgccttcctaacagctgaagaaaaaatcattttgccaaggcacaggcgtcttgctctgttgaagcaagtcagtatccgagaaaactgctgttccctttgttgtgatgaggtagcagacacacaattgaagccatgtggacacagtgacctgtgcatggattgtgccttgcagctggagacctgcccattgtgtcgtaaagaaatagtatctagaatcagacagatttctcatatttcatgacacatgtgaagaggcatcgtggacttttttctactcaattccagccaatgttgaaaagaaaaagaaaaaaaaaactctctaatcagttgtacacacattgaaacttatagccatggccagattttatgctaaaaatggtagtttgtcaaagacaaaattctcttagaatctaatccaacttgccagccctgagaaaatcccttttaaggccaaggaaagctgaatgctagcagccaggcctgtggtacttccatgagaaaccatagcagacaatgccctcccaagtactgaaatcacactggaatcccccttgttgggttcatttgattgtttaacacaggatgtgttgtgtcattctgaagtttttatttggggcagaagtctttatggagatgtaaatgacagcgtttctgggttatgcataacttctcactggtcagagacaccggtgtgtcaagcatggatattgcattgcaagacttgaatctataaaaattagaatcacacagtcagtactacaagcaaaacagagaacctgaaagaaggtgcacagactgtaagaaaaaacccaagtttgtgatatttcagtgattccaaagaacattctaggtttttgtttgtttttttgtttttgggttttttttttttactgcagaaaattggtggtattttcacattcatagtgtttctatccaatttcagtacccacatttaatgaggaaaaaatgttttaccaatgaaggaggaattcttaaattagctgtaatgttaggttggagaaaatttggtatttagggtattttcaaggtaccatcaaatcagatttctgtttttttgttaaaaaaaatttttttaatcagtattgtttttacaagtaatatactttgaaactcttgaactaatagtctcaaaaactctagaggacagtctgagaacacgtatttctattgttctaaataaatacatgtttttgaatagttcaatcatgaattattgactatgtcttcatcaaaagtgttaatccctctcagggtctctggtgaagaccttcaagagtttggttttttctcccaggaaattggaaggtagaattgtaaattcatagaacttcttttataatggtgtacctcagcagctgcctttcaatttatgccaagtccttacagagtttatacttgaatagtaaatatgtcttctgagttttacagtgtcttaaactcaatgcacatttttttttcttctttttccaccccttcttgtttgtagttcattatacctgtcctattacagaactgatttccttcctggctgtacatgttggggtgctggatttttttccgtgtctttagtcttccataaatccacacacacacacacacacaaaaaatatatatatatataaatatatatgtaggatacatgttctcttctttagcttgtggtgaatacagtaatttgcattgaagaataaaacatctgttgccttttttgactaaaatttca

SEQ ID NO: 423882 - DNA, 3024 bp, Homo sapiens
aggattttctcacctaagaatcaaaacttggtaaccatgtttactcactttttatagccaaaaatttagtgatgtgattgctagtttctagaaaaaagtatggtggctcttgcccataatcccagcactttgggaagctaaggccagagcattgcttcaggccaggaattcgagaccagggtgggcagcatagcaagactcaatctctacaaaaaattttaaaaaatcagccaggcatggtggcatgcacctatgttcctagctacttgggatgctgaggcggggggatcacttgagcccagtagttcaaggttacagtgatccatagttgtgccactgcactccagcctaggcaacagagtgagaccctgtgactaaaaaaaaggaaaacaaaatagtcaaagctctttggctatgttttccctagaaattttaattgaagtctaatctagtctccaattctttaattgcctcttccccctccttagcaatactaatttgctgagcaaatcattctaccctttcattgttaattcaaggattatgtctttccaaacaggtgaaaataaattgactatttctgaatccagtattagtgaccggcttgtcacattggagtcctgggctaatgatcctgattatctgaaacgtcaagttggtttctgtgcccagtggagcttagacaatctctttttaaaagaaggtagacagctgacctatgagaaagtgaacttgagtagcattagggccatgctgaatagcaatgatgtcagcgagtacctgaagatctcacctcatggcttagaggctcgctgtgatgcctcctcttttgaaagtgtgcgttgcaccttttgtgtggatgccggggtatggtactatgaagtaacagtggtcacttctggcgtcatgcagattggctgggccactcgagacagcaaattcctcaatcatgaaggctacggcattggggatgatgaatactcctgtgcgtatgatggctgccggcagctgatttggtacaatgccagaagtaagcctcacatacacccatgctggaaagaaggagatacagtaggatttctgttagacttgaatgaaaagcaaatgatcttctttttaaatggcaaccagctgcctcctgaaaagcaagtcttttcatctactgtatctggattttttgctgcagctagtttcatgtcatatcaacaatgtgagttcaattttggagcaaaaccattcaaatacccaccatctatgaaatttagcacttttaatgactacgccttcctaacagctgaagaaaaaatcattttgccaaggcacaggcgtcttgctctgttgaagcaagtcagtatccgagaaaactgctgttccctttgttgtgatgaggtagcagacacacaattgaagccatgtggacacagtgacctgtgcatggattgtgccttgcagctggagacctgcccattgtgtcgtaaagaaatagtatctagaatcagacagatttctcatatttcatgacacatgtgaagaggcatcgtggacttttttctactcaattccagccaatgttgaaaagaaaaagaaaaaaaaaactctctaatcagttgtacacacattgaaacttatagccatggccagattttatgctaaaaatggtagtttgtcaaagacaaaattctcttagaatctaatccaacttgccagccctgagaaaatcccttttaaggccaaggaaagctgaatgctagcagccaggcctgtggtacttccatgagaaaccatagcagacaatgccctcccaagtactgaaatcacactggaatcccccttgttgggttcatttgattgtttaacacaggatgtgttgtgtcattctgaagtttttatttggggcagaagtctttatggagatgtaaatgacagcgtttctgggttatgcataacttctcactggtcagagacaccggtgtgtcaagcatggatattgcattgcaagacttgaatctataaaaattagaatcacacagtcagtactacaagcaaaacagagaacctgaaagaaggtgcacagactgtaagaaaaaacccaagtttgtgatatttcagtgattccaaagaacattctaggtttttgtttgtttttttgtttttgggttttttttttttactgcagaaaattggtggtattttcacattcatagtgtttctatccaatttcagtacccacatttaatgaggaaaaaatgttttaccaatgaaggaggaattcttaaattagctgtaatgttaggttggagaaaatttggtatttagggtattttcaaggtaccatcaaatcagatttctgtttttttgttaaaaaaaatttttttaatcagtattgtttttacaagtaatatactttgaaactcttgaactaatagtctcaaaaactctagaggacagtctgagaacacgtatttctattgttctaaataaatacatgtttttgaatagttcaatcatgaattattgactatgtcttcatcaaaagtgttaatccctctcagggtctctggtgaagaccttcaagagtttggttttttctcccaggaaattggaaggtagaattgtaaattcatagaacttcttttataatggtgtacctcagcagctgcctttcaatttatgccaagtccttacagagtttatacttgaatagtaaatatgtcttctgagttttacagtgtcttaaactcaatgcacatttttttttcttctttttccaccccttcttgtttgtagttcattatacctgtcctattacagaactgatttccttcctggctgtacatgttggggtgctggatttttttccgtgtctttagtcttccataaatccacacacacacacacacacaaaaaatatatatatatataaatatatatgtaggatacatgttctcttctttagcttgtggtgaatacagtaatttgcattgaagaataaaacatctgttgccttttttgactaaaatttca

SEQ ID NO: 423883 - DNA, 1551 bp, Homo sapiens
  misc_feature (569)..(569): n is a, c, g, or t
accgaggaaggggcgtttcctaggggagtgagggagggctggggcggtacgaagcgggggtgggctctgcgcgtaatggcagcgccgtggcctcgcgtccatctttgccgttctctcggacctgtcacaaaggagtcgcgccgccgccgccgccccctccctccggtgggcccgggaggtagagaaagtcagtgccacagcccgaccgcgctgctctgagccctgggcacgcggaacgggagggagtctgagggttggggacgtctgtgagggaggggaacagccgctcgagcctggggcgggcggaccggactggggccggggtaggctctggaaagggcccgggagagaggtggcgttggtcagaacctgagaaacagccgagaggttttccaccgaggcccgcgcttgagggatctgaagaggttcctagaagagggtgttccctctttcgggggtcctcaccagaagaggttcttgggggtcgcccttctgaggaggctgcggctaacagggcccaggtgagaggcagctatctatctcctggggtggctcctggtaccgatggngtcctgacctactcaggggtgcccgggatagaaagggtagatgaagggacgctttaggagggttctttttgtggagtttacggtctaggtggcacggatgaggcatacctccccggggagatttagaaacgccttgggatagaaagagaatggggctaggaagcaggagctagaactagcggaatgtcctactacggaagccggagctgaaaattggaactgccattggatgtccagaatcccctgtagttgataatgttgggaataagctctgcaactttctttggcattcagttgttaaaaacaaataggatgcaaattcctcaactccaggttatgaaaacagtacttggaaaactgaaaactacctaaatgatcgtctttggttgggccgtgttcttagcgagcagaagccttggccagggtctgttgttgactctcgaagagcacatagcccacttcctagggactggaggtgccgctactaccatgggtaattcctgtatctgccgagatgacagtggaacagatgacagtgttgacacccaacagcaacaggccgagaacagtgcagtacccactgctgacacaaggagccaaccacgggaccctgttcggccaccaaggaggggccgaggacctcatgagccaaggagaaagaaacaaaatgtggatgggctagtgttggacacactggcagtaatacggactcttgtagataagtaagtatctgactcacggtcacctccagtggaatgaaaagtgttctgcccggaaccatgactttaggactccttcagttcctttaggacatactcgccaagccttgtgctcacagggcaaaggagaatattttaatgctccgctgatggcagagtaaatgataagatttgatgtttttgcttgctgtcatctactttgtctggaaatgtctaaatgtttctgtagcagaaaacacgataaagctatgatctttattaga

SEQ ID NO: 423884 - DNA, 4166 bp, Homo sapiens
  misc_feature (560)..(560): n is a, c, g, or t
ttgatatcgaattcggcacgaggggagggctggggcggtacgaagcgggggtgggctctgcgcgtaatggcagcgccgtggcctcgcgtccatctttgccgttctctcggacctgtcacaaaggagtcgcgccgccgccgccgccccctccctccggtgggcccgggaggtagagaaagtcagtgccacagcccgaccgcgctgctctgagccctgggcacgcggaacgggagggagtctgagggttggggacgtctgtgagggaggggaacagccgctcgagcctggggcgggcggaccggactggggccggggtaggctctggaaagggcccgggagagaggtggcgttggtcagaacctgagaaacagccgagaggttttccaccgaggcccgcgcttgagggatctgaagaggttcctagaagagggtgttccctctttcgggggtcctcaccagaagaggttcttgggggtcgcccttctgaggaggctgcggctaacagggcccaggtgagaggcagctatctatctcctggggtggctcctggtaccgatggngtcctgacctactcaggggtgcccgggatagaaagggtagatgaagggacgctttaggagggttctttttgtggagtttacggtctaggtggcacggatgaggcatacctccccggggagatttagaaacgccttgggatagaaagagaatggggctaggaagcaggagctagaactagcggaatgtcctactacggaagccggagctgaaaattggaactgccattggatgtccagaatcccctgtagttgataatgttgggaataagctctgcaactttctttggcattcagttgttaaaaacaaataggatgcaaattcctcaactccaggttatgaaaacagtacttggaaaactgaaaactacctaaatgatcgtctttggttgggccgtgttcttagcgagcagaagccttggccagggtctgttgttgactctcgaagagcacatagcccacttcctagggactggaggtgccgctactaccatgggtaattcctgtatctgccgagatgacagtggaacagatgacagtgttgacacccaacagcaacaggccgagaacagtgcagtacccactgctgacacaaggagccaaccacgggaccctgttcggccaccaaggaggggccgaggacctcatgagccaaggagaaagaaacaaaatgtggatgggctagtgttggacacactggcagtaatacggactcttgtagataatgatcaggaacctccctattcaatgataacattacacgaaatggcagaaacagatgaaggatggttggatgttgtccagtctttaattagagttattccactggaagatccactgggaccagctgttataacattgttactagatgaatgtccattgcccactaaagatgcactccagaaattgactgaaattctcaatttaaatggagaagtagcttgccaggactcaagccatcctgccaaacacaggaacacatctgcagtcctaggctgcttggccgagaaactagcaggtcctgcaagtataggtttacttagcccaggaatactggaatacttgctacagtgtctgaagttacagtcccaccccacagtcatgctttttgcacttatcgcactggaaaagtttgcacagacaagtgaaaataaattgactatttctgaatccagtattagtgaccggcttgtcacattggagtcctgggctaatgatcctgattatctgaaacgtcaagttggtttctgtgcccagtggagcttagacaatctctttttaaaagaaggtagacagctgacctatgagaaagtgaacttgagtagcattagggccatgctgaatagcaatgatgtcagcgagtacctgaagatctcacctcatggcttagaggctcgctgtgatgcctcctcttttgaaagtgtgcgttgcaccttttgtgtggatgccggggtatggtactatgaagtaacagtggtcacttctggcgtcatgcagattggctgggccactcgagacagcaaattcctcaatcatgaaggctacggcattggggatgatgaatactcctgtgcgtatgatggctgccggcagctgatttggtacaatgccagaagtaagcctcacatacacccatgctggaaagaaggagatacagtaggatttctgttagacttgaatgaaaagcaaatgatcttctttttaaatggcaaccagctgcctcctgaaaagcaagtcttttcatctactgtatctggattttttgctgcagctagtttcatgtcatatcaacaatgtgagttcaattttggagcaaaaccattcaaatacccaccatctatgaaatttagcacttttaatgactacgccttcctaacagctgaagaaaaaatcattttgccaaggcacaggcgtcttgctctgttgaagcaagtcagtatccgagaaaactgctgttccctttgttgtgatgaggtagcagacacacaattgaagccatgtggacacagtgacctgtgcatggattgtgccttgcagctggagacctgcccattgtgtcgtaaagaaatagtatctagaatcagacagatttctcatatttcatgacacatgtgaagaggcatcgtggacttttttctactcaattccagccaatgttgaaaagaaaaagaaaaaaaaaactctctaatcagttgtacacacattgaaacttatagccatggccagattttatgctaaaaatggtagtttgtcaaagacaaaattctcttagaatctaatccaacttgccagccctgagaaaatcccttttaaggccaaggaaagctgaatgctagcagccaggcctgtggtacttccatgagaaaccatagcagacaatgccctcccaagtactgaaatcacactggaatcccccttgttgggttcatttgattgtttaacacaggatgtgttgtgtcattctgaagtttttatttggggcagaagtctttatggagatgtaaatgacagcgtttctgggttatgcataacttctcactggtcagagacaccggtgtgtcaagcatggatattgcattgcaagacttgaatctataaaaattagaatcacacagtcagtactacaagcaaaacagagaacctgaaagaaggtgcacagactgtaagaaaaaacccaagtttgtgatatttcagtgattccaaagaacattctaggtttttgtttgtttttttgtttttgggttttttttttttactgcagaaaattggtggtattttcacattcatagtgtttctatccaatttcagtacccacatttaatgaggaaaaaatgttttaccaatgaaggaggaattcttaaattagctgtaatgttaggttggagaaaatttggtatttagggtattttcaaggtaccatcaaatcagatttctgtttttttgttaaaaaaaatttttttaatcagtattgtttttacaagtaatatactttgaaactcttgaactaatagtctcaaaaactctagaggacagtctgagaacacgtatttctattgttctaaataaatacatgtttttgaatagttcaatcatgaattattgactatgtcttcatcaaaagtgttaatccctctcagggtctctggtgaagaccttcaagagtttggttttttctcccaggaaattggaaggtagaattgtaaattcatagaacttcttttataatggtgtacctcagcagctgcctttcaatttatgccaagtccttacagagtttatacttgaatagtaaatatgtcttctgagttttacagtgtcttaaactcaatgcacatttttttttcttctttttccaccccttcttgtttgtagttcattatacctgtcctattacagaactgatttccttcctggctgtacatgttggggtgctggatttttttccgtgtctttagtcttccataaatccacacacacacacacacacaaaaaatatatatatatataaatatatatgtaggatacatgttctcttctttagcttgtggtgaatacagtaatttgcattgaagaataaaacatctgttgccttttttgactaaaatttca

SEQ ID NO: 423885 - DNA, 2462 bp, Homo sapiens
gcctactactactaaattcgcggccgcgtcgacgtgaccggcttgtcacattggagtcctgggctaatgatcctgattatctgaaacgtcaagttggtttctgtgcccagtggagcttagacaatctctttttaaaagaaggtagacagctgacctatgagaaagtgaacttgagtagcattagggccatgctgaatagcaatgatgtcagcgagtacctgaagatctcacctcatggcttagaggctcgctgtgatgcctcctcttttgaaagtgtgcgttgcaccttttgtgtggatgccggggtatggtactatgaagtaacagtggtcacttctggcgtcatgcagattggctgggccactcgagacagcaaattcctcaatcatgaaggctacggcattggggatgatgaatactcctgtgcgtatgatggctgccggcagctgatttggtacaatgccagaagtaagcctcacatacacccatgctggaaagaaggagatacagtaggatttctgttagacttgaatgaaaagcaaatgatcttctttttaaatggcaaccagctgcctcctgaaaagcaagtcttttcatctactgtatctggattttttgctgcagctagtttcatgtcatatcaacaatgtgagttcaattttggagcaaaaccattcaaatacccaccatctatgaaatttagcacttttaatgactacgccttcctaacagctgaagaaaaaatcattttgccaaggcacaggcgtcttgctctgttgaagcaagtcagtatccgagaaaactgctgttccctttgttgtgatgaggtagcagacacacaattgaagccatgtggacacagtgacctgtgcatggattgtgccttgcagctggagacctgcccattgtgtcgtaaagaaatagtatctagaatcagacagatttctcatatttcatgacacatgtgaagaggcatcgtggacttttttctactcaattccagccaatgttgaaaagaaaaagaaaaaaaaaactctctaatcagttgtacacacattgaaacttatagccatggccagattttatgctaaaaatggtagtttgtcaaagacaaaattctcttagaatctaatccaacttgccagccctgagaaaatcccttttaaggccaaggaaagctgaatgctagcagccaggcctgtggtacttccatgagaaaccatagcagacaatgccctcccaagtactgaaatcacactggaatcccccttgttgggttcatttgattgtttaacacaggatgtgttgtgtcattctgaagtttttatttggggcagaagtctttatggagatgtaaatgacagcgtttctgggttatgcataacttctcactggtcagagacaccggtgtgtcaagcatggatattgcattgcaagacttgaatctataaaaattagaatcacacagtcagtactacaagcaaaacagagaacctgaaagaaggtgcacagactgtaagaaaaaacccaagtttgtgatatttcagtgattccaaagaacattctaggtttttgtttgtttttttgtttttgggttttttttttttactgcagaaaattggtggtattttcacattcatagtgtttctatccaatttcagtacccacatttaatgaggaaaaaatgttttaccaatgaaggaggaattcttaaattagctgtaatgttaggttggagaaaatttggtatttagggtattttcaaggtaccatcaaatcagatttctgtttttttgttaaaaaaaatttttttaatcagtattgtttttacaagtaatatactttgaaactcttgaactaatagtctcaaaaactctagaggacagtctgagaacacgtatttctattgttctaaataaatacatgtttttgaatagttcaatcatgaattattgactatgtcttcatcaaaagtgttaatccctctcagggtctctggtgaagaccttcaagagtttggttttttctcccaggaaattggaaggtagaattgtaaattcatagaacttcttttataatggtgtacctcagcagctgcctttcaatttatgccaagtccttacagagtttatacttgaatagtaaatatgtcttctgagttttacagtgtcttaaactcaatgcacatttttttttcttctttttccaccccttcttgtttgtagttcattatacctgtcctattacagaactgatttccttcctggctgtacatgttggggtgctggatttttttccgtgtctttagtcttccataaatccacacacacacacacacacaaaaaatatatatatatataaatatatatgtaggatacatgttctcttctttagcttgtggtgaatacagtaatttgcattgaagaataaaacatctgttgccttttttgactaaaatttca

SEQ ID NO: 423886 - DNA, 2150 bp, Homo sapiens
agtgcaatggctggccggactgcaatggctggccggagtgcggctgggccactcgagacagcaaattcctcaatcatgaaggctacggcattggggatgatgaatactcctgtgcgtatgatggctgccggcagctgatttggtacaatgccagaagtaagcctcacatacacccatgctggaaagaaggagatacagtaggatttctgttagacttgaatgaaaagcaaatgatcttctttttaaatggcaaccagctgcctcctgaaaagcaagtcttttcatctactgtatctggattttttgctgcagctagtttcatgtcatatcaacaatgtgagttcaattttggagcaaaaccattcaaatacccaccatctatgaaatttagcacttttaatgactacgccttcctaacagctgaagaaaaaatcattttgccaaggcacaggcgtcttgctctgttgaagcaagtcagtatccgagaaaactgctgttccctttgttgtgatgaggtagcagacacacaattgaagccatgtggacacagtgacctgtgcatggattgtgccttgcagctggagacctgcccattgtgtcgtaaagaaatagtatctagaatcagacagatttctcatatttcatgacacatgtgaagaggcatcgtggacttttttctactcaattccagccaatgttgaaaagaaaaagaaaaaaaaaactctctaatcagttgtacacacattgaaacttatagccatggccagattttatgctaaaaatggtagtttgtcaaagacaaaattctcttagaatctaatccaacttgccagccctgagaaaatcccttttaaggccaaggaaagctgaatgctagcagccaggcctgtggtacttccatgagaaaccatagcagacaatgccctcccaagtactgaaatcacactggaatcccccttgttgggttcatttgattgtttaacacaggatgtgttgtgtcattctgaagtttttatttggggcagaagtctttatggagatgtaaatgacagcgtttctgggttatgcataacttctcactggtcagagacaccggtgtgtcaagcatggatattgcattgcaagacttgaatctataaaaattagaatcacacagtcagtactacaagcaaaacagagaacctgaaagaaggtgcacagactgtaagaaaaaacccaagtttgtgatatttcagtgattccaaagaacattctaggtttttgtttgtttttttgtttttgggttttttttttttactgcagaaaattggtggtattttcacattcatagtgtttctatccaatttcagtacccacatttaatgaggaaaaaatgttttaccaatgaaggaggaattcttaaattagctgtaatgttaggttggagaaaatttggtatttagggtattttcaaggtaccatcaaatcagatttctgtttttttgttaaaaaaaatttttttaatcagtattgtttttacaagtaatatactttgaaactcttgaactaatagtctcaaaaactctagaggacagtctgagaacacgtatttctattgttctaaataaatacatgtttttgaatagttcaatcatgaattattgactatgtcttcatcaaaagtgttaatccctctcagggtctctggtgaagaccttcaagagtttggttttttctcccaggaaattggaaggtagaattgtaaattcatagaacttcttttataatggtgtacctcagcagctgcctttcaatttatgccaagtccttacagagtttatacttgaatagtaaatatgtcttctgagttttacagtgtcttaaactcaatgcacatttttttttcttctttttccaccccttcttgtttgtagttcattatacctgtcctattacagaactgatttccttcctggctgtacatgttggggtgctggatttttttccgtgtctttagtcttccataaatccacacacacacacacacacaaaaaatatatatatatataaatatatatgtaggatacatgttctcttctttagcttgtggtgaatacagtaatttgcattgaagaataaaacatctgttgccttttttgactaaaatttca

SEQ ID NO: 423887 - DNA, 1593 bp, Homo sapiens
ttgatatcgaattcggcacgaggggagggctggggcggtacgaagcgggggtgggctctgcgcgtaatggcagcgccgtggcctcgcgtccatctttgccgttctctcggacctgtcacaaaggagtcgcgccgccgccgccgccccctccctccggtgggcccgggaggtagagaaaaactgccattggatgtccagaatcccctgtagttgataatgttgggaataagctctgcaactttctttggcattcagttgttaaaaacaaataggatgcaaattcctcaactccaggttatgaaaacagtacttggaaaactgaaaactacctaaatgatcgtctttggttgggccgtgttcttagcgagcagaagccttggccagggtctgttgttgactctcgaagagcacatagcccacttcctagggactggaggtgccgctactaccatgggtaattcctgtatctgccgagatgacagtggaacagatgacagtgttgacacccaacagcaacaggccgagaacagtgcagtacccactgctgacacaaggagccaaccacgggaccctgttcggccaccaaggaggggccgaggacctcatgagccaaggagaaagaaacaaaatgtggatgggctagtgttggacacactggcagtaatacggactcttgtagataatgatcaggaacctccctattcaatgataacattacacgaaatggcagaaacagatgaaggatggttggatgttgtccagtctttaattagagttattccactggaagatccactgggaccagctgttataacattgttactagatgaatgtccattgcccactaaagatgcactccagaaattgactgaaattctcaatttaaatggagaagtagcttgccaggactcaagccatcctgccaaacacaggaacacatctgcagtcctaggctgcttggccgagaaactagcaggtcctgcaagtataggtttacttagcccaggaatactggaatacttgctacagtgtctgaagttacagtcccaccccacagtcatgctttttgcacttatcgcactggaaaagtttgcacagacaagtgaaaataaattgactatttctgaatccagtattagtgaccggcttgtcacattggagtcctgggctaatgatcctgattatctgaaacgtcaagttggtttctgtgcccagtggagcttagacaatctctgtaagtgggagttgtcctttattaaaatgtccgtttccatttccagactcatttctttcataggctcactggtcttccttttgcaatggtaagtatgagtcctcataaggacctctactggcaggttggatatattctagcagaaaagtatcctagagaccctttagacaagaattacatggtatgcttctaatttcagcattttcctgttcaaaaacctttactggcacccagtttcctgctgcatcaaagcccttaattatatggcactgtctaaccagctctttccaacacaaatcatcccactgtcctacaaacaggtcctgatgattcctacctctggcctattcccctcactt

SEQ ID NO: 423888 - DNA, 3115 bp, Homo sapiens
agcgggttccacttgaccgctctaagccgccgcgcagcctgcgttttctccggtacaggttgaggctactaaggtatttggctattataaataaaatagtgatgaacacgtgtacaggtgtttgtacggacataagttgtcatttctcttgagtaaatacctaaaagtgggcttgctggagttttactacccttggatgctgctgttgacatggaaaagattgaggaacaatttgctaatctgcacattgttaaatgttccttaggaaccaaagagcccacttaccttcttggtatagacacatcaaagactgtccaagcaggaaaggaaaacttggttgctgttttatgttctaatggatcaatcagaatatatgataaagaaaggttaaatgtactacgagaatttagtggatatcctggacttcttaatggagtcagatttgcaaattcctgtgacagtgtatattcagcatgtactgatggcactgtgaaatgctgggatgctcgagtagccagagaaaaacctgttcagctcttcaagggttacccttccaatatttttatcagttttgatattaattgtaatgatcatattatttgtgctggtacagaaaaagttgatgatgatgcattgttggtgttttgggatgcaaggatgaattctcagaatttatctacaactaaagactcacttggtgcatattcagagacacatagtgatgatgtcactcaagtacgtttccatcccagcaatcccaacatggtagtctcaggttcatctgatggcctggtaaatgtatttgatattaatattgataatgaggaggatgcactggttacaacctgtaactcaatttcatcagtaagctgtattggttggtctgggaaaggttataaacagatttactgcatgacacatgatgaaggattttattggtgggatcttaatcatctggacactgatgaaccagttacacgtttgaacatccaggatgtcagagaagtagttaacatgaaagaagatgctttggactatttgattggtggcctatatcatgaaaagacagacacattgcatgttattggaggaacaaacaaaggaaggattcatttgatgaactgcagcatgtcaggactgacccatgtgactagccttcagggagggcatgctgctacagtccgttctttctgttggaatgtgcaagatgattctttgttgactggaggagaagatgcacagttgttactttggaaacctggagctatagagaagacctttacaaagaaagagagtatgaaaatagcatcctctgtgcaccaacgagtacgagttcatagtaatgattcttataaaagaaggaaaaagcagtgataatgcatttggcactttgtttggtaggttttatagtttcaaatagtccttcttgtttactacccatggtagacatgtttaaagctttatgtaaaaacaagccagttagcaaacagtcctggaaaaatatggtgagaatggtttaattccggtcttcacatattctaaaaaattttaaagcctctaagtataaaatcagtgagttgaaagtaaaatttcttatttaaagaacccatctgttaatgtagtaaatgttggctttaaagaaatagctccgataaggactttttagaaggaaatacttggtaaaacttaataaaacaggtggttggctgcattttttaagcccagttttttacattttaaattgtctttattgtgtataaaaccagattagactatattcttcatctgaggagcatctatatgtttaatacacctaatgtattatgctggagtatttaaatgtaagtattttaatgagtaaatagaattaaccttttttacaaatgaaatgataggcatctatgtaaagtgagaaaaatatgtttcgtaaatatttgcatctttaatattgttagtaagtagtaaacaggtgttttgctgattgaaaggaagttatcttggtaaattgagactcaaagtgaaatacaaaaatgaaaatatttataataggactcgacttggagaaattgctattcttcctgttgtccaaaccataaatctgaggataacctgggcttttctctttcctcttctcctaaccagtttttcaccaagtcctgtgccatttcacctcctaacgtctgtcagctatccttttgcctttacctcaccactattaccctagagaagactttcattatttctcatctggattaccagctcgatctctaatctgcttcagttcatccttcttgctacttctaggctaaacatcaaaaacagatctggtaggggcggggaaatgagggggaagaaacaaaaacgtgatggtgcctcatgctgcttaaaatcttcagtacattgatgttttgatggcggactacataagcgttaaaaattgtgtttttcagaatctttaaaatataagacagtgctatctagtgaataaaaaaattagtttgaaagatatctggagaaatcgcattcataaaacaattggaagtgaaactattaaaacaatagggctttttaaaattaaaaatatttaaaattcaaaagtaattaatagtgttggaagatgtaggtgagaaaatattcctgaaagtagaactgaaagagacaaagagaaaagatgaaagccacagaagataaatacaggggtcaaaaccagactaacagttttagaaagtgaaaaaagttaaaaaagaaatgggggcagtgggttattagaaataacataaatggctggtatggtttgtctgtgtcctcacccaaatttcatctcgaattgtaatccccataatccccatgtgtctagggagagacctggtgggaggtgattggatcatgggggtggtttcccctacgatgttctcctgatagtgggtgagttctcacaagatctgatggttttataaagggctctgcccctttaactcctcactctttctcctgaagccttgtgaagaaggtgctttgcttcccctttgcgttcccccatgattgtaagtttcttgaggcctccctggccatgctgaactcttcagtcaattaaacactttcctttataaattac

SEQ ID NO: 423889 - DNA, 3239 bp, Homo sapiens
ttcagggaaagacctgtttcctcctgctctttcctctccacggatactctccccaccactaaaagggtttagtataatccttttgtaggccagaaagcagattttcacttgggaagagacgacccgtagtatgggatgtggtatgataccagcaactggtctattatatcatttaaaccacatggctatctaaagaggtatttggctattataaataaaatagtgatgaacacgtgtacaggtgtttgtacggacataagttgtcatttctcttgagtaaatacctaaaagtgggcttgctggagttttactacccttggatgctgctgttgacatggaaaagattgaggaacaatttgctaatctgcacattgttaaatgttccttaggaaccaaagagcccacttaccttcttggtatagacacatcaaagactgtccaagcaggaaaggaaaacttggttgctgttttatgttctaatggatcaatcagaatatatgataaagaaaggttaaatgtactacgagaatttagtggatatcctggacttcttaatggagtcagatttgcaaattcctgtgacagtgtatattcagcatgtactgatggcactgtgaaatgctgggatgctcgagtagccagagaaaaacctgttcagctcttcaagggttacccttccaatatttttatcagttttgatattaattgtaatgatcatattatttgtgctggtacagaaaaagttgatgatgatgcattgttggtgttttgggatgcaaggatgaattctcagaatttatctacaactaaagactcacttggtgcatattcagagacacatagtgatgatgtcactcaagtacgtttccatcccagcaatcccaacatggtagtctcaggttcatctgatggcctggtaaatgtatttgatattaatattgataatgaggaggatgcactggttacaacctgtaactcaatttcatcagtaagctgtattggttggtctgggaaaggttataaacagatttactgcatgacacatgatgaaggattttattggtgggatcttaatcatctggacactgatgaaccagttacacgtttgaacatccaggatgtcagagaagtagttaacatgaaagaagatgctttggactatttgattggtggcctatatcatgaaaagacagacacattgcatgttattggaggaacaaacaaaggaaggattcatttgatgaactgcagcatgtcaggactgacccatgtgactagccttcagggagggcatgctgctacagtccgttctttctgttggaatgtgcaagatgattctttgttgactggaggagaagatgcacagttgttactttggaaacctggagctatagagaagacctttacaaagaaagagagtatgaaaatagcatcctctgtgcaccaacgagtacgagttcatagtaatgattcttataaaagaaggaaaaagcagtgataatgcatttggcactttgtttggtaggttttatagtttcaaatagtccttcttgtttactacccatggtagacatgtttaaagctttatgtaaaaacaagccagttagcaaacagtcctggaaaaatatggtgagaatggtttaattccggtcttcacatattctaaaaaattttaaagcctctaagtataaaatcagtgagttgaaagtaaaatttcttatttaaagaacccatctgttaatgtagtaaatgttggctttaaagaaatagctccgataaggactttttagaaggaaatacttggtaaaacttaataaaacaggtggttggctgcattttttaagcccagttttttacattttaaattgtctttattgtgtataaaaccagattagactatattcttcatctgaggagcatctatatgtttaatacacctaatgtattatgctggagtatttaaatgtaagtattttaatgagtaaatagaattaaccttttttacaaatgaaatgataggcatctatgtaaagtgagaaaaatatgtttcgtaaatatttgcatctttaatattgttagtaagtagtaaacaggtgttttgctgattgaaaggaagttatcttggtaaattgagactcaaagtgaaatacaaaaatgaaaatatttataataggactcgacttggagaaattgctattcttcctgttgtccaaaccataaatctgaggataacctgggcttttctctttcctcttctcctaaccagtttttcaccaagtcctgtgccatttcacctcctaacgtctgtcagctatccttttgcctttacctcaccactattaccctagagaagactttcattatttctcatctggattaccagctcgatctctaatctgcttcagttcatccttcttgctacttctaggctaaacatcaaaaacagatctggtaggggcggggaaatgagggggaagaaacaaaaacgtgatggtgcctcatgctgcttaaaatcttcagtacattgatgttttgatggcggactacataagcgttaaaaattgtgtttttcagaatctttaaaatataagacagtgctatctagtgaataaaaaaattagtttgaaagatatctggagaaatcgcattcataaaacaattggaagtgaaactattaaaacaatagggctttttaaaattaaaaatatttaaaattcaaaagtaattaatagtgttggaagatgtaggtgagaaaatattcctgaaagtagaactgaaagagacaaagagaaaagatgaaagccacagaagataaatacaggggtcaaaaccagactaacagttttagaaagtgaaaaaagttaaaaaagaaatgggggcagtgggttattagaaataacataaatggctggtatggtttgtctgtgtcctcacccaaatttcatctcgaattgtaatccccataatccccatgtgtctagggagagacctggtgggaggtgattggatcatgggggtggtttcccctacgatgttctcctgatagtgggtgagttctcacaagatctgatggttttataaagggctctgcccctttaactcctcactctttctcctgaagccttgtgaagaaggtgctttgcttcccctttgcgttcccccatgattgtaagtttcttgaggcctccctggccatgctgaactcttcagtcaattaaacactttcctttataaattac

SEQ ID NO: 423890 - DNA, 1835 bp, Homo sapiens
ttcagggaaagacctgtttcctcctgctctttcctctccacggatactctccccaccactaaaagggtttagtataatccttttgtaggccagaaagcagattttcacttgggaagagacgacccgtagtatgggatgtggtatgataccagcaactggtctattatatcatttaaaccacatggctatctaaagaggtatttggctattataaataaaatagtgatgaacacgtgtacaggtgtttgtacggacataagttgtcatttctcttgagtaaatacctaaaagtgggcttgctggagttttactacccttggatgctgctgttgacatggaaaagattgaggaacaatttgctaatctgcacattgttaaatgttccttaggaaccaaagagcccacttaccttcttggtatagacacatcaaagactgtccaagcaggaaaggaaaacttggttgctgttttatgttctaatggatcaatcagaatatatgataaagaaaggttaaatgtactacgagaatttagtggatatcctggacttcttaatggagtcagatttgcaaattcctgtgacagtgtatattcagcatgtactgatggcactgtgaaatgctgggatgctcgagtagccagagaaaaacctgttcagctcttcaagggttacccttccaatatttttatcagttttgatattaattgtaatgatcatattatttgtgctggtacagaaaaagttgatgatgatgcattgttggtgttttgggatgcaaggatgaattctcagaatttatctacaactaaagactcacttggtgcatattcagagacacatagtgatgatgtcactcaagtacgtttccatcccagcaatcccaacatggtagtctcaggttcatctgatggcctggtaaatgtatttgatattaatattgataatgaggaggatgcactggttacaacctgtaactcaatttcatcagtaagctgtattggttggtctgggaaaggttataaacagatttactgcatgacacatgatgaaggattttattggtgggatcttaatcatctggacactgatgaaccagttacacgtttgaacatccaggatgtcagagaagtagttaacatgaaagaagatgctttggactatttgattggtggcctatatcatgaaaagacagacacattgcatgttattggaggaacaaacaaaggaaggattcatttgatgaactgcagcatgtcaggactgacccatgtgactagccttcagggagggcatgctgctacagtccgttctttctgttggaatgtgcaagatgattctttgttgactggaggagaagatgcacagttgttactttggaaacctggagctatagagaagacctttacaaagaaagagagtatgaaaatagcatcctctgtgcaccaacgagtacgagttcatagtaatgattcttataaaagaaggaaaaagcagtgataatgcatttggcactttgtttggtaggttttatagtttcaaatagtccttcttgtttactacccatggtagacatgtttaaagctttatgtaaaaacaagccagttagcaaacagtcctggaaaaatatggtgagaatggtttaattccggtcttcacatattctaaaaaattttaaagcctctaagtataaaatcagtgagttgaaagtaaaatttcttatttaaagaacccatctgttaatgtagtaaatgttggctttaaagaaatagctccgataaggactttttagaaggaaatacttggtaaaacttaataaaacaggtggttggctgca

SEQ ID NO: 423891 - DNA, 432 bp, Homo sapiens
caaagaaacttctgcgggtcaggctgctgttgccggtgcagttcccagtacttcctctggggcgtttttcaataaaagccaaacgcccttgctcattttcagggaaagacctgtttcctcctgctctttcctctccacggatactctccccaccactaaaagggtttagtataatccttttgtaggccagaaagcagattttcacttgggaagagacgacccgtagtatgggatgtggtatgataccagcaactggtctattatatcatttaaaccacatggctatctaaagaggtaggtactgtgagtgttctcattttcacgcgaagcagtgttagacattactcattcttgtgttttctttagcttgtctctgacaaattgtggcattcagcttccatggatgtaaaattaaaagatggtataatttgt

SEQ ID NO: 423892 - DNA, 3147 bp, Homo sapiens
ttcagggaaagacctgtttcctcctgctctttcctctccacggatactctccccaccactaaaagggtttagtataatccttttgtaggccagaaagcagattttcacttgggaagagacgacccgtagtatgggatgtggtatgataccagcaactggtctattatatcatttaaaccacatggctatctaaagaggtatttggctattataaataaaatagtgatgaacacgtgtacaggtgtttgtacggacataagttgtcatttctcttgagtaaatacctaaaagtgggcttgctggagttttactacccttggatgctgctgttgacatggaaaagattgaggaacaatttgctaatctgcacattgttaaatgttccttaggaaccaaagagcccacttaccttcttggtatagacacatcaaagactgtccaagcaggaaaggaaaacttggttgctgttttatgttctaatggatcaatcagaatatatgataaagaaaggttaaatgtactacgagaatttagtggatatcctggacttcttaatggagtcagatttgcaaattcctgtgacagtgtatattcagcatgtactgatggcactgtgaaatgctgggatgctcgagtagccagagaaaaacctgttcagctcttcaagggttacccttccaatatttttatcagttttgatattaattgtaatgatcatattatttgtgctggtacagaaaaagttgatgatgatgcattgttggtgttttgggatgcaaggatgaattctcagaatttatctacaactaaagactcacttggtgcatattcagagacacatagtgatgatgtcactcaagtacgtttccatcccagcaatcccaacatggtagtctcaggttcatctgatggcctggtaaatgtatttgatattaatattgataatgaggaggatgcactggttacaacctgtaactcaatttcatcagtaagctgtattggttggtctgggaaaggttataaacagatttactgcatgacacatgatgaaggattttattggtgggatcttaatcatctggacactgatgaaccagttacacgtttgaacatccaggatgtcagagaagtagttaacatgaaagaagatgctttggactatttgattggtggcccatgtgactagccttcagggagggcatgctgctacagtccgttctttctgttggaatgtgcaagatgattctttgttgactggaggagaagatgcacagttgttactttggaaacctggagctatagagaagacctttacaaagaaagagagtatgaaaatagcatcctctgtgcaccaacgagtacgagttcatagtaatgattcttataaaagaaggaaaaagcagtgataatgcatttggcactttgtttggtaggttttatagtttcaaatagtccttcttgtttactacccatggtagacatgtttaaagctttatgtaaaaacaagccagttagcaaacagtcctggaaaaatatggtgagaatggtttaattccggtcttcacatattctaaaaaattttaaagcctctaagtataaaatcagtgagttgaaagtaaaatttcttatttaaagaacccatctgttaatgtagtaaatgttggctttaaagaaatagctccgataaggactttttagaaggaaatacttggtaaaacttaataaaacaggtggttggctgcattttttaagcccagttttttacattttaaattgtctttattgtgtataaaaccagattagactatattcttcatctgaggagcatctatatgtttaatacacctaatgtattatgctggagtatttaaatgtaagtattttaatgagtaaatagaattaaccttttttacaaatgaaatgataggcatctatgtaaagtgagaaaaatatgtttcgtaaatatttgcatctttaatattgttagtaagtagtaaacaggtgttttgctgattgaaaggaagttatcttggtaaattgagactcaaagtgaaatacaaaaatgaaaatatttataataggactcgacttggagaaattgctattcttcctgttgtccaaaccataaatctgaggataacctgggcttttctctttcctcttctcctaaccagtttttcaccaagtcctgtgccatttcacctcctaacgtctgtcagctatccttttgcctttacctcaccactattaccctagagaagactttcattatttctcatctggattaccagctcgatctctaatctgcttcagttcatccttcttgctacttctaggctaaacatcaaaaacagatctggtaggggcggggaaatgagggggaagaaacaaaaacgtgatggtgcctcatgctgcttaaaatcttcagtacattgatgttttgatggcggactacataagcgttaaaaattgtgtttttcagaatctttaaaatataagacagtgctatctagtgaataaaaaaattagtttgaaagatatctggagaaatcgcattcataaaacaattggaagtgaaactattaaaacaatagggctttttaaaattaaaaatatttaaaattcaaaagtaattaatagtgttggaagatgtaggtgagaaaatattcctgaaagtagaactgaaagagacaaagagaaaagatgaaagccacagaagataaatacaggggtcaaaaccagactaacagttttagaaagtgaaaaaagttaaaaaagaaatgggggcagtgggttattagaaataacataaatggctggtatggtttgtctgtgtcctcacccaaatttcatctcgaattgtaatccccataatccccatgtgtctagggagagacctggtgggaggtgattggatcatgggggtggtttcccctacgatgttctcctgatagtgggtgagttctcacaagatctgatggttttataaagggctctgcccctttaactcctcactctttctcctgaagccttgtgaagaaggtgctttgcttcccctttgcgttcccccatgattgtaagtttcttgaggcctccctggccatgctgaactcttcagtcaattaaacactttcctttataaattac

SEQ ID NO: 423893 - DNA, 2295 bp, Homo sapiens
  misc_feature (548)..(548): n is a, c, g, or t
ggagagtagggtgcagggagggtaccttacgaaacagcgcacttcgggccctgcacgctacctcatttccctaatagggatgaaaagctcaggcctctggtagcttccagctgacgccagtgctctctccacaccccttttttgacaggattatccggggttgaacgctgtgtcacaaatacgaattcccgcgaccacgtctaagtggtctaacaatcaatcaagcatcttttacaaaaccaaacccttcccccatcccgttccctccatctctctccctagccaaacaaacctaggagagtcctcaagatggattttcacaaatcctgcagcgcactaactgggaggaagaaacgatacagaaaataagagtgtcggccatccccctctctgcaaccgaaattacaggctccatttcctgtccccttgggaactgcaaaatcctctgctgaaaaccggacgcctcccagcccctccaggccggcgcacgcggccgccgcgctcccccttcccgggccccgtgggcgccagggggcggcggggacccncggcgccctcccctccccctccccgcacggcacccacctcggggcagcggcttcacctccccgttctcctcccgggaggccccgccggcctctcgggccccaccgagaccgtgcctcctcctctccttctcccgcttctccttaggtctgcgcgacttggcgttagccgaggcagcggcggcggcggcgggcaggaggagatggtgaggctgagcgtgcagcagcgtaggagggaccagcagtttgcgcggcaccggctgagacaaggaagcggaggctgaggagggaacggccgtgccagcggagaaagagaaactgctccgagaagaggacggggagggagcagcagacagaggggcaaagctccaagacgcggggctgccatagctctgaggcgaaggtgctgccggcggctgcagctgcctgctgttcccgccgctgcccccttctccgttcactctccgcggtgccttcttctcctcagtccggaccttcttggcggacagagaacccggagggtcccgggaggagagttgcagcttgccaaacggttctttctccgagacggtggcggtgggggccgcggcagcgacacagtgcacggggctcggcggttccgccattttgcgctcctgttgtatttactctcctccgctagccggcgcggggcagggggcgggccctccgcgaggggtagggaaggggcggagcggccaggccaccagccggcattgctccattgggcaagccacgctgagggatccacctaagagccaatcaaaggcacaaacatcagacgaaggggcgggatcgccacagggaccctcttcggaggtcagagctcggcggggtgcggctagtggcggagcgcgctgcgaggggagggctttccactgtcgctggcgtgaactcgcgtgcccggtgggtatcagggaagaacccccgccccggacccccagatctgccatggccgaggtagcgatcgtctctgcggccacgaagactgttttaacttgtaccactttcccttccatttttcctggggtgcctctcaccctgcatctgcgcgttcagcaagctggatttcgggaatgctcagttcagaagagaaaaaattgccgggaatcaagtccttctttttgttagtcggtagtcgattgatgggaagtgttcaaaatcattcgatgtggtgacaaggcttcaccaggtactgccttctaacgagctggccatttccacatgtcagataggaccaacttgccttttaactacccgtgtgatacttaaacactgttgccggtatcacagcttttcttcaaaacaggaagcaacgagaatgagggcattccagtagcaggagacagcatgcatagagatgctgatgaagaaagagcctagcgcacgtgggaaactgcaaaagttcagactggttggaatgctggaaatgttgtgaatgacaggagatgaggctggcgagaaaacagaggtcagattgtggaaggctgtcaagccaaagactttgattttattcttgagattgatgagatgtgtgtaatccaggagtgtgcaaaacaatctgtaagggttcagaaaacatactgcttctatatatagttacctttgtcttaacttgaaaatttcaaattgtgtaggagttacaatgtgtgtaattgttattatagtactggatccaaataatttataaataaataaatatagacataatatggtgtattacaggttaaat

SEQ ID NO: 423894 - DNA, 2674 bp, Homo sapiens
  misc_feature (548)..(548): n is a, c, g, or t
ggagagtagggtgcagggagggtaccttacgaaacagcgcacttcgggccctgcacgctacctcatttccctaatagggatgaaaagctcaggcctctggtagcttccagctgacgccagtgctctctccacaccccttttttgacaggattatccggggttgaacgctgtgtcacaaatacgaattcccgcgaccacgtctaagtggtctaacaatcaatcaagcatcttttacaaaaccaaacccttcccccatcccgttccctccatctctctccctagccaaacaaacctaggagagtcctcaagatggattttcacaaatcctgcagcgcactaactgggaggaagaaacgatacagaaaataagagtgtcggccatccccctctctgcaaccgaaattacaggctccatttcctgtccccttgggaactgcaaaatcctctgctgaaaaccggacgcctcccagcccctccaggccggcgcacgcggccgccgcgctcccccttcccgggccccgtgggcgccagggggcggcggggacccncggcgccctcccctccccctccccgcacggcacccacctcggggcagcggcttcacctccccgttctcctcccgggaggccccgccggcctctcgggccccaccgagaccgtgcctcctcctctccttctcccgcttctccttaggtctgcgcgacttggcgttagccgaggcagcggcggcggcggcgggcaggaggagatggtgaggctgagcgtgcagcagcgtaggagggaccagcagtttgcgcggcaccggctgagacaaggaagcggaggctgaggagggaacggccgtgccagcggagaaagagaaactgctccgagaagaggacggggagggagcagcagacagaggggcaaagctccaagacgcggggctgccatagctctgaggcgaaggtgctgccggcggctgcagctgcctgctgttcccgccgctgcccccttctccgttcactctccgcggtgccttcttctcctcagtccggaccttcttggcggacagagaacccggagggtcccgggaggagagttgcagcttgccaaacggttctttctccgagacggtggcggtgggggccgcggcagcgacacagtgcacggggctcggcggttccgccattttgcgctcctgttgtatttactctcctccgctagccggcgcggggcagggggcgggccctccgcgaggggtagggaaggggcggagcggccaggccaccagccggcattgctccattgggcaagccacgctgagggatccacctaagagccaatcaaaggcacaaacatcagacgaaggggcgggatcgccacagggaccctcttcggaggtcagagctcggcggggtgcggctagtggcggagcgcgctgcgaggggagggctttccactgtcgctggcgtgaactcgcgtgcccggtgggtatcagggaagaacccccgccccggacccccagatctgccatggccgaggtagcgatcgtctctgcggccacgaagactgttttaacttgtaccactttcccttccatttttcctggggtgcctctcaccctgcatctgcgcgttcagcaagctggatttcgggaatgctcagttcagaagagaaaaaattgccgggaatcaagtccttctttttgttagtcggtagtcgattgatgggaagtgttcaaaatcattcgatgtggtgacaaggcttcaccaggtactgccttctaacgagctggccatttccacatgtcagataggaccaacttgccttttaactacccgtgtgatacttaaacactgttgccggtatcacagcttttcttcaaaacaggtaatattagggacacttgaaatttgggaattagatttacctttgctgttactaaataattgttagaattttaaatgtcatattcattttactcaactaatctctttagctttcctatttatattcctacttatgattacgtgtaattctcattggaaggattaaaatattttgaaagtaagacagtaaaattgtgaaatactttggtattggttacaaaacagtacttaggtaccttcttcctgattttctgtatttttaaaaaataaggccaggcacagtggcaaatgcttatattcccaactgcccagtaagctgaagcaagagaattgcttgagcccaacctgggcaacatagtgaaaccccagtcaccaattaaaaacaaacaaacaaaaagagtatattttttgaagatattttatcacatatacagaagcaaacaaagaggggaaggaattgtttaaaataatgttaagctaaataaagtcaaagaaaatttaagtaatagttaatagttattgttatagaagacatcaatttactaccccgttctcaaaaaggaaaatctgcaagtagactgtagtgctagagtaagcttttccttaatttcagaaagcctgtattaagcatttactttatgccaaactccattttagggactggaaatataaaataaataaaacacagtccctgctctcagtgaacttgttgtctagggaatgttaagtagaaccacctgaaattgcattgtttttgtaagccagctatcggttccacctgacattatatgtggaaacagaaa

SEQ ID NO: 423895 - DNA, 566 bp, Homo sapiens
caataataaagatatgaccacggtgctacggggcactgacaaaatgcttcatgctgcccagggcagtcagtgaaggctccccaggggagatgacgtttgagccgagtttcagaagatgattggagtttaccacgtgttcacaggaagcaacgagaatgagggcattccagtagcaggagacagcatgcatagagatgctgatgaagaaagagcctagcgcacgtgggaaactgcaaaagttcagactggttggaatgctggaaatgttgtgaatgacaggagatgaggctggcgagaaaacagaggtcagattgtggaaggctgtcaagccaaagactttgattttattcttgagattgatgagatgtgtgtaatccaggagtgtgcaaaacaatctgtaagggttcagaaaacatactgcttctatatatagttacctttgtcttaacttgaaaatttcaaattgtgtaggagttacaatgtgtgtaattgttattatagtactggatccaaataatttataaataaataaatatagacataatatggtgtattacaggttaaat

SEQ ID NO: 423896 - DNA, 1097 bp, Homo sapiens
agcggccgctcgcgatctagtctcaccctgcatctgcgcgttcagcaagctggatttcgggaatgctcagttcagaagagaaaaaattgccgggaatcaagtccttctttttgttagtcggtagtcgattgatgggaagtgttcaaaatcattcgatgtggtgacaaggcttcaccaggtactgccttctaacgagctggccatttccacatgtcagataggaccaacttgccttttaactacccgtgtgatacttaaacactgttgccggtatcacagcttttcttcaaaacaggtaatattagggacacttgaaatttgggaattagatttacctttgctgttactaaataattgttagaattttaaatgtcatattcattttactcaactaatctctttagctttcctatttatattcctacttatgattacgtgtaattctcattggaaggattaaaatattttgaaagtaagacagtaaaattgtgaaatactttggtattggttacaaaacagtacttaggtaccttcttcctgattttctgtatttttaaaaaataaggccaggcacagtggcaaatgcttatattcccaactgcccagtaagctgaagcaagagaattgcttgagcccaacctgggcaacatagtgaaaccccagtcaccaattaaaaacaaacaaacaaaaagagtatattttttgaagatattttatcacatatacagaagcaaacaaagaggggaaggaattgtttaaaataatgttaagctaaataaagtcaaagaaaatttaagtaatagttaatagttattgttatagaagacatcaatttactaccccgttctcaaaaaggaaaatctgcaagtagactgtagtgctagagtaagcttttccttaatttcagaaagcctgtattaagcatttactttatgccaaactccattttagggactggaaatataaaataaataaaacacagtccctgctctcagtgaacttgttgtctagggaatgttaagtagaaccacctgaaattgcattgtttttgtaagccagctatcggttccacctgacattatatgtggaaacagaaa

SEQ ID NO: 423897 - DNA, 1340 bp, Homo sapiens
ctgtgatcctatttattactgatgacagtcaaacagtattaagtgtctacaatgggcccagcactgtgtgacaatgtaattaataatataatgagattagtaagcaaagaacatggggaaagactttctaggctgaggaacaagcatttggaaagagatgagagtaatgacacactcaatgtggtattgtttatgagaagttcattgtggttcaaggataagggacacgaagtgccgtaaaaggagagggctctctaaaatgggtgagagccagattgtgtaaagtgttgctcttgactgccttggcatgctgaggagtcagtaaataccttttgttaacttaagggctttaatgaggaagagtgaaaaatgtttacgtaaccattttgacttcctgctcattcctcacaggcttcaccaggtactgccttctaacgagctggccatttccacatgtcagataggaccaacttgccttttaactacccgtgtgatacttaaacactgttgccggtatcacagcttttcttcaaaacaggtaatattagggacacttgaaatttgggaattagatttacctttgctgttactaaataattgttagaattttaaatgtcatattcattttactcaactaatctctttagctttcctatttatattcctacttatgattacgtgtaattctcattggaaggattaaaatattttgaaagtaagacagtaaaattgtgaaatactttggtattggttacaaaacagtacttaggtaccttcttcctgattttctgtatttttaaaaaataaggccaggcacagtggcaaatgcttatattcccaactgcccagtaagctgaagcaagagaattgcttgagcccaacctgggcaacatagtgaaaccccagtcaccaattaaaaacaaacaaacaaaaagagtatattttttgaagatattttatcacatatacagaagcaaacaaagaggggaaggaattgtttaaaataatgttaagctaaataaagtcaaagaaaatttaagtaatagttaatagttattgttatagaagacatcaatttactaccccgttctcaaaaaggaaaatctgcaagtagactgtagtgctagagtaagcttttccttaatttcagaaagcctgtattaagcatttactttatgccaaactccattttagggactggaaatataaaataaataaaacacagtccctgctctcagtgaacttgttgtctagggaatgttaagtagaaccacctgaaattgcattgtttttgtaagccagctatcggttccacctgacattatatgtggaaacagaaa

SEQ ID NO: 423898 - DNA, 387 bp, Homo sapiens
aattaaaaaattgcaatgtacttgaatttcctcaggtatcaccagtctgtgggtacaaaaggagagtaacatgaacgattcaaattccactggctcttgttcccatggattcacagaagttcagccccatttcaaaacttcacatttgcttctgggaagcccattctggaaagtttctctgtggccctctccagaaggcagcgcgacttccacccagcaacacaagtctctgcagcacctgccccagcagcgccagctgagccccggaagctgggaaggcttaagctgactcttctgctgcacatagcaacacggtctctcatgagagaccgtgttacaatgagttaaatgttctctgcctagatcacgaagaagccaggaaggcca

SEQ ID NO: 423899 - DNA, 3417 bp, Homo sapiens
  misc_feature (548)..(548): n is a, c, g, or t
  misc_feature (2706)..(2706): n is a, c, g, or t
ggagagtagggtgcagggagggtaccttacgaaacagcgcacttcgggccctgcacgctacctcatttccctaatagggatgaaaagctcaggcctctggtagcttccagctgacgccagtgctctctccacaccccttttttgacaggattatccggggttgaacgctgtgtcacaaatacgaattcccgcgaccacgtctaagtggtctaacaatcaatcaagcatcttttacaaaaccaaacccttcccccatcccgttccctccatctctctccctagccaaacaaacctaggagagtcctcaagatggattttcacaaatcctgcagcgcactaactgggaggaagaaacgatacagaaaataagagtgtcggccatccccctctctgcaaccgaaattacaggctccatttcctgtccccttgggaactgcaaaatcctctgctgaaaaccggacgcctcccagcccctccaggccggcgcacgcggccgccgcgctcccccttcccgggccccgtgggcgccagggggcggcggggacccncggcgccctcccctccccctccccgcacggcacccacctcggggcagcggcttcacctccccgttctcctcccgggaggccccgccggcctctcgggccccaccgagaccgtgcctcctcctctccttctcccgcttctccttaggtctgcgcgacttggcgttagccgaggcagcggcggcggcggcgggcaggaggagatggtgaggctgagcgtgcagcagcgtaggagggaccagcagtttgcgcggcaccggctgagacaaggaagcggaggctgaggagggaacggccgtgccagcggagaaagagaaactgctccgagaagaggacggggagggagcagcagacagaggggcaaagctccaagacgcggggctgccatagctctgaggcgaaggtgctgccggcggctgcagctgcctgctgttcccgccgctgcccccttctccgttcactctccgcggtgccttcttctcctcagtccggaccttcttggcggacagagaacccggagggtcccgggaggagagttgcagcttgccaaacggttctttctccgagacggtggcggtgggggccgcggcagcgacacagtgcacggggctcggcggttccgccattttgcgctcctgttgtatttactctcctccgctagccggcgcggggcagggggcgggccctccgcgaggggtagggaaggggcggagcggccaggccaccagccggcattgctccattgggcaagccacgctgagggatccacctaagagccaatcaaaggcacaaacatcagacgaaggggcgggatcgccacagggaccctcttcggaggtcagagctcggcggggtgcggctagtggcggagcgcgctgcgaggggagggctttccactgtcgctggcgtgaactcgcgtgcccggtgggtatcagggaagaacccccgccccggacccccagatctgccatggccgaggtagcgatcgtctctgcggccacgaagactgttttaacttgtaccactttcccttccatttttcctggggtgcctctcaccctgcatctgcgcgttcagcaagctggatttcgggaatgctcagttcagaagagaaaaaattgccgggaatcaagtccttctttttgttagtcggtagtcgattgatgggaagtgttcaaaatcattcgatgtggtgacaaggtatcaccagtctgtgggtacaaaaggagagtaacatgaacgattcaaattccactggctcttgttcccatggattcacagaagttcagccccatttcaaaacttcacatttgcttctgggaagcccattctggaaagtttctctgtggccctctccagaaggcagcgcgacttccacccagcaacacaagtctctgcagcacctgccccagcagcgccagctgagccccggaagctgggaaggcttaagctgactcttctgctgcacatagcaaaaaatggtcatttctgtagttgcagctccagatctacaataatcaatctatatccatattttatggggtttttttgagacaaagtcttgctctgttactcaggctggagtgcagtggcattatcatcattcacttgtagccttgacctccctggctcaggtgatcctgtcacctcagccttccaagtagctgagaccacaggcatgcaccactaagcctggctaatttttcaatttttatttttcgtagagacagggtctccctgggttgcccaaactggtcttgaattcctgggctcaagcaatcctcctgtcccggcaccccgaagtgttgggactacaggcatgagccactgtgcacagccctttttgtttttgtttttgtttttgtttttttttaaaggtaatttcccagtggaatcctcgagatttcttcatgtttttggaaaaatgagttacattttagattgttttcctttttggaatttaatggtatacattatattacatagctatgttgagctctatttctattacactaaaaagtaggctaattgtcttaactttcatcagtaatgacattaaatgtgtgaagattatacttggaataaagcacttggattcattcatttcttcagtaaatatttattgagcactagtatgttccaacgagtgtctgtctacatnctggggacaagtgataactaaatccctgtcctcgtggagagttaacaatcaacaaactaacaaacatttaatttatgtcatcaactcatttccacaaatataacaacatcttgacttcaagtttcctgagtttctggtctaaagaattgctaccttcaagagctcaaatcatttgttggggagagaggcctgtgatatattttctcctttacaatgaaagtagctgtaaaaagaggaagagaaattctgagggtaaagataaaaaatgttgaaatcttctttctggatttcagattgagtctcttgccctaattgatgcaatttacactccatgcatctccttccctggaccttctccagttcttggggactacagatgaacttacttttaatgcattttatggcatttggaggccctccagtggacaaatactatacctgaaaaaaatccttttgctgtgctaaagtgttcaggtgtgaagtgtactcatgtttgcaaatcactttgaaatatataaacaaaaatgaattaatggatgaatagagtgatgcatagatcattagacatgtgataaaaataactgttaattgtagaatctagatgatgagtatattatatgatatggcccactgtataattctttcaacttttctgtttgaatgtttgataataaaatattgaataaaaatctttttgctaaagaaatatgc

SEQ ID NO: 423900 - DNA, 2242 bp, Homo sapiens
  misc_feature (548)..(548): n is a, c, g, or t
ggagagtagggtgcagggagggtaccttacgaaacagcgcacttcgggccctgcacgctacctcatttccctaatagggatgaaaagctcaggcctctggtagcttccagctgacgccagtgctctctccacaccccttttttgacaggattatccggggttgaacgctgtgtcacaaatacgaattcccgcgaccacgtctaagtggtctaacaatcaatcaagcatcttttacaaaaccaaacccttcccccatcccgttccctccatctctctccctagccaaacaaacctaggagagtcctcaagatggattttcacaaatcctgcagcgcactaactgggaggaagaaacgatacagaaaataagagtgtcggccatccccctctctgcaaccgaaattacaggctccatttcctgtccccttgggaactgcaaaatcctctgctgaaaaccggacgcctcccagcccctccaggccggcgcacgcggccgccgcgctcccccttcccgggccccgtgggcgccagggggcggcggggacccncggcgccctcccctccccctccccgcacggcacccacctcggggcagcggcttcacctccccgttctcctcccgggaggccccgccggcctctcgggccccaccgagaccgtgcctcctcctctccttctcccgcttctccttaggtctgcgcgacttggcgttagccgaggcagcggcggcggcggcgggcaggaggagatggtgaggctgagcgtgcagcagcgtaggagggaccagcagtttgcgcggcaccggctgagacaaggaagcggaggctgaggagggaacggccgtgccagcggagaaagagaaactgctccgagaagaggacggggagggagcagcagacagaggggcaaagctccaagacgcggggctgccatagctctgaggcgaaggtgctgccggcggctgcagctgcctgctgttcccgccgctgcccccttctccgttcactctccgcggtgccttcttctcctcagtccggaccttcttggcggacagagaacccggagggtcccgggaggagagttgcagcttgccaaacggttctttctccgagacggtggcggtgggggccgcggcagcgacacagtgcacggggctcggcggttccgccattttgcgctcctgttgtatttactctcctccgctagccggcgcggggcagggggcgggccctccgcgaggggtagggaaggggcggagcggccaggccaccagccggcattgctccattgggcaagccacgctgagggatccacctaagagccaatcaaaggcacaaacatcagacgaaggggcgggatcgccacagggaccctcttcggaggtcagagctcggcggggtgcggctagtggcggagcgcgctgcgaggggagggctttccactgtcgctggcgtgaactcgcgtgcccggtgggtatcagggaagaacccccgccccggacccccagatctgccatggccgaggtagcgatcgtctctgcggccacgaagactgttttaacttgtaccactttcccttccatttttcctggggtgcctctcaccctgcatctgcgcgttcagcaagctggatttcgggaatgctcagttcagaagagaaaaaattgccgggaatcaagtccttctttttgttagtcggtagtcgattgatgggaagtgttctggccatttccacatgtcagataggaccaacttgccttttaactacccgtgtgatacttaaacactgttgccggtatcacagcttttcttcaaaacaggaagcaacgagaatgagggcattccagtagcaggagacagcatgcatagagatgctgatgaagaaagagcctagcgcacgtgggaaactgcaaaagttcagactggttggaatgctggaaatgttgtgaatgacaggagatgaggctggcgagaaaacagaggtcagattgtggaaggctgtcaagccaaagactttgattttattcttgagattgatgagatgtgtgtaatccaggagtgtgcaaaacaatctgtaagggttcagaaaacatactgcttctatatatagttacctttgtcttaacttgaaaatttcaaattgtgtaggagttacaatgtgtgtaattgttattatagtactggatccaaataatttataaataaataaatatagacataatatggtgtattacaggttaaat

SEQ ID NO: 423901 - DNA, 961 bp, Homo sapiens
ctgtgatcctatttattactgatgacagtcaaacagtattaagtgtctacaatgggcccagcactgtgtgacaatgtaattaataatataatgagattagtaagcaaagaacatggggaaagactttctaggctgaggaacaagcatttggaaagagatgagagtaatgacacactcaatgtggtattgtttatgagaagttcattgtggttcaaggataagggacacgaagtgccgtaaaaggagagggctctctaaaatgggtgagagccagattgtgtaaagtgttgctcttgactgccttggcatgctgaggagtcagtaaataccttttgttaacttaagggctttaatgaggaagagtgaaaaatgtttacgtaaccattttgacttcctgctcattcctcacaggcttcaccaggtactgccttctaacgagctggccatttccacatgtcagataggaccaacttgccttttaactacccgtgtgatacttaaacactgttgccggtatcacagcttttcttcaaaacaggaagcaacgagaatgagggcattccagtagcaggagacagcatgcatagagatgctgatgaagaaagagcctagcgcacgtgggaaactgcaaaagttcagactggttggaatgctggaaatgttgtgaatgacaggagatgaggctggcgagaaaacagaggtcagattgtggaaggctgtcaagccaaagactttgattttattcttgagattgatgagatgtgtgtaatccaggagtgtgcaaaacaatctgtaagggttcagaaaacatactgcttctatatatagttacctttgtcttaacttgaaaatttcaaattgtgtaggagttacaatgtgtgtaattgttattatagtactggatccaaataatttataaataaataaatatagacataatatggtgtattacaggttaaat

SEQ ID NO: 423902 - DNA, 6392 bp, Homo sapiens
  misc_feature (12)..(12): n is a, c, g, or t
caaagctcttgnctcgctagctcagccccaacgcctgcatgaacttccggctacacgccattccgcttcccgaggaacgcttgggctgttgtacgggttccctacgggactctgaagactgaggatatccggcccggagcgtttgtgcggcgcggagttaagcgccccggcagtaacttaagggaagtggaccagggttgccgctgcccagagcggtcctttagtttccactggagtggagggaagagtgctgccatggcagcccctgcgcagcccaagaagatcgtggcccctacggtgtcccaaatcaatgcggagttcgtgacccagttagcatgtaaatactgggctccccacatcaagaagaaatcaccttttgatataaaggttattgaagatatatatgaaaaagagattgtcaaatcaaggtttgctattagaaagataatgctcttggaatttagccagtatcttgaaaattatctctggatgaattattctcctgaggtatctagcaaggcctatttaatgtcaatctgctgtatggtgaatgagaagtttagagaaaacgtgcctgcatgggagatttttaagaagaagccagaccacttcccattcttttttaaacacatcttgaaggcggcattagctgaaactgatggtgaattttcacttcatgaacagacagtcttactactttttcttgatcattgcttcaatagtttggaagtagacttgatacgaagtcaagtacagcagcttatctccctcccaatgtggatgggcttacagctggcacgattggaattagaattaaaaaagacacctaagctaagaaaattctggaacttgattaaaaagaatgatgaaaagatggatccagaagcaagagaacaggcatatcaagagaggagatttctttcacaactcatccagaagtttatctctgtgctgaaatcagtcccactttctgaacctgtcactatggacaaagttcattactgtgaaagattcattgaacttatgattgatctagaggccctgctacccacaaggcgctggtttaataccatcctggatgattcccaccttctggttcactgttacctttccaatcttgttcgtagagaagaggatggccatcttttttcccagcttttggacatgcttaaattctatactggttttgaaattaatgaccaaactggaaatgctctgacagagaatgagatgaccacaattcactatgatagaattacttctctacagagagctgcttttgcacattttcctgaactctatgattttgccctctcaaatgtggcagaagtagatactcgggagtccttggtcaagttttttggacctcttagttcaaacacactccaccaggtggcatcatacctctgcttgttgccaactcttcctaaaaatgaagacacaacttttgataaagaatttcttctagaattgctggtatctcgtcatgaacgtcgaatttctcagattcagcagttgaaccagatgcctttgtatccaactgagaaaattatatgggatgaaaatattgtcccaactgagtactattctggagaaggttgtcttgctcttcccaaattgaatttgcagtttttgactcttcatgactacctgctaaggaactttaacctcttccgcttagaatcaacttatgaaattcgtcaggacattgaagatagtgtcagcagaatgaagccatggcaatctgaatatggcggtgtagtgtttggtggttgggcgcgaatggcccagcccattgtggctttcactgtcgttgaagtggccaaacccaacataggtgaaaactggccaacccgagttcgtgcagatgttaccataaatctcaatgtcagagatcacatcaaagatgaatgggaaggtcttcgtaagcatgatgtatgctttttaattaccgtacgtcccacaaaaccttatggcactaagtttgaccggaggagaccttttattgagcaggttggcctggtttatgtcagaggctgtgaaattcagggcatgctggatgataaaggacgtgtcattgaagatggacctgaacccagacccaatcttagaggagaatcaaggacatttagagtgtttttggatccaaaccagtatcaacaagatatgaccaatactatacaaaatggagcagaggatgtgtatgaaacttttaatataataatgaggagaaaaccaaaggaaaataactttaaggctgtgctggagactattcggaacctgatgaatactgattgtgtggtacctgactggctgcacgatatcattttaggttatggggacccaagtagtgcacattattcgaaaatgcccaatcagattgccacccttgatttcaatgatacatttctctccattgagcatttaaaagccagcttccctggtcataatgttaaagtaactgtagaagaccctgctctacaaataccccctttcaggataacttttccagtaagaagtggaaaagggaagaaaaggaaagatgcggatgtggaagatgaagacaccgaggaagcaaaaaccttaattgttgagccccatgttattcctaataggggtccttatccttataatcaacccaaacgtaatacgattcagttcactcatacacagatagaagccatccgtgctggaatgcagcctgggctgactatggttgtgggcccacctggtacaggcaaaacagatgtggcagttcagatcatatccaacatctaccacaacttcccagaacagaggactctaattgttactcattccaatcaggccctaaaccagttgtttgagaaaatcatggcattagacattgatgagcgccacctactgcgtcttggtcatggagaagaagagctggagacagagaaagatttcagcaggtatggaagagttaattatgttctggctcgaagaatagaacttttagaagaagtcaaacgattgcaaaagagtctaggggttccaggagatgcctcatatacctgtgaaactgcaggctatttcttcttataccaggtaatgtctcgctgggaagagtatatcagcaaagtgaaaaataaaggtagtacattgccagatgttacggaagtctccactttcttccctttccatgaatactttgcaaatgctcctcaacccatttttaaaggaagatcttatgaagaagacatggaaattgctgaaggatgtttcaggcatattaagaaaatctttacgcagcttgaggaattcagagcctctgaattgcttcgaagtggactggacagatctaaataccttttagtgaaagaagccaaaattattgctatgacctgtactcatgctgccttaaaacgacatgacttggtcaagctaggtttcaagtatgacaacattttgatggaagaggctgctcagattctggagatagaaacttttatccctcttcttctacagaatcctcaggatggatttagccgactaaaacgatggattatgattggcgatcatcaccagttacctccagttattaagaacatggcctttcaaaagtactcaaacatggagcagtctctcttcactcgctttgttcgcgttggagttccgactgttgaccttgatgctcaagggagagccagagcaagcttgtgcaacctctacaactggcgatacaagaatctaggaaacttaccccatgtgcagctcttgccagagtttagtacagcaaatgctggcttactgtatgacttccagctcattaatgttgaagattttcaaggagtgggagaatctgaacctaatccttacttctatcagaatcttggagaggcagaatatgtagtagcactttttatgtacatgtgtttacttggttaccctgctgacaaaatcagtattctaacaacatataatggccaaaagcatcttattcgcgacatcatcaatagacgatgtggaaacaatccattgattggaagaccaaacaaggtgacaactgttgatagatttcaaggtcaacagaatgactatattcttctttctctggtacgaaccagggcagtgggccatctgagggatgtccgtcgcttggtagtggccatgtctagagccagacttggactttatatcttcgccagagtatccctcttccaaaactgttttgaactgactccagctttcagtcagctcacagctcgcccccttcatttgcatataattccaacagaacctttcccaactactagaaagaatggagagagaccatctcatgaagtacaaataataaaaaatatgccccagatggcaaactttgtatacaacatgtacatgcatttgatacagactacacatcattatcatcagactttattacaactaccacctgctatggtagaagagggtgaggaagttcaaaatcaagaaacagaattggaaacagaagaagaggccatgactgttcaagctgacatcatacccagtccaacagacaccagctgccgtcaagaaactccagcctttcaaactgacaccacccccagtgagacaggagccacttccactccagaagccatccctgctttatctgagaccacccctactgtggtaggagctgtatctgcaccggcagaagctaacacacctcaggatgccacatctgccccagaagagaccaagtagccaaactgtagtccttctaaaggaggacatggcagtcaaaaagtctgagtaaagctgttttttgtattttatatttgcttctgccattttactgtcactaattaatgtttagttcttatatttgttaactgatttcggtgtcttgaatatatttttttaaattatgtgtatgaacaattctagtttcatttgttcaatcagaagagcaaataaccattcctttcatgttttgatcactgagtgtgtctgtaatcatacctacattaaaatcattttctatgaatatataatatatacttcacatttttagtgaacttctctaaagaagaggacagaatatactggacttaaccacgaatacccttgagtgtccaaattgggaaggaacttgtttcttctgttatactatcaaatgcttaaattctgtttccttttttcttacctttgtttgctgtctttatgtaaagatattattagcagtaagatacaggtttcttcaatctatcaaagtggttacatgcatttccttctctcaaatcttagaatgccttagaatcacctaagatgtctgtttattcttgaggcacacctcagactgaatgagtcagaatctcaggattagagcctaggaatctatattttaggaggttctccacaccactaatgtttgggttgctggcagagtggcatcagccaaggctggttaggctgagccaggatttgtcatcagctaaataggaggactctgccaaatcaatctgggcaagaagcaggatcctgagtctgggcaatgagagtcagagaacttaactcctgtgtgcagggtagaattttcccatggcagaaattctgagttttctgccttatttttcttgggataaccagccacaaggagaccttcaggtaaaatgtggttcaaatatgggaaggcagaggtacctgggaccttgctactcaagtatgatttgtgaaccaacagcatcaacatcgtattgaagtttgttatttatagaaatgcagaagtttgggctctgctccaaacctattaaatctaaatctacattgcaacaaagtccccaggtgattcacaggcactttgtagtttgagaagcactgtactaagattactgtgttgtcttcacatgaatgaggctataatgtagaattaccagtgaatgtgactaatgttttctgacaagggacctctgcttacaaggtccctgggcatggtgcccagaactggaaaaaaaaaaaaaaaaaaggaaatgtttatatgtatgtgtagaggggaaaattgcccactagttctctatttcccattttgatcatctgctagagtatctaaaggggaggggagcatttaccccagaatgtctcctctagtgcatccacctatgggcctggccatgtccaaggaatctttgaagaaacaagcaagaactgcacactaccattgaaatccttctggtcctgacattttgaaggaatgattgcttcatagggaaattaaacccagaaagtcaagtcagttatatttttgagtgactagtgtttgctcagctctaccaggctgtgttgaatatggtacagactctcattttatgatgtatcctactgcatcaggacatttgtgtcaatgtcaggtgatgaggggaaatgaaagtgatgagacgatgaga

SEQ ID NO: 423903 - DNA, 497 bp, Homo sapiens
cccagtgccgagtagggccttgttaagaaaccgcttatcactaaatgatctgtcttccagctctacaatggcaagaatctgggacttactgtttatactgtttactttgcagttagcatgtaaatactgggctccccacatcaagaagaaatcaccttttgatataaaggttattgaagatatatatgaaaaagagattgtcaaatcaaggtttgctattagaaagataatgctcttggaatttagccagtatcttgaaaattatctctggatgaattattctcctgaggtatctagcaaggcctatttaatgtcaatctgctgtatggtgaatgagaagtttagagaaaacgtgcctgcatgggaggtaactgatttaaagtacttcatagctttcatactgacccacataagccattacaaagtggcagaacttttactgatagtggtgcttttagagcagaactttacccagtaataaagcaaatattgagaaa

SEQ ID NO: 423904 - DNA, 6338 bp, Homo sapiens
  misc_feature (12)..(12): n is a, c, g, or t
caaagctcttgnctcgctagctcagccccaacgcctgcatgaacttccggctacacgccattccgcttcccgaggaacgcttgggctgttgtacgggttccctacgggactctgaagactgaggatatccggcccggagcgtttgtgcggcgcggagttaagcgccccggcagtaacttaagggaagtggaccagggttgccgctgcccagagcggtcctttagtttccactggagtggagggaagagtgctgccatggcagcccctgcgcagcccaagaagatcgtggcccctacggtgtcccaaatcaatgcggagttcgtgacccagttagcatgtaaatactgggctccccacatcaagaagaaatcaccttttgatataaaggttattgaagatatatatgaaaaagagattgtcaaatcaaggtttgctattagaaagataatgctcttggaatttagccagtatcttgaaaattatctctggatgaattattctcctgaggtatctagcaaggcctatttaatgtcaatctgctgtatggtgaatgagaagtttagagaaaacgtgcctgcatgggagatttttaagaagaagccagaccacttcccattcttttttaaacacatcttgaaggcggcattagctgaaactgatggtgaattttcacttcatgaacagacagtcttactactttttcttgatcattgcttcaatagtttggaagtagacttgatacgaagtcaagtacagcagcttatctccctcccaatgtggatgggcttacagctggcacgattggaattagaattaaaaaagacacctaagctaagaaaattctggaacttgattaaaaagaatgatgaaaagatggatccagaagcaagagaacaggcatatcaagagaggagatttctttcacaactcatccagaagtttatctctgtgctgaaatcagtcccactttctgaacctgtcactatggacaaagttcattactgtgaaagattcattgaacttatgattgatctagaggccctgctacccacaaggcgctggtttaataccatcctggatgattcccaccttctggttcactgttacctttccaatcttgttcgtagagaagaggatggccatcttttttcccagcttttggacatgcttaaattctatactggttttgaaattaatgaccaaactggaaatgctctgacagagaatgagatgaccacaattcactatgatagaattacttctctacagagagctgcttttgcacattttcctgaactctatgattttgccctctcaaatgtggcagaagtagatactcgggagtccttggtcaagttttttggacctcttagttcaaacacactccaccaggtggcatcatacctctgcttgttgccaactcttcctaaaaatgaagacacaacttttgataaagaatttcttctagaattgctggtatctcgtcatgaacgtcgaatttctcagattcagcagttgaaccagatgcctttgtatccaactgagaaaattatatgggatgaaaatattgtcccaactgagtactattctggagaaggttgtcttgctcttcccaaattgaatttgcagtttttgactcttcatgactacctgctaaggaactttaacctcttccgcttagaatcaacttatgaaattcgtcaggacattgaagatagtgtcagcagaatgaagccatggcaatctgaatatggcggtgtagtgtttggtggttgggcgcgaatggcccagcccattgtggctttcactgtcgttgaagtggccaaacccaacataggtgaaaactggccaacccgagttcgtgcagatgttaccataaatctcaatgtcagagatcacatcaaagatgaatgggaaggtcttcgtaagcatgatgtatgctttttaattaccgtacgtcccacaaaaccttatggcactaagtttgaccggaggagaccttttattgagcaggttggcctggtttatgtcagaggctgtgaaattcagggcatgctggatgataaaggacgtgtcattgaagatggacctgaacccagacccaatcttagaggagaatcaaggacatttagagtgtttttggatccaaaccagtatcaacaagatatgaccaatactatacaaaatggagcagaggatgtgtatgaaacttttaatataataatgaggagaaaaccaaaggaaaataactttaaggctgtgctggagactattcggaacctgatgaatactgattgtgtggtacctgactggctgcacgatatcattttaggttatggggacccaagtagtgcacattattcgaaaatgcccaatcagattgccacccttgatttcaatgatacatttctctccattgagcatttaaaagccagcttccctggtcataatgttaaagtaactgtagaagaccctgctctacaaataccccctttcaggataacttttccagtaagaagtggaaaagggaagaaaaggaaagatgcggatgtggaagatgaagacaccgaggaagcaaaaaccttaattgttgagccccatgttattcctaataggggtccttatccttataatcaacccaaacgtaatacgattcagttcactcatacacagatagaagccatccgtgctggaatgcagcctgggctgactatggttgtgggcccacctggtacaggcaaaacagatgtggcagttcagatcatatccaacatctaccacaacttcccagaacagaggactctaattgttactcattccaatcaggccctaaaccagttgtttgagaaaatcatggcattagacattgatgagcgccacctactgcgtcttggtcatggagaagaagagctggagacagagaaagatttcagcaggtatggaagagttaattatgttctggctcgaagaatagaacttttagaagaagtcaaacgattgcaaaagagtctaggggttccaggagatgcctcatatacctgtgaaactgcaggctatttcttcttataccaggtaatgtctcgctgggaagagtatatcagcaaagtgaaaaataaaggtagtacattgccagatgttacggaagtctccactttcttccctttccatgaatactttgcaaatgctcctcaacccatttttaaaggaagatcttatgaagaagacatggaaattgctgaaggatgtttcaggcatattaagaaaatctttacgcagcttgaggaattcagagcctctgaattgcttcgaagtggactggacagatctaaataccttttagtgaaagaagccaaaattattgctatgacctgtactcatgctgccttaaaacgacatgacttggtcaagctaggtttcaagtatgacaacattttgatggaagaggctgctcagattctggagatagaaacttttatccctcttcttctacagaatcctcaggatggatttagccgactaaaacgatggattatgattggcgatcatcaccagttacctccagttattaagaacatggcctttcttccgactgttgaccttgatgctcaagggagagccagagcaagcttgtgcaacctctacaactggcgatacaagaatctaggaaacttaccccatgtgcagctcttgccagagtttagtacagcaaatgctggcttactgtatgacttccagctcattaatgttgaagattttcaaggagtgggagaatctgaacctaatccttacttctatcagaatcttggagaggcagaatatgtagtagcactttttatgtacatgtgtttacttggttaccctgctgacaaaatcagtattctaacaacatataatggccaaaagcatcttattcgcgacatcatcaatagacgatgtggaaacaatccattgattggaagaccaaacaaggtgacaactgttgatagatttcaaggtcaacagaatgactatattcttctttctctggtacgaaccagggcagtgggccatctgagggatgtccgtcgcttggtagtggccatgtctagagccagacttggactttatatcttcgccagagtatccctcttccaaaactgttttgaactgactccagctttcagtcagctcacagctcgcccccttcatttgcatataattccaacagaacctttcccaactactagaaagaatggagagagaccatctcatgaagtacaaataataaaaaatatgccccagatggcaaactttgtatacaacatgtacatgcatttgatacagactacacatcattatcatcagactttattacaactaccacctgctatggtagaagagggtgaggaagttcaaaatcaagaaacagaattggaaacagaagaagaggccatgactgttcaagctgacatcatacccagtccaacagacaccagctgccgtcaagaaactccagcctttcaaactgacaccacccccagtgagacaggagccacttccactccagaagccatccctgctttatctgagaccacccctactgtggtaggagctgtatctgcaccggcagaagctaacacacctcaggatgccacatctgccccagaagagaccaagtagccaaactgtagtccttctaaaggaggacatggcagtcaaaaagtctgagtaaagctgttttttgtattttatatttgcttctgccattttactgtcactaattaatgtttagttcttatatttgttaactgatttcggtgtcttgaatatatttttttaaattatgtgtatgaacaattctagtttcatttgttcaatcagaagagcaaataaccattcctttcatgttttgatcactgagtgtgtctgtaatcatacctacattaaaatcattttctatgaatatataatatatacttcacatttttagtgaacttctctaaagaagaggacagaatatactggacttaaccacgaatacccttgagtgtccaaattgggaaggaacttgtttcttctgttatactatcaaatgcttaaattctgtttccttttttcttacctttgtttgctgtctttatgtaaagatattattagcagtaagatacaggtttcttcaatctatcaaagtggttacatgcatttccttctctcaaatcttagaatgccttagaatcacctaagatgtctgtttattcttgaggcacacctcagactgaatgagtcagaatctcaggattagagcctaggaatctatattttaggaggttctccacaccactaatgtttgggttgctggcagagtggcatcagccaaggctggttaggctgagccaggatttgtcatcagctaaataggaggactctgccaaatcaatctgggcaagaagcaggatcctgagtctgggcaatgagagtcagagaacttaactcctgtgtgcagggtagaattttcccatggcagaaattctgagttttctgccttatttttcttgggataaccagccacaaggagaccttcaggtaaaatgtggttcaaatatgggaaggcagaggtacctgggaccttgctactcaagtatgatttgtgaaccaacagcatcaacatcgtattgaagtttgttatttatagaaatgcagaagtttgggctctgctccaaacctattaaatctaaatctacattgcaacaaagtccccaggtgattcacaggcactttgtagtttgagaagcactgtactaagattactgtgttgtcttcacatgaatgaggctataatgtagaattaccagtgaatgtgactaatgttttctgacaagggacctctgcttacaaggtccctgggcatggtgcccagaactggaaaaaaaaaaaaaaaaaaggaaatgtttatatgtatgtgtagaggggaaaattgcccactagttctctatttcccattttgatcatctgctagagtatctaaaggggaggggagcatttaccccagaatgtctcctctagtgcatccacctatgggcctggccatgtccaaggaatctttgaagaaacaagcaagaactgcacactaccattgaaatccttctggtcctgacattttgaaggaatgattgcttcatagggaaattaaacccagaaagtcaagtcagttatatttttgagtgactagtgtttgctcagctctaccaggctgtgttgaatatggtacagactctcattttatgatgtatcctactgcatcaggacatttgtgtcaatgtcaggtgatgaggggaaatgaaagtgatgagacgatgaga

SEQ ID NO: 423905 - DNA, 5005 bp, Homo sapiens
  misc_feature (12)..(12): n is a, c, g, or t
caaagctcttgnctcgctagctcagccccaacgcctgcatgaacttccggctacacgccattccgcttcccgaggaacgcttgggctgttgtacgggttccctacgggactctgaagactgaggatatccggcccggagcgtttgtgcggcgcggagttaagcgccccggcagtaacttaagggaagtggaccagggttgccgctgcccagagcggtcctttagtttccactggagtggagggaagagtgctgccatggcagcccctgcgcagcccaagaagatcgtggcccctacggtgtcccaaatcaatgcggagttcgtgacccagttagcatgtaaatactgggctccccacatcaagaagaaatcaccttttgatataaaggttattgaagatatatatgaaaaagagattgtcaaatcaaggtttgctattagaaagataatgctcttggaatttagccagtatcttgaaaattatctctggatgaattattctcctgaggtatctagcaaggcctatttaatgtcaatctgctgtatggtgaatgagaagtttagagaaaacgtgcctgcatgggagatttttaagaagaagccagaccacttcccattcttttttaaacacatcttgaaggcggcattagctgaaactgatggtgaattttcacttcatgaacagacagtcttactactttttcttgatcattgcttcaatagtttggaagtagacttgatacgaagtcaagtacagcagcttatctccctcccaatgtggatgggcttacagctggcacgattggaattagaattaaaaaagacacctaagctaagaaaattctggaacttgattaaaaagaatgatgaaaagatggatccagaagcaagagaacaggcatatcaagagaggagatttctttcacaactcatccagaagtttatctctgtgctgaaatcagtcccactttctgaacctgtcactatggacaaagttcattactgtgaaagattcattgaacttatgattgatctagaggccctgctacccacaaggcgctggtttaataccatcctggatgattcccaccttctggttcactgttacctttccaatcttgttcgtagagaagaggatggccatcttttttcccagcttttggacatgcttaaattctatactggttttgaaattaatgaccaaactggaaatgctctgacagagaatgagatgaccacaattcactatgatagaattacttctctacagagagctgcttttgcacattttcctgaactctatgattttgccctctcaaatgtggcagaagtagatactcgggagtccttggtcaagttttttggacctcttagttcaaacacactccaccaggtggcatcatacctctgcttgttgccaactcttcctaaaaatgaagacacaacttttgataaagaatttcttctagaattgctggtatctcgtcatgaacgtcgaatttctcagattcagcagttgaaccagatgcctttgtatccaactgagaaaattatatgggatgaaaatattgtcccaactgagtactattctggagaaggttgtcttgctcttcccaaattgaatttgcagtttttgactcttcatgactacctgctaaggaactttaacctcttccgcttagaatcaacttatgaaattcgtcaggacattgaagatagtgtcagcagaatgaagccatggcaatctgaatatggcggtgtagtgtttggtggttgggcgcgaatggcccagcccattgtggctttcactgtcgttgaagtggccaaacccaacataggtgaaaactggccaacccgagttcgtgcagatgttaccataaatctcaatgtcagagatcacatcaaagatgaatgggaaggtcttcgtaagcatgatgtatgctttttaattaccgtacgtcccacaaaaccttatggcactaagtttgaccggaggagaccttttattgagcaggttggcctggtttatgtcagaggctgtgaaattcagggcatgctggatgataaaggacgtgtcattgaagatggacctgaacccagacccaatcttagaggagaatcaaggacatttagagtgtttttggatccaaaccagtatcaacaagatatgaccaatactatacaaaatggagcagaggatgtgtatgaaacttttaatataataatgaggagaaaaccaaaggaaaataactttaaggctgtgctggagactattcggaacctgatgaatactgattgtgtggtacctgactggctgcacgatatcattttaggttatggggacccaagtagtgcacattattcgaaaatgcccaatcagattgccacccttgatttcaatgatacatttctctccattgagcatttaaaagccagcttccctggtcataatgttaaagtaactgtagaagaccctgctctacaaataccccctttcaggataacttttccagtaagaagtggaaaagggaagaaaaggaaagatgcggatgtggaagatgaagacaccgaggaagcaaaaaccttaattgttgagccccatgttattcctaataggggtccttatccttataatcaacccaaacgtaatacgattcagttcactcatacacagatagaagccatccgtgctggaatgcagcctgggctgactatggttgtgggcccacctggtacaggcaaaacagatgtggcagttcagatcatatccaacatctaccacaacttcccagaacagaggactctaattgttactcattccaatcaggccctaaaccagttgtttgagaaaatcatggcattagacattgatgagcgccacctactgcgtcttggtcatggagaagaagagctggagacagagaaagatttcagcaggtatggaagagttaattatgttctggctcgaagaatagaacttttagaagaagtcaaacgattgcaaaagagtctaggggttccaggagatgcctcatatacctgtgaaactgcaggctatttcttcttataccaggtaatgtctcgctgggaagagtatatcagcaaagtgaaaaataaaggtagtacattgccagatgttacggaagtctccactttcttccctttccatgaatactttgcaaatgctcctcaacccatttttaaaggaagatcttatgaagaagacatggaaattgctgaaggatgtttcaggcatattaagaaaatctttacgcagcttgaggaattcagagcctctgaattgcttcgaagtggactggacagatctaaataccttttagtgaaagaagccaaaattattgctatgacctgtactcatgctgccttaaaacgacatgacttggtcaagctaggtttcaagtatgacaacattttgatggaagaggctgctcagattctggagatagaaacttttatccctcttcttctacagaatcctcaggatggatttagccgactaaaacgatggattatgattggcgatcatcaccagttacctccagttattaagaacatggcctttcaaaagtactcaaacatggagcagtctctcttcactcgctttgttcgcgttggagttccgactgttgaccttgatgctcaagggagagccagagcaagcttgtgcaacctctacaactggcgatacaagaatctaggaaacttaccccatgtgcagctcttgccagagtttagtacagcaaatgctggcttactgtatgacttccagctcattaatgttgaagattttcaaggagtgggagaatctgaacctaatccttacttctatcagaatcttggagaggcagaatatgtagtagcactttttatgtacatgtgtttacttggttaccctgctgacaaaatcagtattctaacaacatataatggccaaaagcatcttattcgcgacatcatcaatagacgatgtggaaacaatccattgattggaagaccaaacaaggtgacaactgttgatagatttcaaggtcaacagaatgactatattcttctttctctggtacgaaccagggcagtgggccatctgagggatgtccgtcgcttggtagtggccatgtctagagccagacttggactttatatcttcgccagagtatccctcttccaaaactgttttgaactgactccagctttcagtcagctcacagctcgcccccttcatttgcatataattccaacagaacctttcccaactactagaaagaatggagagagaccatctcatgaagtacaaataataaaaaatatgccccagatggcaaactttgtatacaacatgtacatgcatttgatacagactacacatcattatcatcagactttattacaactaccacctgctatggtagaagagggtgaggaagttcaaaatcaagaaacagaattggaaacagaagaagaggccatgactgttcaagctgacatcatacccagtccaacagacaccagctgccgtcaagaaactccagcctttcaaactgacaccacccccagtgagacaggagccacttccactccagaagccatccctgctttatctgagaccacccctactgtggtaggagctgtatctgcaccggcagaagctaacacacctcaggatgccacatctgccccagaagagaccaagtagccaaactgtagtccttctaaaggaggacatggcagtcaaaaagtctgagtaaagctgttttttgtattttatatttgcttctgccattttactgtcactaattaatgtttagttcttatatttgttaactgatttcggtgtcttgaatatatttttttaaattatgtgtatgaacaattctagtttcatttgttcaatcagaagagcaaataaccattcctttcatgttttgatcactgagtgtgtctgtaatcatacctacattaaaatcattttctatgaatatataata

SEQ ID NO: 423906 - DNA, 4429 bp, Homo sapiens
agcatataggaagatatgagtgtgagcgaatactagattcctagaagtgagatgtaaatgctagtataatattaatgtaaatgaggggcatgctggatgataaaggacgtgtcattgaagatggacctgaacccagacccaatcttagaggagaatcaaggacatttagagtgtttttggatccaaaccagtatcaacaagatatgaccaatactatacaaaatggagcagaggatgtgtatgaaacttttaatataataatgaggagaaaaccaaaggaaaataactttaaggctgtgctggagactattcggaacctgatgaatactgattgtgtggtacctgactggctgcacgatatcattttaggttatggggacccaagtagtgcacattattcgaaaatgcccaatcagattgccacccttgatttcaatgatacatttctctccattgagcatttaaaagccagcttccctggtcataatgttaaagtaactgtagaagaccctgctctacaaataccccctttcaggataacttttccagtaagaagtggaaaagggaagaaaaggaaagatgcggatgtggaagatgaagacaccgaggaagcaaaaaccttaattgttgagccccatgttattcctaataggggtccttatccttataatcaacccaaacgtaatacgattcagttcactcatacacagatagaagccatccgtgctggaatgcagcctgggctgactatggttgtgggcccacctggtacaggcaaaacagatgtggcagttcagatcatatccaacatctaccacaacttcccagaacagaggactctaattgttactcattccaatcaggccctaaaccagttgtttgagaaaatcatggcattagacattgatgagcgccacctactgcgtcttggtcatggagaagaagagctggagacagagaaagatttcagcaggtatggaagagttaattatgttctggctcgaagaatagaacttttagaagaagtcaaacgattgcaaaagagtctaggggttccaggagatgcctcatatacctgtgaaactgcaggctatttcttcttataccaggtaatgtctcgctgggaagagtatatcagcaaagtgaaaaataaaggtagtacattgccagatgttacggaagtctccactttcttccctttccatgaatactttgcaaatgctcctcaacccatttttaaaggaagatcttatgaagaagacatggaaattgctgaaggatgtttcaggcatattaagaaaatctttacgcagcttgaggaattcagagcctctgaattgcttcgaagtggactggacagatctaaataccttttagtgaaagaagccaaaattattgctatgacctgtactcatgctgccttaaaacgacatgacttggtcaagctaggtttcaagtatgacaacattttgatggaagaggctgctcagattctggagatagaaacttttatccctcttcttctacagaatcctcaggatggatttagccgactaaaacgatggattatgattggcgatcatcaccagttacctccagttattaagaacatggcctttcaaaagtactcaaacatggagcagtctctcttcactcgctttgttcgcgttggagttccgactgttgaccttgatgctcaagggagagccagagcaagcttgtgcaacctctacaactggcgatacaagaatctaggaaacttaccccatgtgcagctcttgccagagtttagtacagcaaatgctggcttactgtatgacttccagctcattaatgttgaagattttcaaggagtgggagaatctgaacctaatccttacttctatcagaatcttggagaggcagaatatgtagtagcactttttatgtacatgtgtttacttggttaccctgctgacaaaatcagtattctaacaacatataatggccaaaagcatcttattcgcgacatcatcaatagacgatgtggaaacaatccattgattggaagaccaaacaaggtgacaactgttgatagatttcaaggtcaacagaatgactatattcttctttctctggtacgaaccagggcagtgggccatctgagggatgtccgtcgcttggtagtggccatgtctagagccagacttggactttatatcttcgccagagtatccctcttccaaaactgttttgaactgactccagctttcagtcagctcacagctcgcccccttcatttgcatataattccaacagaacctttcccaactactagaaagaatggagagagaccatctcatgaagtacaaataataaaaaatatgccccagatggcaaactttgtatacaacatgtacatgcatttgatacagactacacatcattatcatcagactttattacaactaccacctgctatggtagaagagggtgaggaagttcaaaatcaagaaacagaattggaaacagaagaagaggccatgactgttcaagctgacatcatacccagtccaacagacaccagctgccgtcaagaaactccagcctttcaaactgacaccacccccagtgagacaggagccacttccactccagaagccatccctgctttatctgagaccacccctactgtggtaggagctgtatctgcaccggcagaagctaacacacctcaggatgccacatctgccccagaagagaccaagtagccaaactgtagtccttctaaaggaggacatggcagtcaaaaagtctgagtaaagctgttttttgtattttatatttgcttctgccattttactgtcactaattaatgtttagttcttatatttgttaactgatttcggtgtcttgaatatatttttttaaattatgtgtatgaacaattctagtttcatttgttcaatcagaagagcaaataaccattcctttcatgttttgatcactgagtgtgtctgtaatcatacctacattaaaatcattttctatgaatatataatatatacttcacatttttagtgaacttctctaaagaagaggacagaatatactggacttaaccacgaatacccttgagtgtccaaattgggaaggaacttgtttcttctgttatactatcaaatgcttaaattctgtttccttttttcttacctttgtttgctgtctttatgtaaagatattattagcagtaagatacaggtttcttcaatctatcaaagtggttacatgcatttccttctctcaaatcttagaatgccttagaatcacctaagatgtctgtttattcttgaggcacacctcagactgaatgagtcagaatctcaggattagagcctaggaatctatattttaggaggttctccacaccactaatgtttgggttgctggcagagtggcatcagccaaggctggttaggctgagccaggatttgtcatcagctaaataggaggactctgccaaatcaatctgggcaagaagcaggatcctgagtctgggcaatgagagtcagagaacttaactcctgtgtgcagggtagaattttcccatggcagaaattctgagttttctgccttatttttcttgggataaccagccacaaggagaccttcaggtaaaatgtggttcaaatatgggaaggcagaggtacctgggaccttgctactcaagtatgatttgtgaaccaacagcatcaacatcgtattgaagtttgttatttatagaaatgcagaagtttgggctctgctccaaacctattaaatctaaatctacattgcaacaaagtccccaggtgattcacaggcactttgtagtttgagaagcactgtactaagattactgtgttgtcttcacatgaatgaggctataatgtagaattaccagtgaatgtgactaatgttttctgacaagggacctctgcttacaaggtccctgggcatggtgcccagaactggaaaaaaaaaaaaaaaaaaggaaatgtttatatgtatgtgtagaggggaaaattgcccactagttctctatttcccattttgatcatctgctagagtatctaaaggggaggggagcatttaccccagaatgtctcctctagtgcatccacctatgggcctggccatgtccaaggaatctttgaagaaacaagcaagaactgcacactaccattgaaatccttctggtcctgacattttgaaggaatgattgcttcatagggaaattaaacccagaaagtcaagtcagttatatttttgagtgactagtgtttgctcagctctaccaggctgtgttgaatatggtacagactctcattttatgatgtatcctactgcatcaggacatttgtgtcaatgtcaggtgatgaggggaaatgaaagtgatgagacgatgaga

SEQ ID NO: 423907 - DNA, 2484 bp, Homo sapiens
gtttcttttgggattgattaaggataagatgtttgttcctagcacattatttaaatgatctctagtgtcttttggcttttgcaaatgcaccatattttccattttttatttctaggtgacaactgttgatagatttcaaggtcaacagaatgactatattcttctttctctggtacgaaccagggcagtgggccatctgagggatgtccgtcgcttggtagtggccatgtctagagccagacttggactttatatcttcgccagagtatccctcttccaaaactgttttgaactgactccagctttcagtcagctcacagctcgcccccttcatttgcatataattccaacagaacctttcccaactactagaaagaatggagagagaccatctcatgaagtacaaataataaaaaatatgccccagatggcaaactttgtatacaacatgtacatgcatttgatacagactacacatcattatcatcagactttattacaactaccacctgctatggtagaagagggtgaggaagttcaaaatcaagaaacagaattggaaacagaagaagaggccatgactgttcaagctgacatcatacccagtccaacagacaccagctgccgtcaagaaactccagcctttcaaactgacaccacccccagtgagacaggagccacttccactccagaagccatccctgctttatctgagaccacccctactgtggtaggagctgtatctgcaccggcagaagctaacacacctcaggatgccacatctgccccagaagagaccaagtagccaaactgtagtccttctaaaggaggacatggcagtcaaaaagtctgagtaaagctgttttttgtattttatatttgcttctgccattttactgtcactaattaatgtttagttcttatatttgttaactgatttcggtgtcttgaatatatttttttaaattatgtgtatgaacaattctagtttcatttgttcaatcagaagagcaaataaccattcctttcatgttttgatcactgagtgtgtctgtaatcatacctacattaaaatcattttctatgaatatataatatatacttcacatttttagtgaacttctctaaagaagaggacagaatatactggacttaaccacgaatacccttgagtgtccaaattgggaaggaacttgtttcttctgttatactatcaaatgcttaaattctgtttccttttttcttacctttgtttgctgtctttatgtaaagatattattagcagtaagatacaggtttcttcaatctatcaaagtggttacatgcatttccttctctcaaatcttagaatgccttagaatcacctaagatgtctgtttattcttgaggcacacctcagactgaatgagtcagaatctcaggattagagcctaggaatctatattttaggaggttctccacaccactaatgtttgggttgctggcagagtggcatcagccaaggctggttaggctgagccaggatttgtcatcagctaaataggaggactctgccaaatcaatctgggcaagaagcaggatcctgagtctgggcaatgagagtcagagaacttaactcctgtgtgcagggtagaattttcccatggcagaaattctgagttttctgccttatttttcttgggataaccagccacaaggagaccttcaggtaaaatgtggttcaaatatgggaaggcagaggtacctgggaccttgctactcaagtatgatttgtgaaccaacagcatcaacatcgtattgaagtttgttatttatagaaatgcagaagtttgggctctgctccaaacctattaaatctaaatctacattgcaacaaagtccccaggtgattcacaggcactttgtagtttgagaagcactgtactaagattactgtgttgtcttcacatgaatgaggctataatgtagaattaccagtgaatgtgactaatgttttctgacaagggacctctgcttacaaggtccctgggcatggtgcccagaactggaaaaaaaaaaaaaaaaaaggaaatgtttatatgtatgtgtagaggggaaaattgcccactagttctctatttcccattttgatcatctgctagagtatctaaaggggaggggagcatttaccccagaatgtctcctctagtgcatccacctatgggcctggccatgtccaaggaatctttgaagaaacaagcaagaactgcacactaccattgaaatccttctggtcctgacattttgaaggaatgattgcttcatagggaaattaaacccagaaagtcaagtcagttatatttttgagtgactagtgtttgctcagctctaccaggctgtgttgaatatggtacagactctcattttatgatgtatcctactgcatcaggacatttgtgtcaatgtcaggtgatgaggggaaatgaaagtgatgagacgatgaga

SEQ ID NO: 423908 - DNA, 4073 bp, Homo sapiens
  misc_feature (12)..(12): n is a, c, g, or t
caaagctcttgnctcgctagctcagccccaacgcctgcatgaacttccggctacacgccattccgcttcccgaggaacgcttgggctgttgtacgggttccctacgggactctgaagactgaggatatccggcccggagcgtttgtgcggcgcggagttaagcgccccggcagtaacttaagggaagtggaccagggttgccgctgcccagagcggtcctttagtttccactggagtggagggaagagtgctgccatggcagcccctgcgcagcccaagaagatcgtggcccctacggtgtcccaaatcaatgcggagttcgtgacccagttagcatgtaaatactgggctccccacatcaagaagaaatcaccttttgatataaaggttattgaagatatatatgaaaaagagattgtcaaatcaaggtttgctattagaaagataatgctcttggaatttagccagtatcttgaaaattatctctggatgaattattctcctgaggtatctagcaaggcctatttaatgtcaatctgctgtatggtgaatgagaagtttagagaaaacgtgcctgcatgggagatttttaagaagaagccagaccacttcccattcttttttaaacacatcttgaaggcggcattagctgaaactgatggtgaattttcacttcatgaacagacagtcttactactttttcttgatcattgcttcaatagtttggaagtagacttgatacgaagtcaagtacagcagcttatctccctcccaatgtggatgggcttacagctggcacgattggaattagaattaaaaaagacacctaagctaagaaaattctggaacttgattaaaaagaatgatgaaaagatggatccagaagcaagagaacaggcatatcaagagaggagatttctttcacaactcatccagaagtttatctctgtgctgaaatcagtcccactttctgaacctgtcactatggacaaagttcattactgtgaaagattcattgaacttatgattgatctagaggccctgctacccacaaggcgctggtttaataccatcctggatgattcccaccttctggttcactgttacctttccaatcttgttcgtagagaagaggatggccatcttttttcccagcttttggacatgcttaaattctatactggttttgaaattaatgaccaaactggaaatgctctgacagagaatgagatgaccacaattcactatgatagaattacttctctacagagagctgcttttgcacattttcctgaactctatgattttgccctctcaaatgtggcagaagtagatactcgggagtccttggtcaagttttttggacctcttagttcaaacacactccaccaggtggcatcatacctctgcttgttgccaactcttcctaaaaatgaagacacaacttttgataaagaatttcttctagaattgctggtatctcgtcatgaacgtcgaatttctcagattcagcagttgaaccagatgcctttgtatccaactgagaaaattatatgggatgaaaatattgtcccaactgagtactattctggagaaggttgtcttgctcttcccaaattgaatttgcagtttttgactcttcatgactacctgctaaggaactttaacctcttccgcttagaatcaacttatgaaattcgtcaggacattgaagatagtgtcagcagaatgaagccatggcaatctgaatatggcggtgtagtgtttggtggttgggcgcgaatggcccagcccattgtggctttcactgtcgttgaagtggccaaacccaacataggtgaaaactggccaacccgagttcgtgcagatgttaccataaatctcaatgtcagagatcacatcaaagatgaatgggaaggtcttcgtaagcatgatgtatgctttttaattaccgtacgtcccacaaaaccttatggcactaagtttgaccggaggagaccttttattgagcaggttggcctggtttatgtcagaggctgtgaaattcagggcatgctggatgataaaggacgtgtcattgaagatggacctgaacccagacccaatcttagaggagaatcaaggacatttagagtgtttttggatccaaaccagtatcaacaagatatgaccaatactatacaaaatggagcagaggatgtgtatgaaacttttaatataataatgaggagaaaaccaaaggaaaataactttaaggctgtgctggagactattcggaacctgatgaatactgattgtgtggtacctgactggctgcacgatatcattttaggttatggggacccaagtagtgcacattattcgaaaatgcccaatcagattgccacccttgatttcaatgatacatttctctccattgagcatttaaaagccagcttccctggtcataatgttaaagtaactgtagaagaccctgctctacaaataccccctttcaggataacttttccagtaagaagtggaaaagggaagaaaaggaaagatgcggatgtggaagatgaagacaccgaggaagcaaaaaccttaattgttgagccccatgttattcctaataggggtccttatccttataatcaacccaaacgtaatacgattcagttcactcatacacagatagaagccatccgtgctggaatgcagcctgggctgactatggttgtgggcccacctggtacaggcaaaacagatgtggcagttcagatcatatccaacatctaccacaacttcccagaacagaggactctaattgttactcattccaatcaggccctaaaccagttgtttgagaaaatcatggcattagacattgatgagcgccacctactgcgtcttggtcatggagaagaagagctggagacagagaaagatttcagcaggtatggaagagttaattatgttctggctcgaagaatagaacttttagaagaagtcaaacgattgcaaaagagtctaggggttccaggagatgcctcatatacctgtgaaactgcaggctatttcttcttataccaggtaatgtctcgctgggaagagtatatcagcaaagtgaaaaataaaggtagtacattgccagatgttacggaagtctccactttcttccctttccatgaatactttgcaaatgctcctcaacccatttttaaaggaagatcttatgaagaagacatggaaattgctgaaggatgtttcaggcatattaagaaaatctttacgcagcttgaggaattcagagcctctgaattgcttcgaagtggactggacagatctaaataccttttagtgaaagaagccaaaattattgctatgacctgtactcatgctgccttaaaacgacatgacttggtcaagctaggtttcaagtatgacaacattttgatggaagaggctgctcagattctggagatagaaacttttatccctcttcttctacagaatcctcaggatggatttagccgactaaaacgatggattatgattggcgatcatcaccagttacctccagttattaagaacatggcctttcaaaagtactcaaacatggagcagtctctcttcactcgctttgttcgcgttggagttccgactgttgaccttgatgctcaagggagagccagagcaaggtaaaagagacaggaaaaaaaatcattcccatttaaggacatttgttccatgatccaagtatttgtgaatagcttttgtgtagactattagcattcttggctatccaggaacttggctatccataaatccaaaagcacttttgtcgacttctgcaagagatgtgaatggaccaaataatttatttccttcatttcattcattaatattaatttaagtaacttataatctaaaggcttcttttcattgtcccttctcctttcttcatgtccccaaaagatatacagttaatataattttaaaatctaaaaataaagtgaacaagaggagaacacaccaattcttacttcataaaggatgcaggccccatctcatagttacccccaaatgtcctc

SEQ ID NO: 423909 - DNA, 301 bp, Homo sapiens
acaaagaaatgaacagttgaacaatattggaaagccgtggtcaacatttaaagtttacttttgaaatgactattcttcaaaaataattggtcaatgttctttctgattttagggcatatcaagagaggagatttctttcacaactcatccagaagtttatctctgtgctgaaatcagtcccactttctggtatcttcttttttactcagtgcatttgtgaaattatcatatagctgcccctatggtatttactcatctctaatctaaaaactgttcttggaatgattttaaattgtattgg

SEQ ID NO: 423910 - DNA, 421 bp, Homo sapiens
gcttaagcatggagtgttgattttggggttacaaatacatttttattagtatatgaatttgcaagtacaaaatctgtagataataaggatggagtcttttttaaagcattgaacttcttaatatcaaaatattaacttgaaaatatttgtggcatgttttccctccaggacttaaaaaggcagtatacttcttatgtaaagacttaggtagaaatgctggtatgtttataaacttattttcttcatgccctaaacaggaagtagacttgatacgaagtcaagtacagcagcttatctccctcccaatgtggatgggcttacagctggtaagtctctaatttcagagtcttatgaatgtatgtgttataagtagaacgtgtggttttagtctatagccttaagcggatcagcgagtcctagc

SEQ ID NO: 423911 - DNA, 2713 bp, Homo sapiens
  misc_feature (534)..(534): n is a, c, g, or t
  misc_feature (804)..(804): n is a, c, g, or t
  misc_feature (1956)..(1956): n is a, c, g, or t
gagacagagtctcgctctgtcgcccgggataccgatctaggctcactgcaagctccgtctcccaggttcactccattctcctgcctcaacctcccgagtagctgggactacaggcgcccgccaccacgcccagctaatttttgtatttttagtagagatggggtttcaccgtggtagccaggatcgtctcgacctcctgacttcgtggtctgcctgcctcggccttccaaagtgctgggattgcaggtgtcagccacgaccacgcccggctaaccccagccctttctaagagcagaaaaatggatagatttgatgagagaatcttatgagaatggtacatgaatttggatgtaaaatcagttacaaattaaagaggtctttaaagcaatgaataaataaacacagccctgttaggctattaggaggccattggcaatgagaaaaattaaatattgaattaatgtataagtatttctgtatttttgttattcctgtgcggtacagagttttaatttgaaagtaatgataatcagnttctaggattgagtttcccagaaaaatgattaatagaaataaaaaattctcaagtttaactagtgatttttcatatttgttcagaaaattaaaagatatatttattgatgtaattaccaagaaaatacttacaggtaaaaaattaattgctacattttaactatagtatggttaatattacgtgaaaaatacatgaacggcactagaaaaaatatgccaataatcacagtcattgcctctagctagtggggttagatattatttcctganttttgtattttatataattttcaaatttgtagaattagccaagttgttttaatctgaaaaattgattaaataaaaattgatatgtatccagagtcatctatgttgattttttgaaaaatccatttaaattttgttatctttaatttgatgttttaccatatagttagaataaactgaatattttcacggttcaactttcagatcagttgagtaacaatattgatttgagatattcatttctgttaaaactttatgtaaaagactaggggagggatagctttaggagaaatacctaatgtagatgacaggttggtgggtgcagcaaaccactatggcatgtgtatacctatgtaacaaacctgcatgttgtgcacatgtatcccagaacttaaagtataataatttaaaaaatttacatatttttagaggttaaaattaatgtgtcttttaacaatcttactaaataaatagctatcaccatataattttataactgttactgcccacaaccataaaattaattatgataacctttacataatatagagtttctcattagtgtctggtgtagcattagactggcttcagtctttaactactggatttcatcaagtcatgattccattgattaaaaatacctgatgattacagaatgttaaaataaaattcagtagttgaatgatattatttctatcacttcaattctttgattgtttttatgtatataagaaatttgtggctgggagcagtggctcactcctttaatcccagcattttgggaggctgaggtgggaggatcctttgagcgcaggagttccaggctgcagtgagctgtgatcattccactacactccagcctggcaacagagggataccctgtctcaaaaataaataaataaataaataaacaaaaacaaaaagaaaagaaaaatttgtatgatacaaactcttaagtcaatttatatactaaaattctgataattccgttgtataaataagaatatagagacacacgtgttgattaacttcaaacagccgtccacacatttgttgaacatcatgcatttgcactctgtgctctttattctgtttatcctatattcatgcaggttaccaaagaagatgactttgcttacataaactctccaggtngatacattttactaagaagtttgcgtgaataattatatacccaaagtgttacaacccttggagagcctcagaatgaagccttaggcttagagacacaaagaaacaggtgtaaaatgcattttcttttccatcacatcaagggatttacctgatgtttggaaggaagatactattccatactttgttttcttaaatttcctctctgacaaatttccttactgaaatcaaaatcttactaattgtttttctcatttattgtttcagccagccaagccagggacttgttgtcaaagatgctagtgattgacccagcaaaaagaatatcagtggacgacgccttacagcatccctacatcaacgtctggtatgacccagccgaagtggaggcggtaagaaataggctgcctttactttgcttccacaaacaaatcatagctcatagcaaaaactgaataggactagaagcctaaagaatgcacaatggatttttataaaatttctaagtccaaagcctattatctgcccctctaaaagctattttcttcaacatatgttttaaatacatttttttcaggacttactagaagagggtatgatttagccctacaaaccttagatgtccatgatacactaccatttgtttctgttaaattgccaatacttgtgtttcttcttgtgtgtttgactgccagtctcttctaatgcaaacttagtggtaggaaacaacagaggacaagttgcttagcttgtatttttt

SEQ ID NO: 423912 - DNA, 493 bp, Homo sapiens
ggagaagaaagcctctcatggactcagatgtggcatcgataaacaccggtgtttatcgatgccacggcaacctgtaactgcccttttaaatggcatgacaaggtgtgcagtggccccatccagcatgtgtgtgtctctatcttgcatctacctgctccttggcctagtcagatggatgtagatacagatccgcatgtgtctgtattcatacagcactacttacttagagatgctactgtcagtgtcctcagggctctaccaagacataatgcactggggtaccacatggtccatttcatgtgatctattactctgacataaacccatctgtaatatattgccagtatataagctgtttagtttgttaattgattaaactgtatgtcttataagaaaacatgtaaagggggaatatatggggggagtgagctctctcagacccttgaagatgtagcttccaaatttgaatggattaaatggcacctgtatacca

SEQ ID NO: 423913 - DNA, 742 bp, Homo sapiens
  misc_feature (655)..(655): n is a, c, g, or t
  misc_feature (707)..(707): n is a, c, g, or t
ctctggtaggttccacaatggtacaggcagcatcacgctgcacaatggtttccaggcagtgaaagagggtgattcagcaagccactcttcttctattttctttaacctccccttcactttttatttttatgggggtgggtggtgcttgctatatgcttacctttttcttttcttttttcatttttacaaatttccttttttgtcctcacccctcaattcctaggggcttgagtgagtttaagattgggttttcttggaaatcacctgtccatcgttaattttaaacaatctccatatctccaaagaatctcttccatgttagtctggaatgtggttaatgaaaaacaagtagggaggatttctggggcaaacactgccggatcaggatcgtagttctcaggcacggaatggctagtgtgagaaacaccaacagcaggcccatctcagatcttcactatggcaacttatgcaagaaactgttgaattagacccgtttcctatagatgagaaaccatacaagctgtggtatttatgagcctccatttcttatactactgcagtgaaccaacattggatgtgaaaattgccttttgtcagggtgtgtgttccttacaggtaaaacaagatcacttaatttttggtttcctgtccaagnaacataagttcctataagtccactctattctttgagggtcttagtgcatttncaatgaatgtgccaccatatccgtgcaatcttagg

SEQ ID NO: 423914 - DNA, 478 bp, Homo sapiens
tatgttctccttgcactaggttcaaaccactaggacagcatttgccacattattgttccactaatgaaccacctcagtggctagtgtgagaaacaccaacagcaggcccatctcagatcttcactatggcaacttatgcaagaaactgttgaattagacccgtttcctatagatgagaaaccatacaagctgtgaatgtcaagatgttgtcatgaagagagagagagagacagactctcagtctttgctaccagtgtctgaacttatcggtacatagttatcttgccggtagccccacattccaggtggtggaaaagcaaatatgcgaatcaagttccagaaataatcaatcttgatgatcccattgcttttaagagagacatgcaaggaatgctctacaaatatagcacatggaatgtggaagctgctctataaataataaatattttgtattgttctacaactttttcataaatca

SEQ ID NO: 423915 - DNA, 4036 bp, Homo sapiens
ctctggtaggttccacaatggtacaggcagcatcacgctgcacaatggtttccaggcagtgaaagagggtgattcagcaagccactcttcttctattttctttaacctccccttcactttttatttttatgggggtgggtggtgcttgctatatgcttacctttttcttttcttttttcatttttacaaatttccttttttgtcctcacccctcaattcctaggggcttgagtgagtttaagattgggttttcttggaaatcacctgtccatcgttaattttaaacaatctccatatctccaaagaatctcttccatgttagtctggaatgtggttaatgaaaaacaagtagggaggatttctggggcaaacactgccggatcaggatcgtagttctcaggcacggaatggctagtgtgagaaacaccaacagcaggcccatctcagatcttcactatggcaacttatgcaagaaactgttgaattagacccgtttcctatagatgagaaaccatacaagctgtggtatttatgagcctccatttcttatactactgcagtgaaccaacattggatgtgaaaattgccttttgtcagggattcgataaacaagtggatgtgtcatatattgccaaacattacaacatgagcaaaagcaaagttgacaaccagttctacagtgtggaagtgggagactcaaccttcacagttctcaagcgctaccagaatctaaagcctattggctctggggctcagggcatagtttgtgccgcgtatgatgctgtccttgacagaaatgtggccattaagaagctcagcagaccctttcagaaccaaacacatgccaagagagcgtaccgggagctggtcctcatgaagtgtgtgaaccataaaaacattattagtttattaaatgtcttcacaccccagaaaacgctggaggagttccaagatgtttacttagtaatggaactgatggatgccaacttatgtcaagtgattcagatggaattagaccatgagcgaatgtcttacctgctgtaccaaatgttgtgtggcattaagcacctccattctgctggaattattcacagggatttaaaaccaagtaacattgtagtcaagtctgattgcacattgaaaatcctggactttggactggccaggacagcaggcacaagcttcatgatgactccatatgtggtgacacgttattacagagcccctgaggtcatcctggggatgggctacaaggagaacgtggatatatggtctgtgggatgcattatgggagaaatggttcgccacaaaatcctctttccaggaagggactatattgaccagtggaataaggtaattgaacaactaggaacaccatgtccagaattcatgaagaaattgcaacccacagtaagaaactatgtggagaatcggcccaagtatgcgggactcaccttccccaaactcttcccagattccctcttcccagcggactccgagcacaataaactcaaagccagccaagccagggacttgttgtcaaagatgctagtgattgacccagcaaaaagaatatcagtggacgacgccttacagcatccctacatcaacgtctggtatgacccagccgaagtggaggcgcctccacctcagatatatgacaagcagttggatgaaagagaacacacaattgaagaatggaaagaacttatctacaaggaagtaatgaattcagaagaaaagactaaaaatggtgtagtaaaaggacagccttctccttcagcacaggtgcagcagtgaacagcagtgagagtctccctccatcctcgtctgtcaatgacatctcctccatgtccaccgaccagaccctggcatctgacactgacagcagcctggaagcctcggcaggacccctgggttgttgcaggtgactagccgcctgcctgcgaaacccagcgttcttcaggagatgatgtgatggaacacacacacacgcagacacacacacacacacaaatgcagacacacaacatcaagaaaacagcaagggagagaatccaagcctaaaattaaataaatctttcagcctgcttcttccccagggttctgtattgcagctaagctcaaatgtatatttaacttctagttgctcttgctttggtcttcttccaatgatgcttactacagaaagcaaatcagacacaattagagaagccttttccataaagtgtaattttaatggctgcaaaaccggcaacctgtaactgcccttttaaatggcatgacaaggtgtgcagtggccccatccagcatgtgtgtgtctctatcttgcatctacctgctccttggcctagtcagatggatgtagatacagatccgcatgtgtctgtattcatacagcactacttacttagagatgctactgtcagtgtcctcagggctctaccaagacataatgcactggggtaccacatggtccatttcatgtgatctattactctgacataaacccatctgtaatatattgccagtatataagctgtttagtttgttaattgattaaactgtatgtcttataagaaaacatgtaaagggggaatatatggggggagtgagctctctcagacccttgaagatgtagcttccaaatttgaatggattaaatggcacctgtataccaatttgtagaaagaacatatgtgatacttatgtaaagtgtggggcgagtgggtaacagttttcaggcacaaaatggtttggccttctgaaggcaggtgtgaataaaagctgagagtcttttctgtgacagtaaagagtaggagagactggagggtagtgtgtggtgtggactaagactgaaaggaggttattacccagatactaggagacactggtgtccctgttttagagatttggctctatacccatttgtcatttctcaattactggtcacaacaagaggccactggagaaagtggcaggtggtgaagcaaggttattgtgtgtgcttttgatgataagaatctctctctggaactgagcagaattgcctccatgtgaattccttcaacaaaaaaatgagcctgcctagactactttcagattgtggattgtgttttccatgtgtgggctgcttccctgattcatactctgccaaagttttattttgagaaataatattactttcctcttctgaaataaaataataataataagaatgaaacccccaaaccacagtgtgagtctcaggttagcatttgaaaacatctccagagacattgttattcctcaggagtttccctgactccttaatgtggctgatgtttcatgtttatttatttattttaataagtatgagcaatcgaagggctgatcatctgagttttgtactgcagtagatgtaagagcaataactctgcccataaatttactgctgccaaatagttttagcaatatgagtttgtcttaaaagccatgaagcattaatgtcaatgtttagcaaaatctccagaatttagcttaaattaaattaaatgaaagtgctttcctgagcacttaaggaggcactgtgaaacatcttggttatgtacaaggcaataccaaggtgatctcagcaataatcaggcttcccttcttattcacttcgaagtatccatcacagttatttgcactctgaccatgttggtgctcactagagtggtgatatttcacctgaagaagtgaaagacaggaagtggatggttgatgagtgtgaactgattggcaaatagaatatccccaaaacagagcaaacaagaatgccagtgctctgaaaactgccttaaatataataatagggaactttctttctctcttcaagcaatagagaccacagggaactgcacccacctgcaccatcgccatgccagtggtgctgccattctgagattatttcacacagtcagattcagtacacgcagtcatttgtttaaaataaatagaagaacattcctttgtgcagcttgtcccctggaataaaaatggcccattttctcta

SEQ ID NO: 423916 - DNA, 3845 bp, Homo sapiens
ctcaaggacccctgtgaggccaggcagaaatggcgtggcaggggacccagcgagcccagagggattttgccgctgcttcctctacccctgtatttcacgcagctctctaaattgactcagctccagaaccataattatcatgtgatctagacctgatacattgtagatgaagaaacatgtcgacagagccactatctgcccaacatctgatgggtagtcatagtcacagtggaactgagactaaggtttccatttttatttgactatgcttcttcccaaggctagtgtgagaaacaccaacagcaggcccatctcagatcttcactatggcaacttatgcaagaaactgttgaattagacccgtttcctatagatgagaaaccatacaagctgtggtatttatgagcctccatttcttatactactgcagtgaaccaacattggatgtgaaaattgccttttgtcagggattcgataaacaagtggatgtgtcatatattgccaaacattacaacatgagcaaaagcaaagttgacaaccagttctacagtgtggaagtgggagactcaaccttcacagttctcaagcgctaccagaatctaaagcctattggctctggggctcagggcatagtttgtgccgcgtatgatgctgtccttgacagaaatgtggccattaagaagctcagcagaccctttcagaaccaaacacatgccaagagagcgtaccgggagctggtcctcatgaagtgtgtgaaccataaaattacttagtaatggaactgatggatgccaacttatgtcaagtgattcagatggaattagaccatgagcgaatgtcttacctgctgtaccaaatgttgtgtggcattaagcacctccattctgctggaattattcacagggatttaaaaccaagtaacattgtagtcaagtctgattgcacattgaaaatcctggactttggactggccaggacagcaggcacaagcttcatgatgactccatatgtggtgacacgttattacagagcccctgaggtcatcctggggatgggctacaaggagaacgtggatatatggtctgtgggatgcattatgggagaaatggttcgccacaaaatcctctttccaggaagggactatattgaccagtggaataaggtaattgaacaactaggaacaccatgtccagaattcatgaagaaattgcaacccacagtaagaaactatgtggagaatcggcccaagtatgcgggactcaccttccccaaactcttcccagattccctcttcccagcggactccgagcacaataaactcaaagccagccaagccagggacttgttgtcaaagatgctagtgattgacccagcaaaaagaatatcagtggacgacgccttacagcatccctacatcaacgtctggtatgacccagccgaagtggaggcgcctccacctcagatatatgacaagcagttggatgaaagagaacacacaattgaagaatggaaagaacttatctacaaggaagtaatgaattcagaagaaaagactaaaaatggtgtagtaaaaggacagccttctccttcagcacaggtgcagcagtgaacagcagtgagagtctccctccatcctcgtctgtcaatgacatctcctccatgtccaccgaccagaccctggcatctgacactgacagcagcctggaagcctcggcaggacccctgggttgttgcaggtgactagccgcctgcctgcgaaacccagcgttcttcaggagatgatgtgatggaacacacacacacgcagacacacacacacacacaaatgcagacacacaacatcaagaaaacagcaagggagagaatccaagcctaaaattaaataaatctttcagcctgcttcttccccagggttctgtattgcagctaagctcaaatgtatatttaacttctagttgctcttgctttggtcttcttccaatgatgcttactacagaaagcaaatcagacacaattagagaagccttttccataaagtgtaattttaatggctgcaaaaccggcaacctgtaactgcccttttaaatggcatgacaaggtgtgcagtggccccatccagcatgtgtgtgtctctatcttgcatctacctgctccttggcctagtcagatggatgtagatacagatccgcatgtgtctgtattcatacagcactacttacttagagatgctactgtcagtgtcctcagggctctaccaagacataatgcactggggtaccacatggtccatttcatgtgatctattactctgacataaacccatctgtaatatattgccagtatataagctgtttagtttgttaattgattaaactgtatgtcttataagaaaacatgtaaagggggaatatatggggggagtgagctctctcagacccttgaagatgtagcttccaaatttgaatggattaaatggcacctgtataccaatttgtagaaagaacatatgtgatacttatgtaaagtgtggggcgagtgggtaacagttttcaggcacaaaatggtttggccttctgaaggcaggtgtgaataaaagctgagagtcttttctgtgacagtaaagagtaggagagactggagggtagtgtgtggtgtggactaagactgaaaggaggttattacccagatactaggagacactggtgtccctgttttagagatttggctctatacccatttgtcatttctcaattactggtcacaacaagaggccactggagaaagtggcaggtggtgaagcaaggttattgtgtgtgcttttgatgataagaatctctctctggaactgagcagaattgcctccatgtgaattccttcaacaaaaaaatgagcctgcctagactactttcagattgtggattgtgttttccatgtgtgggctgcttccctgattcatactctgccaaagttttattttgagaaataatattactttcctcttctgaaataaaataataataataagaatgaaacccccaaaccacagtgtgagtctcaggttagcatttgaaaacatctccagagacattgttattcctcaggagtttccctgactccttaatgtggctgatgtttcatgtttatttatttattttaataagtatgagcaatcgaagggctgatcatctgagttttgtactgcagtagatgtaagagcaataactctgcccataaatttactgctgccaaatagttttagcaatatgagtttgtcttaaaagccatgaagcattaatgtcaatgtttagcaaaatctccagaatttagcttaaattaaattaaatgaaagtgctttcctgagcacttaaggaggcactgtgaaacatcttggttatgtacaaggcaataccaaggtgatctcagcaataatcaggcttcccttcttattcacttcgaagtatccatcacagttatttgcactctgaccatgttggtgctcactagagtggtgatatttcacctgaagaagtgaaagacaggaagtggatggttgatgagtgtgaactgattggcaaatagaatatccccaaaacagagcaaacaagaatgccagtgctctgaaaactgccttaaatataataatagggaactttctttctctcttcaagcaatagagaccacagggaactgcacccacctgcaccatcgccatgccagtggtgctgccattctgagattatttcacacagtcagattcagtacacgcagtcatttgtttaaaataaatagaagaacattcctttgtgcagcttgtcccctggaataaaaatggcccattttctcta

SEQ ID NO: 423917 - DNA, 4740 bp, Homo sapiens
  misc_feature (534)..(534): n is a, c, g, or t
  misc_feature (804)..(804): n is a, c, g, or t
  misc_feature (1956)..(1956): n is a, c, g, or t
gagacagagtctcgctctgtcgcccgggataccgatctaggctcactgcaagctccgtctcccaggttcactccattctcctgcctcaacctcccgagtagctgggactacaggcgcccgccaccacgcccagctaatttttgtatttttagtagagatggggtttcaccgtggtagccaggatcgtctcgacctcctgacttcgtggtctgcctgcctcggccttccaaagtgctgggattgcaggtgtcagccacgaccacgcccggctaaccccagccctttctaagagcagaaaaatggatagatttgatgagagaatcttatgagaatggtacatgaatttggatgtaaaatcagttacaaattaaagaggtctttaaagcaatgaataaataaacacagccctgttaggctattaggaggccattggcaatgagaaaaattaaatattgaattaatgtataagtatttctgtatttttgttattcctgtgcggtacagagttttaatttgaaagtaatgataatcagnttctaggattgagtttcccagaaaaatgattaatagaaataaaaaattctcaagtttaactagtgatttttcatatttgttcagaaaattaaaagatatatttattgatgtaattaccaagaaaatacttacaggtaaaaaattaattgctacattttaactatagtatggttaatattacgtgaaaaatacatgaacggcactagaaaaaatatgccaataatcacagtcattgcctctagctagtggggttagatattatttcctganttttgtattttatataattttcaaatttgtagaattagccaagttgttttaatctgaaaaattgattaaataaaaattgatatgtatccagagtcatctatgttgattttttgaaaaatccatttaaattttgttatctttaatttgatgttttaccatatagttagaataaactgaatattttcacggttcaactttcagatcagttgagtaacaatattgatttgagatattcatttctgttaaaactttatgtaaaagactaggggagggatagctttaggagaaatacctaatgtagatgacaggttggtgggtgcagcaaaccactatggcatgtgtatacctatgtaacaaacctgcatgttgtgcacatgtatcccagaacttaaagtataataatttaaaaaatttacatatttttagaggttaaaattaatgtgtcttttaacaatcttactaaataaatagctatcaccatataattttataactgttactgcccacaaccataaaattaattatgataacctttacataatatagagtttctcattagtgtctggtgtagcattagactggcttcagtctttaactactggatttcatcaagtcatgattccattgattaaaaatacctgatgattacagaatgttaaaataaaattcagtagttgaatgatattatttctatcacttcaattctttgattgtttttatgtatataagaaatttgtggctgggagcagtggctcactcctttaatcccagcattttgggaggctgaggtgggaggatcctttgagcgcaggagttccaggctgcagtgagctgtgatcattccactacactccagcctggcaacagagggataccctgtctcaaaaataaataaataaataaataaacaaaaacaaaaagaaaagaaaaatttgtatgatacaaactcttaagtcaatttatatactaaaattctgataattccgttgtataaataagaatatagagacacacgtgttgattaacttcaaacagccgtccacacatttgttgaacatcatgcatttgcactctgtgctctttattctgtttatcctatattcatgcaggttaccaaagaagatgactttgcttacataaactctccaggtngatacattttactaagaagtttgcgtgaataattatatacccaaagtgttacaacccttggagagcctcagaatgaagccttaggcttagagacacaaagaaacaggtgtaaaatgcattttcttttccatcacatcaagggatttacctgatgtttggaaggaagatactattccatactttgttttcttaaatttcctctctgacaaatttccttactgaaatcaaaatcttactaattgtttttctcatttattgtttcagccagccaagccagggacttgttgtcaaagatgctagtgattgacccagcaaaaagaatatcagtggacgacgccttacagcatccctacatcaacgtctggtatgacccagccgaagtggaggcgcctccacctcagatatatgacaagcagttggatgaaagagaacacacaattgaagaatggaaagaacttatctacaaggaagtaatgaattcagaagaaaagactaaaaatggtgtagtaaaaggacagccttctccttcagcacaggtgcagcagtgaacagcagtgagagtctccctccatcctcgtctgtcaatgacatctcctccatgtccaccgaccagaccctggcatctgacactgacagcagcctggaagcctcggcaggacccctgggttgttgcaggtgactagccgcctgcctgcgaaacccagcgttcttcaggagatgatgtgatggaacacacacacacgcagacacacacacacacacaaatgcagacacacaacatcaagaaaacagcaagggagagaatccaagcctaaaattaaataaatctttcagcctgcttcttccccagggttctgtattgcagctaagctcaaatgtatatttaacttctagttgctcttgctttggtcttcttccaatgatgcttactacagaaagcaaatcagacacaattagagaagccttttccataaagtgtaattttaatggctgcaaaaccggcaacctgtaactgcccttttaaatggcatgacaaggtgtgcagtggccccatccagcatgtgtgtgtctctatcttgcatctacctgctccttggcctagtcagatggatgtagatacagatccgcatgtgtctgtattcatacagcactacttacttagagatgctactgtcagtgtcctcagggctctaccaagacataatgcactggggtaccacatggtccatttcatgtgatctattactctgacataaacccatctgtaatatattgccagtatataagctgtttagtttgttaattgattaaactgtatgtcttataagaaaacatgtaaagggggaatatatggggggagtgagctctctcagacccttgaagatgtagcttccaaatttgaatggattaaatggcacctgtataccaatttgtagaaagaacatatgtgatacttatgtaaagtgtggggcgagtgggtaacagttttcaggcacaaaatggtttggccttctgaaggcaggtgtgaataaaagctgagagtcttttctgtgacagtaaagagtaggagagactggagggtagtgtgtggtgtggactaagactgaaaggaggttattacccagatactaggagacactggtgtccctgttttagagatttggctctatacccatttgtcatttctcaattactggtcacaacaagaggccactggagaaagtggcaggtggtgaagcaaggttattgtgtgtgcttttgatgataagaatctctctctggaactgagcagaattgcctccatgtgaattccttcaacaaaaaaatgagcctgcctagactactttcagattgtggattgtgttttccatgtgtgggctgcttccctgattcatactctgccaaagttttattttgagaaataatattactttcctcttctgaaataaaataataataataagaatgaaacccccaaaccacagtgtgagtctcaggttagcatttgaaaacatctccagagacattgttattcctcaggagtttccctgactccttaatgtggctgatgtttcatgtttatttatttattttaataagtatgagcaatcgaagggctgatcatctgagttttgtactgcagtagatgtaagagcaataactctgcccataaatttactgctgccaaatagttttagcaatatgagtttgtcttaaaagccatgaagcattaatgtcaatgtttagcaaaatctccagaatttagcttaaattaaattaaatgaaagtgctttcctgagcacttaaggaggcactgtgaaacatcttggttatgtacaaggcaataccaaggtgatctcagcaataatcaggcttcccttcttattcacttcgaagtatccatcacagttatttgcactctgaccatgttggtgctcactagagtggtgatatttcacctgaagaagtgaaagacaggaagtggatggttgatgagtgtgaactgattggcaaatagaatatccccaaaacagagcaaacaagaatgccagtgctctgaaaactgccttaaatataataatagggaactttctttctctcttcaagcaatagagaccacagggaactgcacccacctgcaccatcgccatgccagtggtgctgccattctgagattatttcacacagtcagattcagtacacgcagtcatttgtttaaaataaatagaagaacattcctttgtgcagcttgtcccctggaataaaaatggcccattttctcta

SEQ ID NO: 423918 - DNA, 2523 bp, Homo sapiens
gtgaccagatattagtgttttttaatagaaagtgttgcaggtgatttcaaatatagagtgagatttgataacttgtgatgaaggactttttattgctatgtcttgattgtcaccatttgatatgctcccctatgtcagctgctctataaaggcttgccaaatgattgatggactggacatcccctattgtatttgcccatccctgaatcctgaatggcattaagatgggtctggttctagattgagtcatgttggtcttcattttcttagcacaggtgcagcagtgaacagcagtgagagtctccctccatcctcgtctgtcaatgacatctcctccatgtccaccgaccagaccctggcatctgacactgacagcagcctggaagcctcggcaggacccctgggttgttgcaggtgactagccgcctgcctgcgaaacccagcgttcttcaggagatgatgtgatggaacacacacacacgcagacacacacacacacacaaatgcagacacacaacatcaagaaaacagcaagggagagaatccaagcctaaaattaaataaatctttcagcctgcttcttccccagggttctgtattgcagctaagctcaaatgtatatttaacttctagttgctcttgctttggtcttcttccaatgatgcttactacagaaagcaaatcagacacaattagagaagccttttccataaagtgtaattttaatggctgcaaaaccggcaacctgtaactgcccttttaaatggcatgacaaggtgtgcagtggccccatccagcatgtgtgtgtctctatcttgcatctacctgctccttggcctagtcagatggatgtagatacagatccgcatgtgtctgtattcatacagcactacttacttagagatgctactgtcagtgtcctcagggctctaccaagacataatgcactggggtaccacatggtccatttcatgtgatctattactctgacataaacccatctgtaatatattgccagtatataagctgtttagtttgttaattgattaaactgtatgtcttataagaaaacatgtaaagggggaatatatggggggagtgagctctctcagacccttgaagatgtagcttccaaatttgaatggattaaatggcacctgtataccaatttgtagaaagaacatatgtgatacttatgtaaagtgtggggcgagtgggtaacagttttcaggcacaaaatggtttggccttctgaaggcaggtgtgaataaaagctgagagtcttttctgtgacagtaaagagtaggagagactggagggtagtgtgtggtgtggactaagactgaaaggaggttattacccagatactaggagacactggtgtccctgttttagagatttggctctatacccatttgtcatttctcaattactggtcacaacaagaggccactggagaaagtggcaggtggtgaagcaaggttattgtgtgtgcttttgatgataagaatctctctctggaactgagcagaattgcctccatgtgaattccttcaacaaaaaaatgagcctgcctagactactttcagattgtggattgtgttttccatgtgtgggctgcttccctgattcatactctgccaaagttttattttgagaaataatattactttcctcttctgaaataaaataataataataagaatgaaacccccaaaccacagtgtgagtctcaggttagcatttgaaaacatctccagagacattgttattcctcaggagtttccctgactccttaatgtggctgatgtttcatgtttatttatttattttaataagtatgagcaatcgaagggctgatcatctgagttttgtactgcagtagatgtaagagcaataactctgcccataaatttactgctgccaaatagttttagcaatatgagtttgtcttaaaagccatgaagcattaatgtcaatgtttagcaaaatctccagaatttagcttaaattaaattaaatgaaagtgctttcctgagcacttaaggaggcactgtgaaacatcttggttatgtacaaggcaataccaaggtgatctcagcaataatcaggcttcccttcttattcacttcgaagtatccatcacagttatttgcactctgaccatgttggtgctcactagagtggtgatatttcacctgaagaagtgaaagacaggaagtggatggttgatgagtgtgaactgattggcaaatagaatatccccaaaacagagcaaacaagaatgccagtgctctgaaaactgccttaaatataataatagggaactttctttctctcttcaagcaatagagaccacagggaactgcacccacctgcaccatcgccatgccagtggtgctgccattctgagattatttcacacagtcagattcagtacacgcagtcatttgtttaaaataaatagaagaacattcctttgtgcagcttgtcccctggaataaaaatggcccattttctcta

SEQ ID NO: 423919 - DNA, 2755 bp, Homo sapiens
ctctggtaggttccacaatggtacaggcagcatcacgctgcacaatggtttccaggcagtgaaagagggtgattcagcaagccactcttcttctattttctttaacctccccttcactttttatttttatgggggtgggtggtgcttgctatatgcttacctttttcttttcttttttcatttttacaaatttccttttttgtcctcacccctcaattcctaggggcttgagtgagtttaagattgggttttcttggaaatcacctgtccatcgttaattttaaacaatctccatatctccaaagaatctcttccatgttagtctggaatgtggttaatgaaaaacaagtagggaggatttctggggcaaacactgccggatcaggatcgtagttctcaggcacggaatggctagtgtgagaaacaccaacagcaggcccatctcagatcttcactatggcaacttatgcaagaaactgttgaattagacccgtttcctatagatgagaaaccatacaagctgtggtatttatgagcctccatttcttatactactgcagtgaaccaacattggatgtgaaaattgccttttgtcagggtgtgtgttccttacaggtaaaacaaggattcgataaacaagtggatgtgtcatatattgccaaacattacaacatgagcaaaagcaaagttgacaaccagttctacagtgtggaagtgggagactcaaccttcacagttctcaagcgctaccagaatctaaagcctattggctctggggctcagggcatagtttgtgccgcgtatgatgctgtccttgacagaaatgtggccattaagaagctcagcagaccctttcagaaccaaacacatgccaagagagcgtaccgggagctggtcctcatgaagtgtgtgaaccataaaaacattattagtttattaaatgtcttcacaccccagaaaacgctggaggagttccaagatgtttacttagtaatggaactgatggatgccaacttatgtcaagtgattcagatggaattagaccatgagcgaatgtcttacctgctgtaccaaatgttgtgtggcattaagcacctccattctgctggaattattcacagggatttaaaaccaagtaacattgtagtcaagtctgattgcacattgaaaatcctggactttggactggccaggacagcaggcacaagcttcatgatgactccatatgtggtgacacgttattacagagcccctgaggtcatcctggggatgggctacaaggagaacgtggatatatggtctgtgggatgcattatgggagaaatggttcgccacaaaatcctctttccaggaagggactatattgaccagtggaataaggtaattgaacaactaggaacaccatgtccagaattcatgaagaaattgcaacccacagtaagaaactatgtggagaatcggcccaagtatgcgggactcaccttccccaaactcttcccagattccctcttcccagcggactccgagcacaataaactcaaagccagccaagccagggacttgttgtcaaagatgctagtgattgacccagcaaaaagaatatcagtggacgacgccttacagcatccctacatcaacgtctggtatgacccagccgaagtggaggcgcctccacctcagatatatgacaagcagttggatgaaagagaacacacaattgaagaatggaaagaacttatctacaaggaagtaatgaattcagaagaaaagactaaaaatggtgtagtaaaaggacagccttctccttcagtagatgttgctactgctcactctgggtccatgctgcttttatgagctgtaacactcaccacgaaggtctgcagcttcactcctgaccccagtgagaccacgagcccactgggaggaacgaaaagctccagactcgctgccttaagagctgtaacactcaccgtgaaggtctgcagcttcactcctgagccagcgagaccacgaacccaccagaaggaagaaactccgaacacatctgaacatcagaagggacagactccagacgcgccaccttaagagctgtaacactcaccgcgagggtccgcggcttcaatcttgaagtcagtgagaccaagaacccaccaattccggacacagtttgtcagttcctcaagtgttaaagctagaattactctatgccccagcaattccacttctaggtgtatacccaagagaaatgaacacatgtccatacaaaactcgtgcatgaatgttcataacagcattatttgtaatagccaaaaagttgaaacaacctaaatatccatcaaatgcctatcaactaataaataaacaaaatgtgatgtatccatacaatggaatattatgcagccatacaaagatatgaaatacagatacatgccacagcatggataagccttaaaaacattctgctatatgaaagtggccagtcataaatgatcacatatgatatgcttccatttacatgaaatgttcagaacaggcaattttatagaggcaaaaagtagatgagtcattgcctagagctacagggtaggtgaggaatggagtgcagggttttctttagggatgatgaaatgctgcaaaatggattgtggtgatggctgcacaatgttgtgaatatactaaaaaacactgaatcatgaaaattaaatttcttaattatatatgtggattatatcttaataaagctgttacaaaaaat

SEQ ID NO: 423920 - DNA, 813 bp, Homo sapiens
ctctggtaggttccacaatggtacaggcagcatcacgctgcacaatggtttccaggcagtgaaagagggtgattcagcaagccactcttcttctattttctttaacctccccttcactttttatttttatgggggtgggtggtgcttgctatatgcttacctttttcttttcttttttcatttttacaaatttccttttttgtcctcacccctcaattcctaggggcttgagtgagtttaagattgggttttcttggaaatcacctgtccatcgttaattttaaacaatctccatatctccaaagaatctcttccatgttagtctggaatgtggttaatgaaaaacaagtagggaggatttctggggcaaacactgccggatcaggatcgtagttctcaggcacggaatggctagtgtgagaaacaccaacagcaggcccatctcagatcttcactatggcaacttatgcaagaaactgttgaattagacccgtttcctatagatgagaaaccatacaagctgtggtatttatgagcctccatttcttatactactgcagtgaaccaacattggatgtgaaaattgccttttgtcaggtaggttaagaagaatgtccactttggttctgagttctaaaaccagttctaatctggagtgtatcattcaattcctcttttgttcatcttctctgtttattatataaagaaacaattgaatatgttcttcctgaagtttagctgatgaattttatctttcctatgaattggtattatatattttatgagattaataaatcaaaacctgccactcac

SEQ ID NO: 423921 - DNA, 2396 bp, Homo sapiens
ctcaaggacccctgtgaggccaggcagaaatggcgtggcaggggacccagcgagcccagagggattttgccgctgcttcctctacccctgtatttcacgcagctctctaaattgactcagctccaggctagtgtgagaaacaccaacagcaggcccatctcagatcttcactatggcaacttatgcaagaaactgttgaattagacccgtttcctatagatgagaaaccatacaagctgtggtatttatgagcctccatttcttatactactgcagtgaaccaacattggatgtgaaaattgccttttgtcagggattcgataaacaagtggatgtgtcatatattgccaaacattacaacatgagcaaaagcaaagttgacaaccagttctacagtgtggaagtgggagactcaaccttcacagttctcaagcgctaccagaatctaaagcctattggctctggggctcagggcatagtttgtgccgcgtatgatgctgtccttgacagaaatgtggccattaagaagctcagcagaccctttcagaaccaaacacatgccaagagagcgtaccgggagctggtcctcatgaagtgtgtgaaccataaaaacattattagtttattaaatgtcttcacaccccagaaaacgctggaggagttccaagatgtttacttagtaatggaactgatggatgccaacttatgtcaagtgattcagatggaattagaccatgagcgaatgtcttacctgctgtaccaaatgttgtgtggcattaagcacctccattctgctggaattattcacagggatttaaaaccaagtaacattgtagtcaagtctgattgcacattgaaaatcctggactttggactggccaggacagcaggcacaagcttcatgatgactccatatgtggtgacacgttattacagagcccctgaggtcatcctggggatgggctacaaggagaacgtggatatatggtctgtgggatgcattatgggagaaatggttcgccacaaaatcctctttccaggaagggactatattgaccagtggaataaggtaattgaacaactaggaacaccatgtccagaattcatgaagaaattgcaacccacagtaagaaactatgtggagaatcggcccaagtatgcgggactcaccttccccaaactcttcccagattccctcttcccagcggactccgagcacaataaactcaaagccagccaagccagggacttgttgtcaaagatgctagtgattgacccagcaaaaagaatatcagtggacgacgccttacagcatccctacatcaacgtctggtatgacccagccgaagtggaggcgcctccacctcagatatatgacaagcagttggatgaaagagaacacacaattgaagaatggaaagaacttatctacaaggaagtaatgaattcagaagaaaagactaaaaatggtgtagtaaaaggacagccttctccttcagcacaggtgcagcagtgaacagcagtgagagtctccctccatcctcgtctgtcaatgacatctcctccatgtccaccgaccagaccctggcatctgacactgacagcagcctggaagcctcggcaggacccctgggttgttgcaggtgactagccgcctgcctgcgaaacccagcgttcttcaggagatgatgtgatggaacacacacacacgcagacacacacacacacacaaatgcagacacacaacatcaagaaaacagcaagggagagaatccaagcctaaaattaaataaatctttcagcctgcttcttccccagggttctgtattgcagctaagctcaaatgtatatttaacttctagttgctcttgctttggtcttcttccaatgatgcttactacagaaagcaaatcagacacaattagagaagccttttccataaagtgtaattttaatggctgcaaaaccggcaacctgtaactgcccttttaaatggcatgacaaggtgtgcagtggccccatccagcatgtgtgtgtctctatcttgcatctacctgctccttggcctagtcagatggatgtagatacagatccgcatgtgtctgtattcatacagcactacttacttagagatgctactgtcagtgtcctcagggctctaccaagacataatgcactggggtaccacatggtccatttcatgtgatctattactctgacataaacccatctgtaatatattgccagtatataagctgtttagtttgttaattgattaaactgtatgtcttataagaaaacatgtaaagggggaatatatggggggagtgagctctctcagacccttgaagatgtagcttccaaatttgaatggattaaatggcacctgtatacca

SEQ ID NO: 423922 - DNA, 4063 bp, Homo sapiens
ctctggtaggttccacaatggtacaggcagcatcacgctgcacaatggtttccaggcagtgaaagagggtgattcagcaagccactcttcttctattttctttaacctccccttcactttttatttttatgggggtgggtggtgcttgctatatgcttacctttttcttttcttttttcatttttacaaatttccttttttgtcctcacccctcaattcctaggggcttgagtgagtttaagattgggttttcttggaaatcacctgtccatcgttaattttaaacaatctccatatctccaaagaatctcttccatgttagtctggaatgtggttaatgaaaaacaagtagggaggatttctggggcaaacactgccggatcaggatcgtagttctcaggcacggaatggctagtgtgagaaacaccaacagcaggcccatctcagatcttcactatggcaacttatgcaagaaactgttgaattagacccgtttcctatagatgagaaaccatacaagctgtggtatttatgagcctccatttcttatactactgcagtgaaccaacattggatgtgaaaattgccttttgtcagggtgtgtgttccttacaggtaaaacaaggattcgataaacaagtggatgtgtcatatattgccaaacattacaacatgagcaaaagcaaagttgacaaccagttctacagtgtggaagtgggagactcaaccttcacagttctcaagcgctaccagaatctaaagcctattggctctggggctcagggcatagtttgtgccgcgtatgatgctgtccttgacagaaatgtggccattaagaagctcagcagaccctttcagaaccaaacacatgccaagagagcgtaccgggagctggtcctcatgaagtgtgtgaaccataaaaacattattagtttattaaatgtcttcacaccccagaaaacgctggaggagttccaagatgtttacttagtaatggaactgatggatgccaacttatgtcaagtgattcagatggaattagaccatgagcgaatgtcttacctgctgtaccaaatgttgtgtggcattaagcacctccattctgctggaattattcacagggatttaaaaccaagtaacattgtagtcaagtctgattgcacattgaaaatcctggactttggactggccaggacagcaggcacaagcttcatgatgactccatatgtggtgacacgttattacagagcccctgaggtcatcctggggatgggctacaaggagaacgtggatatatggtctgtgggatgcattatgggagaaatggttcgccacaaaatcctctttccaggaagggactatattgaccagtggaataaggtaattgaacaactaggaacaccatgtccagaattcatgaagaaattgcaacccacagtaagaaactatgtggagaatcggcccaagtatgcgggactcaccttccccaaactcttcccagattccctcttcccagcggactccgagcacaataaactcaaagccagccaagccagggacttgttgtcaaagatgctagtgattgacccagcaaaaagaatatcagtggacgacgccttacagcatccctacatcaacgtctggtatgacccagccgaagtggaggcgcctccacctcagatatatgacaagcagttggatgaaagagaacacacaattgaagaatggaaagaacttatctacaaggaagtaatgaattcagaagaaaagactaaaaatggtgtagtaaaaggacagccttctccttcagcacaggtgcagcagtgaacagcagtgagagtctccctccatcctcgtctgtcaatgacatctcctccatgtccaccgaccagaccctggcatctgacactgacagcagcctggaagcctcggcaggacccctgggttgttgcaggtgactagccgcctgcctgcgaaacccagcgttcttcaggagatgatgtgatggaacacacacacacgcagacacacacacacacacaaatgcagacacacaacatcaagaaaacagcaagggagagaatccaagcctaaaattaaataaatctttcagcctgcttcttccccagggttctgtattgcagctaagctcaaatgtatatttaacttctagttgctcttgctttggtcttcttccaatgatgcttactacagaaagcaaatcagacacaattagagaagccttttccataaagtgtaattttaatggctgcaaaaccggcaacctgtaactgcccttttaaatggcatgacaaggtgtgcagtggccccatccagcatgtgtgtgtctctatcttgcatctacctgctccttggcctagtcagatggatgtagatacagatccgcatgtgtctgtattcatacagcactacttacttagagatgctactgtcagtgtcctcagggctctaccaagacataatgcactggggtaccacatggtccatttcatgtgatctattactctgacataaacccatctgtaatatattgccagtatataagctgtttagtttgttaattgattaaactgtatgtcttataagaaaacatgtaaagggggaatatatggggggagtgagctctctcagacccttgaagatgtagcttccaaatttgaatggattaaatggcacctgtataccaatttgtagaaagaacatatgtgatacttatgtaaagtgtggggcgagtgggtaacagttttcaggcacaaaatggtttggccttctgaaggcaggtgtgaataaaagctgagagtcttttctgtgacagtaaagagtaggagagactggagggtagtgtgtggtgtggactaagactgaaaggaggttattacccagatactaggagacactggtgtccctgttttagagatttggctctatacccatttgtcatttctcaattactggtcacaacaagaggccactggagaaagtggcaggtggtgaagcaaggttattgtgtgtgcttttgatgataagaatctctctctggaactgagcagaattgcctccatgtgaattccttcaacaaaaaaatgagcctgcctagactactttcagattgtggattgtgttttccatgtgtgggctgcttccctgattcatactctgccaaagttttattttgagaaataatattactttcctcttctgaaataaaataataataataagaatgaaacccccaaaccacagtgtgagtctcaggttagcatttgaaaacatctccagagacattgttattcctcaggagtttccctgactccttaatgtggctgatgtttcatgtttatttatttattttaataagtatgagcaatcgaagggctgatcatctgagttttgtactgcagtagatgtaagagcaataactctgcccataaatttactgctgccaaatagttttagcaatatgagtttgtcttaaaagccatgaagcattaatgtcaatgtttagcaaaatctccagaatttagcttaaattaaattaaatgaaagtgctttcctgagcacttaaggaggcactgtgaaacatcttggttatgtacaaggcaataccaaggtgatctcagcaataatcaggcttcccttcttattcacttcgaagtatccatcacagttatttgcactctgaccatgttggtgctcactagagtggtgatatttcacctgaagaagtgaaagacaggaagtggatggttgatgagtgtgaactgattggcaaatagaatatccccaaaacagagcaaacaagaatgccagtgctctgaaaactgccttaaatataataatagggaactttctttctctcttcaagcaatagagaccacagggaactgcacccacctgcaccatcgccatgccagtggtgctgccattctgagattatttcacacagtcagattcagtacacgcagtcatttgtttaaaataaatagaagaacattcctttgtgcagcttgtcccctggaataaaaatggcccattttctcta

SEQ ID NO: 423923 - DNA, 2255 bp, Homo sapiens
ctctggtaggttccacaatggtacaggcagcatcacgctgcacaatggtttccaggcagtgaaagagggtgattcagcaagccactcttcttctattttctttaacctccccttcactttttatttttatgggggtgggtggtgcttgctatatgcttacctttttcttttcttttttcatttttacaaatttccttttttgtcctcacccctcaattcctaggggcttgagtgagtttaagattgggttttcttggaaatcacctgtccatcgttaattttaaacaatctccatatctccaaagaatctcttccatgttagtctggaatgtggttaatgaaaaacaagtagggaggatttctggggcaaacactgccggatcaggatcgtagttctcaggcacggaatggctagtgtgagaaacaccaacagcaggcccatctcagatcttcactatggcaacttatgcaagaaactgttgaattagacccgtttcctatagatgagaaaccatacaagctgtggtatttatgagcctccatttcttatactactgcagtgaaccaacattggatgtgaaaattgccttttgtcagggtgtgtgttccttacaggtaaaacaaggattcgataaacaagtggatgtgtcatatattgccaaacattacaacatgagcaaaagcaaagttgacaaccagttctacagtgtggaagtgggagactcaaccttcacagttctcaagcgctaccagaatctaaagcctattggctctggggctcagggcatagtttgtgccgcgtatgatgctgtccttgacagaaatgtggccattaagaagctcagcagaccctttcagaaccaaacacatgccaagagagcgtaccgggagctggtcctcatgaagtgtgtgaaccataaaaacattattagtttattaaatgtcttcacaccccagaaaacgctggaggagttccaagatgtttacttagtaatggaactgatggatgccaacttatgtcaagtgattcagatggaattagaccatgagcgaatgtcttacctgctgtaccaaatgttgtgtggcattaagcacctccattctgctggaattattcacagggatttaaaaccaagtaacattgtagtcaagtctgattgcacattgaaaatcctggactttggactggccaggacagcaggcacaagcttcatgatgactccatatgtggtgacacgttattacagagcccctgaggtcatcctggggatgggctacaaggagaacgtggatatatggtctgtgggatgcattatgggagaaatggttcgccacaaaatcctctttccaggaagggactatattgaccagtggaataaggtaattgaacaactaggaacaccatgtccagaattcatgaagaaattgcaacccacagtaagaaactatgtggagaatcggcccaagtatgcgggactcaccttccccaaactcttcccagattccctcttcccagcggactccgagcacaataaactcaaagccagccaagccagggacttgttgtcaaagatgctagtgattgacccagcaaaaagaatatcagtggacgacgccttacagcatccctacatcaacgtctggtatgacccagccgaagtggaggcgcctccacctcagatatatgacaagcagttggatgaaagagaacacacaattgaagaatggaaagaacttatctacaaggaagtaatgaattcagaagaaaagactaaaaatggtgtagtaaaaggacagccttctccttcagcacaggtgcagcagtgaacagcagtgagagtctccctccatcctcgtctgtcaatgacatctcctccatgtccaccgaccagaccctggcatctgacactgacagcagcctggaaattctgagctccagcaatcctaccacctcagcctcctgagtagctgggactacaggcatgcacaaccatgcctagctaatcttttatttttgtaaagacagggtctgattatgttgcccaggctggtcttaaactcctggcctcaactgattctcccaccttgccatcctaaagtgctgggatttcaggcatgagctcctgcccctggccaatgttcaaatatttaaatataagtttatccacatttttttctattatttttgttcactataccttctcacatctccaccttctttctcgaaaattttgtctttctgcagtatacgcttg

SEQ ID NO: 423924 - DNA, 841 bp, Homo sapiens
tttcaccatgttggtcaggctggtctcgaactcctgacctcaggtgatcacccacctcagccttccgaagtgttgggattacaggtgtgagccaccatgcccggcctagttgagatcttctaaagagagagtgtatggattaaaagagggccagcaatagaactctggggtgtctcaacattcacagaagtagcagaggaaaaggagctagtaaaagattttgagaagttatcaccagtaaggtaggaagagaacctaaaatataaagtactttggaaaccagttgaagaaagtgtttctagaaggagacataatcaactatatcaggtacaacttgacaggtcaagtaagacattgacaaggataagaatataggattttggaacatggcagtcactaatgacttcaacagcaattttattgaaggtagtatattttgaaagtcaaatacctatttttcatactatgcatatgtatatgttttaactatgtcataatttgtgcatatctcctgaatcttcttgaagactaaagacaagtttagagtttagaggagctttaaaactttgtgagattttctttttctgccttgatattaattaagatgacctgtagaaatttcctaagttattcttgaatttccaagagtagaaactatatattaatacttcaacaaagtaatggcttcttactttctttcatgtacaagtttcccttagttccaccttaaattacgtcagctgaggcatctagcactgcatgctccctcagaatgtagttgttactctttctcccgagacctgatagtacttcccagtgaaatgcctttttaaaaaaaaaa

SEQ ID NO: 423925 - DNA, 792 bp, Homo sapiens
tgctgtcctgaggattccaggctaaagctcctacggaatgtccgcatgacaaccgacgtttggagtttggaggtgcttgccttagagcaagggaaacagctctcattcaaaggaactagaagcctctccctcagtggtagggagacagccaggagcggttttctgggaactgtgggatgtgcccttgggggcccgagaaaacagaaggaagatgctccagaccagtaactacagcctggtgctctctctgcagttcctgctgctgtcctatgacctctttgtcaattccttctcagaactgctccaaaagactcctgtcatccagcttgtgctcttcatcatccaggatattgcagtcctcttcaacatcatcatcattttcctcatgttcttcaacaccttcgtcttccaggctggcctggtcaacctcctattccataagttcaaagggaccatcatcctgacagctgtgtactttgccctcagcatctcccttcatgtctgggtcatgaacttacgctggaaaaactccaacagcttcatatggacagatggacttcaaatgctgtttgtattccagagactaggtaaggaccagagcaaggtcaggcctctctcaggtcccacatgtgtctctttcagtgagggccttgatgctggcttcccagacctgtcccagctggcttgggatggttgtgacagccacaccaggaacaggagggattactgcccctgcccttgctagaagactatgggaaatgaggaggcagggctgcccagcctcattaggtt

SEQ ID NO: 423926 - DNA, 1550 bp, Homo sapiens
gctaaccccctaactcccgttcctcctcggcgtttcttctccaagtccgaagtcagggtccaggactgctgcgatgcatcagccccgcctctcatcccccatccagaggaggcggaaatgttcaggtgaacgcgaagcctcccactacgagccggccctcagcaaggccgtgcgcagtgtgggcgggagccctaagtcagctagcggcgacgctgggagggcccggagcaggccgggccccgaacagcgaaagctccaacatggcggccagactggccatagagcgggaagagaaagccggggactagcaggccgcacggcgcagacggggcccgcctcctccatttacttccggaatttaaagccggcttccggaagccgggacgatgtccgcatgacaaccgacgttggagtttggaggtgcttgccttagagcaagggaaacagctctcattcaaaggaactagaagcctctccctcagtggtagggagacagccaggagcggttttctgggaactgtgggatgtgcccttgggggcccgagaaaacagaaggaagatgctccagaccagtaactacagcctggtgctctctctgcagttcctgctgctgtcctatgacctctttgtcaattccttctcagaactgctccaaaagactcctgtcatccagcttgtgctcttcatcatccaggatattgcagtcctcttcaacatcatcatcattttcctcatgttcttcaacaccttcgtcttccaggctggcctggtcaacctcctattccataagttcaaagggaccatcatcctgacagctgtgtactttgccctcagcatctcccttcatgtctgggtcatgaacttacgctggaaaaactccaacagcttcatatggacagatggacttcaaatgctgtttgtattccagagactagcagcagtgttgtactgctacttctataaacggacagccgtaagactaggcgatcctcacttctaccaggactctttgtggctgcgcaaggagttcatgcaagttcgaaggtgacctcttgtcacactgatggatacttttccttcctgatagaagccacatttgctgctttgcagggagagttggccctatgcatgggcaaacagctggactttccaaggaaggttcagactagctgtgttcagcattcaagaaggaagatcctccctcttgcacaattagagtgtccccatcggtctccagtgcggcatcccttccttgccttctacctctgttccaccccctttccttcctttcctctctgtaccattcattctccctgaccggcctttcttgccgagggttctgtggctcttacccttgtgaagcttttcctttagcctgggacagaaggacctcccagcccccaaaggatctcccagtgaccaaaggatgcgaagagtgatagttacgtgctcctgactgatcacaccgcagacatttagatttttatacccaaggcactttaaaaaaatgttttataaatagagaataaattgaattcttgttccataaa

SEQ ID NO: 423927 - DNA, 1307 bp, Homo sapiens
gctaaccccctaactcccgttcctcctcggcgtttcttctccaagtccgaagtcagggtccaggactgctgcgatgcatcagccccgcctctcatcctccatttacttccggaatttaaagccggcttccggaagccgggacgatgtccgcatgacaaccgacgttggagtttggaggtgcttgccttagagcaagggaaacagctctcattcaaaggaactagaagcctctccctcagtggtagggagacagccaggagcggttttctgggaactgtgggatgtgcccttgggggcccgagaaaacagaaggaagatgctccagaccagtaactacagcctggtgctctctctgcagttcctgctgctgtcctatgacctctttgtcaattccttctcagaactgctccaaaagactcctgtcatccagcttgtgctcttcatcatccaggatattgcagtcctcttcaacatcatcatcattttcctcatgttcttcaacaccttcgtcttccaggctggcctggtcaacctcctattccataagttcaaagggaccatcatcctgacagctgtgtactttgccctcagcatctcccttcatgtctgggtcatgaacttacgctggaaaaactccaacagcttcatatggacagatggacttcaaatgctgtttgtattccagagactagcagcagtgttgtactgctacttctataaacggacagccgtaagactaggcgatcctcacttctaccaggactctttgtggctgcgcaaggagttcatgcaagttcgaaggtgacctcttgtcacactgatggatacttttccttcctgatagaagccacatttgctgctttgcagggagagttggccctatgcatgggcaaacagctggactttccaaggaaggttcagactagctgtgttcagcattcaagaaggaagatcctccctcttgcacaattagagtgtccccatcggtctccagtgcggcatcccttccttgccttctacctctgttccaccccctttccttcctttcctctctgtaccattcattctccctgaccggcctttcttgccgagggttctgtggctcttacccttgtgaagcttttcctttagcctgggacagaaggacctcccagcccccaaaggatctcccagtgaccaaaggatgcgaagagtgatagttacgtgctcctgactgatcacaccgcagacatttagatttttatacccaaggcactttaaaaaaatgttttataaatagagaataaattgaattcttgttccataaa

SEQ ID NO: 423928 - DNA, 2497 bp, Homo sapiens
gctaaccccctaactcccgttcctcctcggcgtttcttctccaagtccgaagtcagggtccaggactgctgcgatgcatcagccccgcctctcatcccccatccagaggaggcggaaatgttcaggtgaacgcgaagcctcccactacgagccggccctcagcaaggccgtgcgcagtgtgggcgggagccctaagtcagctagcggcgacgctgggagggcccggagcaggccgggccccgaacagcgaaagctccaacatggcggccagactggccatagagcgggaagagaaagccggggactagcaggccgcacggcgcagacggggcccgcctcctccatttacttccggaatttaaagccggcttccggaagccgggacgatgtccgcatgacaaccgacgttggagtttggaggtgcttgccttagagcaagggaaacagctctcattcaaaggaactagaagcctctccctcagtggtagggagacagccaggagcggttttctgggaactgtgggatgtgcccttgggggcccgagaaaacagaaggaagatgctccagaccagtaactacagcctggtgctctctctgcagttcctgctgctgtcctatgacctctttgtcaattccttctcagaactgctccaaaagactcctgtcatccagcttgtgctcttcatcatccaggatattgcagtcctcttcaacatcatcatcattttcctcatgttcttcaacaccttcgtcttccaggctggcctggtcaacctcctattccataagttcaaagggaccatcatcctgacagctgtgtactttgccctcagcatctcccttcatgtctgggtcatgaacttacgctggaaaaactccaacagcttcatatggacagatggacttcaaatgctgtttgtattccagagactagcagcagtgttgtactgctacttctataaacggacagccgtaagactaggcgatcctcacttctaccaggactctttgtggctgcgcaaggagttcatgcaagttcgaaggtgacctcttgtcacactgatggatacttttccttcctgatagaagccacatttgctgctttgcagggagagttggccctatgcatgggcaaacagctggactttccaaggaaggttcagactagctgtgttcagcattcaagaaggaagatcctccctcttgcacaattagagtgtccccatcggtctccagtgcggcatcccttccttgccttctacctctgttccaccccctttccttcctttcctctctgtaccattcattctccctgaccggcctttcttgccgagggttctgtggctcttacccttgtgaagcttttcctttagcctgggacagaaggacctcccagcccccaaaggatctcccagtgaccaaaggatgcgaagagtgatagttacgtgctcctgactgatcacaccgcagacatttagatttttatacccaaggcactttaaaaaaatgttttataaatagagaataaattgaattcttgttccataaaaaaaaaaaaaaaaaacaaaaaaaaaaaaaaaaaacaaaaaaaaaaaaaagggggggcgcgcgcgccaaaaagctcccccgggggggcgccccattccgcgccgctcccccccgatatctttgtggcaaaaccacgggggccccccaaaataggaggagccgcactattataaaagcccgcagaagaccgctgcgcgcgcgcgcattaaacaacagcgtagcaggcaggcggcgagaaacaacgcgtgcgatcacgctgagggagcctcttgggggagaagagagaacccctcaacctgcgcgggagggaggcgagaccaccatacatgcgggcgccacaccgtccctcccctcagccacgagagtatatataaagcccgccctcaaagaggcgagacacataactaacacaactactcctagcagactagttacaacgtggggctacaccacacgaacgacggaaaaaatcagcgccggccgcctgacaacaaattcgcgccccacgcgcagaatcgtttaatactgggagccacattttttaacaccccgggggacgccgatggcgaatgaaaaaacgcgggagaactagaccaacaacaccaacagcacaacctaacgcacgcgacacaagtcaaagaccgcaacgaagcgccgccgacgcgcgagacccgtgcagccaaaaacagacagcacacgatacacgagaccagagcgaagacagcactgcaccacacgacgaacaacaggcacacaacaagcaaccagaagacacccaaagaagacaccacaaaaacagagaccacggcccacaagcacaaaccacacacgaaaccacagcagcccacagagaaccgaggcaaccgacaccgcgcaacacaatcccaaaagacaaacaaaagcaggcacacagcaacaaacacacacaagccagagaccacaaaacac

SEQ ID NO: 423929 - DNA, 1845 bp, Homo sapiens
gctaaccccctaactcccgttcctcctcggcgtttcttctccaagtccgaagtcagggtccaggactgctgcgatgcatcagccccgcctctcatcccccatccagaggaggcggaaatgttcaggtgaacgcgaagcctcccactacgagccggccctcagcaaggccgtgcgcagtgtgggcgggagccctaagtcagctagcggcgacgctgggagggcccggagcaggccgggccccgaacagcgaaagctccaacatggcggccagactggccatagagcgggaagagaaagccggggactagcaggccgcacggcgcagacggggcccgcctcctccatttacttccggaatttaaagccggcttccggaagccgggacgatgtccgcatgacaaccgacgttggagtttggaggtgcttgccttagagcaagggaaacagctctcattcaaaggaactagaagcctctccctcagtggtagggagacagccaggagcggttttctgggaactgtgggatgtgcccttgggggcccgagaaaacagaaggaagatgctccagaccagtaactacagcctggtgctctctctgcagttcctgctgctgtcctatgacctctttgtcaattccttctcagaactgctccaaaagactcctgtcatccagcttgtgctcttcatcatccaggatattgcagtcctcttcaacatcatcatcattttcctcatgttcttcaacaccttcgtcttccaggctggcctggtcaacctcctattccataagttcaaagggaccatcatcctgacagctgtgtactttgccctcagcatctcccttcatgtctgggtcatgaacttacgctggaaaaactccaacagcttcatatggacagatggacttcaaatgctgtttgtattccagagactagcagcagtgttgtactgctacttctataaacggacagccgtaagactaggcgatcctcacttctaccaggactctttgtggctgcgcaaggagttcatgcaagttcgaaggtgacctcttgtcacactgatggatacttttccttcctgatagaagccacatttgctgctttgcagggagagttggccctatgcatgggcaaacagctggactttccaaggaaggttcagactagctgtgttcagcattcaagaaggaagatcctccctcttgcacaattagagtgtccccatcggtctccagtgcggcatcccttccttgccttctacctctgttccaccccctttccttcctttcctctctgtaccattcattctccctgaccggcctttcttgccgagggttctgtggctcttacccttgtgaagcttttcctttagcctgggacagaaggacctcccagcccccaaaggatctcccagtgaccaaaggatgcgaagagtgatagttacgtgctcctgactgatcacaccgcagacatttagatttttatacccaaggcactttaaaaaaatgttttataaatagagaataaattgaattcttgttccataaatgggggagtctgtctgtctagctagatctcttcatgttaagaggcgtgccaaggtccagcttaacatctacttgacccagagggaagatggagccacagatgaaatacagatctttgttgagatccattatgagtacaaagtattttagcagaaattcaagatggaatctgatgctgcatcccccactcctggagctccagatgtgtgtgctctgttcagactctctttccttatcagaagccttaactgccctcagaagaataaaaatattcccttagccagctttggcaaaag

SEQ ID NO: 423930 - DNA, 1206 bp, Homo sapiens
  misc_feature (25)..(25): n is a, c, g, or t
  misc_feature (30)..(30): n is a, c, g, or t
aattcgcggccgcgtcgactacggntgcgngaagacgacagaagggggcatgacaaccgacgtttggagtttggaggtgcttgccttagagcaagggaaacagctctcattcaaaggaactagaagcctctccctcagtggtagggagacagccaggagcggttttctgggaactgtgggatgtgcccttgggggcccgagaaaacagaaggaagatgctccagaccagtaactacagcctggtgctctctctgcagttcctgctgctgtcctatgacctctttgtcaattccttctcagaactgctccaaaagactcctgtcatccagcttgtgctcttcatcatccaggatattgcagtcctcttcaacatcatcatcattttcctcatgttcttcaacaccttcgtcttccaggctggcctggtcaacctcctattccataagttcaaagggaccatcatcctgacagctgtgtactttgccctcagcatctcccttcatgtctgggtcatgaacttacgctggaaaaactccaacagcttcatatggacagatggacttcaaatgctgtttgtattccagagactagcagcagtgttgtactgctacttctataaacggacagccgtaagactaggcgatcctcacttctaccaggactctttgtggctgcgcaaggagttcatgcaagttcgaaggtgacctcttgtcacactgatggatacttttccttcctgatagaagccacatttgctgctttgcagggagagttggccctatgcatgggcaaacagctggactttccaaggaaggttcagactagctgtgttcagcattcaagaaggaagatcctccctcttgcacaattagagtgtccccatcggtctccagtgcggcatcccttccttgccttctacctctgttccaccccctttccttcctttcctctctgtaccattcattctccctgaccggcctttcttgccgagggttctgtggctcttacccttgtgaagcttttcctttagcctgggacagaaggacctcccagcccccaaaggatctcccagtgaccaaaggatgcgaagagtgatagttacgtgctcctgactgatcacaccgcagacatttagatttttatacccaaggcactttaaaaaaatgttttataaatagagaataaattgaattcttgttccataaa

SEQ ID NO: 423931 - DNA, 1640 bp, Homo sapiens
  misc_feature (1524)..(1524): n is a, c, g, or t
  misc_feature (1537)..(1537): n is a, c, g, or t
  misc_feature (1579)..(1579): n is a, c, g, or t
  misc_feature (1603)..(1603): n is a, c, g, or t
gctaaccccctaactcccgttcctcctcggcgtttcttctccaagtccgaagtcagggtccaggactgctgcgatgcatcagccccgcctctcatcccccatccagaggaggcggaaatgttcaggtgaacgcgaagcctcccactacgagccggccctcagcaaggccgtgcgcagtgtgggcgggagccctaagtcagctagcggcgacgctgggagggcccggagcaggccgggccccgaacagcgaaagctccaacatggcggccagactggccatagagcgggaagagaaagccggggactagcaggccgcacggcgcagacggggcccgcctcctccatttacttccggaatttaaagccggcttccggaagccgggacgatgtccgcatgacaaccgacgttggagtttggaggtgcttgccttagagcaagggaaacagctctcattcaaaggaactagaagcctctccctcagtggtagggagacagccaggagcggttttctgggaactgtgggatgtgcccttgggggcccgagaaaacagaaggaagatgctccagaccagtaactacagcctggtgctctctctgcagttcctgctgctgtcctatgacctctttgtcaattccttctcagaactgctccaaaagactcctgtcatccagcttgtgctcttcatcatccaggatattgcagtcctcttcaacatcatcatcattttcctcatgttcttcaacaccttcgtcttccaggctggcctggtcaacctcctattccataagttcaaagggaccatcatcctgacagctgtgtactttgccctcagcatctcccttcatgtctgggtcatgaacttacgctggaaaaactccaacagcttcatatggacagatggacttcaaatgctgtttgtattccagagactagcagcagtgttgtactgctacttctataaacggacagccgtaagactaggcgatcctcacttctaccaggactctttgtggctgcgcaaggagttcatgcaagttcgaaggtgacctcttgtcacactgatggatacttttccttcctgatagaagccacatttgctgctttgcagggagagttggccctatgcatgggcaaacagctggactttccaaggaaggttcagactagctgtgttcagcattcaagaaggaagatcctccctcttgcacaattagagtgtccccatcggtctccagtgcggcatcccttccttgccttctacctctgttccaccccctttccttcctttcctctctgtaccattcattctccctgaccggcctttcttgccgagggttctgtggctcttacccttgtgaagcttttcctttagcctgggacagaaggacctcccagcccccaaaggatctcccagtgaccaaaggatgcgaagagtgatagttacgtgctcctttgggaggctgaggcaggtggattgcttgagcctaggagggagggagggaaagaaaggaagaaagaaagngacgagagggggngagagagagagaaagaaagaaagaaaagaaataaaagggagnaagaggaaaaagggaaggaggganggagggaaagagaaagagaaaagagggagagagaaag

SEQ ID NO: 423932 - DNA, 2095 bp, Homo sapiens
gctaaccccctaactcccgttcctcctcggcgtttcttctccaagtccgaagtcagggtccaggactgctgcgatgcatcagccccgcctctcatcccccatccagaggaggcggaaatgttcaggtgaacgcgaagcctcccactacgagccggccctcagcaaggccgtgcgcagtgtgggcgggagccctaagtcagctagcggcgacgctgggagggcccggagcaggccgggccccgaacagcgaaagctccaacatggcggccagactggccatagagcgggaagagaaagccggggactagcaggccgcacggcgcagacggggcccgcctcctccatttacttccggaatttaaagccggcttccggaagccgggacgatgtccgcatgacaaccgacgttggagtttggaggtgcttgccttagagcaagggaaacagctctcattcaaaggaactagaagcctctccctcagtggtagggagacagccaggagcggttttctgggaactgtgggatgtgcccttgggggcccgagaaaacagaaggaagatgctccagaccagtaactacagcctggtgctctctctgcagttcctgctgctgtcctatgacctctttgtcaattccttctcagaactgctccaaaagactcctgtcatccagcttgtgctcttcatcatccaggatattgcagtcctcttcaacatcatcatcattttcctcatgttcttcaacaccttcgtcttccaggctggcctggtcaacctcctattccataagttcaaagggaccatcatcctgacagctgtgtactttgccctcagcatctcccttcatgtctgggtcatggtaagagtggcagtctgaattctttttttaatttttattttaaatagaggtggggtcttactttgttaccaaggctggtctcaaactcctgagctcaagcaattctcctgcttctgcctcccaagctcaagcaattctcctgcttctgcctcccaaagtgctggaattacaggcatgagtcactgtgcccggcctgaactctgaattcctgaatcgctaaagggctaggaataacttttcttttcttttcttttctttttttttttttttgagacagagtctcgctctgtcgcctggctggagtgcagtggcgtgatctcagctcactgcaacctccgcttcctgggttcaagcaattctcctccctcagtctcctgagtacctgggattacaggcacgcaccaccacgcccagctaattttttgtgtatttttagtagagacagggtttcaccgtgttagccaggatggtctcgatctctgacctcatgatccgcctgcctctgcctcctaaagtgctgggattacaggcgtgagccaccacgcctggccaggttctgttcttaacctgaaatgatactcaggagcacccctgaggcttctcttctgcttcctccccacacagcagtgttgtactgctacttctataaacggacagccgtaagactaggcgatcctcacttctaccaggactctttgtggctgcgcaaggagttcatgcaagttcgaaggtgacctcttgtcacactgatggatacttttccttcctgatagaagccacatttgctgctttgcagggagagttggccctatgcatgggcaaacagctggactttccaaggaaggttcagactagctgtgttcagcattcaagaaggaagatcctccctcttgcacaattagagtgtccccatcggtctccagtgcggcatcccttccttgccttctacctctgttccaccccctttccttcctttcctctctgtaccattcattctccctgaccggcctttcttgccgagggttctgtggctcttacccttgtgaagcttttcctttagcctgggacagaaggacctcccagcccccaaaggatctcccagtgaccaaaggatgcgaagagtgatagttacgtgctcctgactgatcacaccgcagacatttagatttttatacccaaggcactttaaaaaaatgttttataaatagagaataaattgaattcttgttccataaa

SEQ ID NO: 423933 - DNA, 1495 bp, Homo sapiens
gctaaccccctaactcccgttcctcctcggcgtttcttctccaagtccgaagtcagggtccaggactgctgcgatgcatcagccccgcctctcatcccccatccagaggaggcggaaatgttcaggtgaacgcgaagcctcccactacgagccggccctcagcaaggccgtgcgcagtgtgggcgggagccctaagtcagctagcggcgacgctgggagggcccggagcaggccgggccccgaacagcgaaagctccaacatggcggccagactggccatagagcgggaagagaaagccggggactagcaggccgcacggcgcagacggggcccgcctcctccatttacttccggaatttaaagccggcttccggaagccgggacgatgtccgcatgacaaccgacgttggagtttggaggtgcttgccttagagcaagggaaacagctctcattcaaaggaactagaagcctctccctcagtggtagggagacagccaggagcggttttctgggaactgtgggatgtgcccttgggggcccgagaaaacagaaggaagatgctccagaccagtaactacagcctggtgctctctctgcagttcctgctgctgtcctatgacctctttgtcaattccttctcagaactgctccaaaagactcctgtcatccagcttgtgctcttcatcatccaggatattgcagtcctcttcaacatcatcatcattttcctcatgttcttcaacaccttcgtcttccaggctggcctggtcaacctcctattccataagttcaaagggaccatcatcctgacagctgtgtactttgccctcagcatctcccttcatgtctgggtcatggtaagagtggcagtctgaattcagcagtgttgtactgctacttctataaacggacagccgtaagactaggcgatcctcacttctaccaggactctttgtggctgcgcaaggagttcatgcaagttcgaaggtgacctcttgtcacactgatggatacttttccttcctgatagaagccacatttgctgctttgcagggagagttggccctatgcatgggcaaacagctggactttccaaggaaggttcagactagctgtgttcagcattcaagaaggaagatcctccctcttgcacaattagagtgtccccatcggtctccagtgcggcatcccttccttgccttctacctctgttccaccccctttccttcctttcctctctgtaccattcattctccctgaccggcctttcttgccgagggttctgtggctcttacccttgtgaagcttttcctttagcctgggacagaaggacctcccagcccccaaaggatctcccagtgaccaaaggatgcgaagagtgatagttacgtgctcctgactgatcacaccgcagacatttagatttttatacccaaggcactttaaaaaaatgttttataaatagagaataaattgaattcttgttccataaa

SEQ ID NO: 423934 - DNA, 2056 bp, Homo sapiens
gctaaccccctaactcccgttcctcctcggcgtttcttctccaagtccgaagtcagggtccaggactgctgcgatgcatcagccccgcctctcatcccccatccagaggaggcggaaatgttcaggtgaacgcgaagcctcccactacgagccggccctcagcaaggccgtgcgcagtgtgggcgggagccctaagtcagctagcggcgacgctgggagggcccggagcaggccgggccccgaacagcgaaagctccaacatggcggccagactggccatagagcgggaagagaaagccggggactagcaggccgcacggcgcagacggggcccgcctcctccatttacttccggaatttaaagccggcttccggaagccgggacgatgtccgcatgacaaccgacgttggagtttggaggtgcttgccttagagcaagggaaacagctctcattcaaaggaactagaagcctctccctcagtggtagggagacagccaggagcggttttctgggaactgtgggatgtgcccttgggggcccgagaaaacagaaggaagatgttcctgctgctgtcctatgacctctttgtcaattccttctcagaactgctccaaaagactcctgtcatccagcttgtgctcttcatcatccaggatattgcagtcctcttcaacatcatcatcattttcctcatgttcttcaacaccttcgtcttccaggctggcctggtcaacctcctattccataagttcaaagggaccatcatcctgacagctgtgtactttgccctcagcatctcccttcatgtctgggtcatggtaagagtggcagtctgaattctttttttaatttttattttaaatagaggtggggtcttactttgttaccaaggctggtctcaaactcctgagctcaagcaattctcctgcttctgcctcccaagctcaagcaattctcctgcttctgcctcccaaagtgctggaattacaggcatgagtcactgtgcccggcctgaactctgaattcctgaatcgctaaagggctaggaataacttttcttttcttttcttttctttttttttttttttgagacagagtctcgctctgtcgcctggctggagtgcagtggcgtgatctcagctcactgcaacctccgcttcctgggttcaagcaattctcctccctcagtctcctgagtacctgggattacaggcacgcaccaccacgcccagctaattttttgtgtatttttagtagagacagggtttcaccgtgttagccaggatggtctcgatctctgacctcatgatccgcctgcctctgcctcctaaagtgctgggattacaggcgtgagccaccacgcctggccaggttctgttcttaacctgaaatgatactcaggagcacccctgaggcttctcttctgcttcctccccacacagcagtgttgtactgctacttctataaacggacagccgtaagactaggcgatcctcacttctaccaggactctttgtggctgcgcaaggagttcatgcaagttcgaaggtgacctcttgtcacactgatggatacttttccttcctgatagaagccacatttgctgctttgcagggagagttggccctatgcatgggcaaacagctggactttccaaggaaggttcagactagctgtgttcagcattcaagaaggaagatcctccctcttgcacaattagagtgtccccatcggtctccagtgcggcatcccttccttgccttctacctctgttccaccccctttccttcctttcctctctgtaccattcattctccctgaccggcctttcttgccgagggttctgtggctcttacccttgtgaagcttttcctttagcctgggacagaaggacctcccagcccccaaaggatctcccagtgaccaaaggatgcgaagagtgatagttacgtgctcctgactgatcacaccgcagacatttagatttttatacccaaggcactttaaaaaaatgttttataaatagagaataaattgaattcttgttccataaa

SEQ ID NO: 423935 - DNA, 1433 bp, Homo sapiens
gctaaccccctaactcccgttcctcctcggcgtttcttctccaagtccgaagtcagggtccaggactgctgcgatgcatcagccccgcctctcatcccccatccagaggaggcggaaatgttcaggtgaacgcgaagcctcccactacgagccggccctcagcaaggccgtgcgcagtgtgggcgggagccctaagtcagctagcggcgacgctgggagggcccggagcaggccgggccccgaacagcgaaagctccaacatggcggccagactggccatagagcgggaagagaaagccggggactagcaggccgcacggcgcagacggggcccgcctcctccatttacttccggaatttaaagccggcttccggaagccgggacgatgtccgcatgacaaccgacgttggagtttggaggtgcttgccttagagcaagggaaacagctctcattcaaaggaactagaagcctctccctcagtgttcctgctgctgtcctatgacctctttgtcaattccttctcagaactgctccaaaagactcctgtcatccagcttgtgctcttcatcatccaggatattgcagtcctcttcaacatcatcatcattttcctcatgttcttcaacaccttcgtcttccaggctggcctggtcaacctcctattccataagttcaaagggaccatcatcctgacagctgtgtactttgccctcagcatctcccttcatgtctgggtcatgaacttacgctggaaaaactccaacagcttcatatggacagatggacttcaaatgctgtttgtattccagagactagcagcagtgttgtactgctacttctataaacggacagccgtaagactaggcgatcctcacttctaccaggactctttgtggctgcgcaaggagttcatgcaagttcgaaggtgacctcttgtcacactgatggatacttttccttcctgatagaagccacatttgctgctttgcagggagagttggccctatgcatgggcaaacagctggactttccaaggaaggttcagactagctgtgttcagcattcaagaaggaagatcctccctcttgcacaattagagtgtccccatcggtctccagtgcggcatcccttccttgccttctacctctgttccaccccctttccttcctttcctctctgtaccattcattctccctgaccggcctttcttgccgagggttctgtggctcttacccttgtgaagcttttcctttagcctgggacagaaggacctcccagcccccaaaggatctcccagtgaccaaaggatgcgaagagtgatagttacgtgctcctgactgatcacaccgcagacatttagatttttatacccaaggcactttaaaaaaatgttttataaatagagaataaattgaattcttgttccataaa

SEQ ID NO: 423936 - DNA, 1512 bp, Homo sapiens
gctaaccccctaactcccgttcctcctcggcgtttcttctccaagtccgaagtcagggtccaggactgctgcgatgcatcagccccgcctctcatcccccatccagaggaggcggaaatgttcaggtgaacgcgaagcctcccactacgagccggccctcagcaaggccgtgcgcagtgtgggcgggagccctaagtcagctagcggcgacgctgggagggcccggagcaggccgggccccgaacagcgaaagctccaacatggcggccagactggccatagagcgggaagagaaagccggggactagcaggccgcacggcgcagacggggcccgcctcctccatttacttccggaatttaaagccggcttccggaagccgggacgatgtccgcatgacaaccgacgttggagtttggaggtgcttgccttagagcaagggaaacagctctcattcaaaggaactagaagcctctccctcagtggtagggagacagccaggagcggttttctgggaactgtgggatgtgcccttgggggcccgagaaaacagaaggaagatgctccagaccagtaactacagcctggtgctctctctgcagttcctgctgctgtcctatgacctctttgtcaattccttctcagaactgcatccaggatattgcagtcctcttcaacatcatcatcattttcctcatgttcttcaacaccttcgtcttccaggctggcctggtcaacctcctattccataagttcaaagggaccatcatcctgacagctgtgtactttgccctcagcatctcccttcatgtctgggtcatgaacttacgctggaaaaactccaacagcttcatatggacagatggacttcaaatgctgtttgtattccagagactagcagcagtgttgtactgctacttctataaacggacagccgtaagactaggcgatcctcacttctaccaggactctttgtggctgcgcaaggagttcatgcaagttcgaaggtgacctcttgtcacactgatggatacttttccttcctgatagaagccacatttgctgctttgcagggagagttggccctatgcatgggcaaacagctggactttccaaggaaggttcagactagctgtgttcagcattcaagaaggaagatcctccctcttgcacaattagagtgtccccatcggtctccagtgcggcatcccttccttgccttctacctctgttccaccccctttccttcctttcctctctgtaccattcattctccctgaccggcctttcttgccgagggttctgtggctcttacccttgtgaagcttttcctttagcctgggacagaaggacctcccagcccccaaaggatctcccagtgaccaaaggatgcgaagagtgatagttacgtgctcctgactgatcacaccgcagacatttagatttttatacccaaggcactttaaaaaaatgttttataaatagagaataaattgaattcttgttccataaa

SEQ ID NO: 423937 - DNA, 880 bp, Homo sapiens
ttctcctgcctcagcctccggagtagctgggactacaggcgcccgccaccacgcccagctaattttttgtgtatttttagtagagacagggtttcaccgtgttagccaggatggtctcgatctctgacctcatgatccgcctgcctctgcctcctaaagtgctgggattacaggcgtgagccaccacgcctggccaggttctgttcttaacctgaaatgatactcaggagcacccctgaggcttctcttctgcttcctccccacacagcagtgttgtactgctacttctataaacggacagccgtaagactaggcgatcctcacttctaccaggactctttgtggctgcgcaaggagttcatgcaagttcgaaggtgacctcttgtcacactgatggatacttttccttcctgatagaagccacatttgctgctttgcagggagagttggccctatgcatgggcaaacagctggactttccaaggaaggttcagactagctgtgttcagcattcaagaaggaagatcctccctcttgcacaattagagtgtccccatcggtctccagtgcggcatcccttccttgccttctacctctgttccaccccctttccttcctttcctctctgtaccattcattctccctgaccggcctttcttgccgagggttctgtggctcttacccttgtgaagcttttcctttagcctgggacagaaggacctcccagcccccaaaggatctcccagtgaccaaaggatgcgaagagtgatagttacgtgctcctgactgatcacaccgcagacatttagatttttatacccaaggcactttaaaaaaatgttttataaatagagaataaattgaattcttgttccataaa

SEQ ID NO: 423938 - DNA, 1140 bp, Homo sapiens
gctaaccccctaactcccgttcctcctcggcgtttcttctccaagtccgaagtcagggtccaggactgctgcgatgcatcagccccgcctctcatcccccatccagaggaggcggaaatgttcaggtgaacgcgaagcctcccactacgagccggccctcagcaaggccgtgcgcagtgtgggcgggagccctaagtcagctagcggcgacgctgggagggcccggagcaggccgggccccgaacagcgaaagctccaacatggcggccagactggccatagagcgggaagagaaagccggggactagcaggccgcacggcgcagacggggcccgcctcctccatttacttccggaatttaaagccggcttccggaagccgggacgatgtccgcatgacaaccgacgttggagtttggaggtgcttgccttagagcaagggaaacagctctcattcaaaggaactagaagcctctccctcagtggtagggagacagccaggagcggttttctgggaactgtgggatgtgcccttgggggcccgagaaaacagaaggaagatgctccagaccagtaactacagcctggtgctctctctgcagttcctgctgctgtcctatgacctctttgtcaattccttctcagaactgctccaaaagactcctgtcatccagcttgtgctcttcatcatccaggatattgcagtcctcttcaacatcatcatcattttcctcatgttcttcaacaccttcgtcttccaggctggcctggtcaacctcctattccataagttcaaagggaccatcatcctgacagctgtgtactttgccctcagcatctcccttcatgtctgggtcatgaacttacgctggaaaaactccaacagcttcatatggacagatggacttcaaatgctgtttgtattccagagactaggtaaggaccagagcaaggtcaggcctctctcaggtcccacatgtgtctctttcagtgagggccttgatgctggcttcccagacctgtcccagctggcttgggatggttgtgacagccacaccaggaacaggagggattactgcccctgcccttgctagaagactatgggaaatgaggaggcagggctgcccagcctcattaggtt

SEQ ID NO: 423939 - DNA, 1185 bp, Homo sapiens
gctaaccccctaactcccgttcctcctcggcgtttcttctccaagtccgaagtcagggtccaggactgctgcgatgcatcagccccgcctctcatcccccatccagaggaggcggaaatgttcaggtgaacgcgaagcctcccactacgagccggccctcagcaaggccgtgcgcagtgtgggcgggagccctaagtcagctagcggcgacgctgggagggcccggagcaggccgggccccgaacagcgaaagctccaacatggcggccagactggccatagagcgggaagagaaagccggggactagcaggccgcacggcgcagacggggcccgcctcctccatttacttccggaatttaaagccggcttccggaagccgggacgatgtccgcatgacaaccgacgttggagtttggaggtgcttgccttagagcaagggaaacagctctcattcaaaggaactagaagcctctccctcagtggtagggagacagccaggagcggttttctgggaactgtgggatgtgcccttgggggcccgagaaaacagaaggaagatgctccagaccagtaactacagcctggtgctctctctgcagttcctgctgctgtcctatgacctctttgtcaattccttctcagaactgctccaaaagactcctgtcatccagcttgtgctcttcatcatccaggatattgcagtcctcttcaacatcatcatcattttcctcatgttcttcaacaccttcgtcttccaggctggcctggtcaacctcctattccataagttcaaagggaccatcatcctgacagctgtgtactttgccctcagcatctcccttcatgtctgggtcatgtttggaccgaattctaatttttcttgactacaagtcttcaaaataatgttttcatttttttcttcttttttccatttttttccaatttggagtcactgaaaactaagctgtgctttcataaagccctgcaaactgaatctagacaacttcagaagaaaaataacagcaacctatttacatacataagccactttcatacctgcctaccgatgtatggacttcagagtaatgtggcttatagcaattttccaggattgttcttttgtttgttgttgttctcccttcctccccctattttgtctttatgggacatgacacttcacaac

SEQ ID NO: 423940 - DNA, 1030 bp, Homo sapiens
  misc_feature (25)..(25): n is a, c, g, or t
  misc_feature (30)..(30): n is a, c, g, or t
aattcgcggccgcgtcgactacggntgcgngaagacgacagaagggggcatgacaaccgacgtttggagtttggaggtgcttgccttagagcaagggaaacagctctcattcaaaggaactagaagcctctccctcagtggtagggagacagccaggagcggttttctgggaactgtgggatgtgcccttgggggcccgagaaaacagaaggaagatgctccagaccagtaactacagcctggtgctctctctgcagttcctgctgctgtcctatgacctctttgtcaattccttctcagaactgctccaaaagactcctgtcatccagcttgtgctcttcatcatccaggatattgcagtcctcttcaacatcatcatcattttcctcatgttcttcaacaccttcgtcttccaggctggcctggtcaacctcctattccataagttcaaagggaccatcatcctgacagctgtgtactttgccctcagcatctcccttcatgtctgggtcatgaacttacgctggaaaaactccaacagcttcatatggacagatggacttcaaatgctgtttgtattccagagactagagtcaagaaaacttttaagctatttatagctttaacaattgagtatactcctatgaacaaaatttgcagcatatttgtttttctctgatttctccagaatttggagattattttttggaccgaattctaatttttcttgactacaagtcttcaaaataatgttttcatttttttcttcttttttccatttttttccaatttggagtcactgaaaactaagctgtgctttcataaagccctgcaaactgaatctagacaacttcagaagaaaaataacagcaacctatttacatacataagccactttcatacctgcctaccgatgtatggacttcagagtaatgtggcttatagcaattttccaggattgttcttttgtttgttgttgttctcccttcctccccctattttgtctttatgggacatgacacttcacaac

SEQ ID NO: 423941 - DNA, 598 bp, Homo sapiens
gctaaccccctaactcccgttcctcctcggcgtttcttctccaagtccgaagtcagggtccaggactgctgcgatgcatcagccccgcctctcatcccccatccagaggaggcggaaatgttcaggtgaacgcgaagcctcccactacgagccggccctcagcaaggccgtgcgcagtgtgggcgggagccctaagtcagctagcggcgacgctgggagggcccggagcaggccgggccccgaacagcgaaagctccaacatggcggccagactggccatagagcgggaagagaaagccggggactagcaggccgcacggcgcagacggggcccgcctcctccatttacttccggaatttaaagccggcttccggaagccgggacgatgtccgcatgacaaccgacgttggagtttggaggtgcttgccttagagcaagggaaacagctctcattcaaagccagtgaccaaaggatgcgaagagtgatagttacgtgctcctgactgatcacaccgcagacatttagatttttatacccaaggcactttaaaaaaatgttttataaatagagaataaattgaattcttgttccataaa

SEQ ID NO: 423942 - DNA, 381 bp, Homo sapiens
ctccaaaagactcctgtcatccagcttgtgctcttcatgtgcgtgcagtaaggcactctggaaagctgaacccacgcaattcaaaggccctgacagtggtgatttagtgtcttaaagttattagtaggctgggtacggtggctcacacccataatcccaggactttgggaagccaaggcaggaggatcttttgaggctgggagtttgaggaccagcctaggcaacatagcaagaccctgtctctacctactaaaaatttttaaaattagctaggcatggtgccacacacctgtaatcgcagtgattcaggatgctgacgtggaaggattgcttaagcccaggagttcaaggctacagtgagccatgatcatgccactgcac

SEQ ID NO: 423943 - DNA, 1025 bp, Homo sapiens
gaaggacttcctcctctgtgtcactgaagtcataggggtgtatgaatccccatcttggcatctggctggcgagtcttccttctcttcctcttctgctcctggtcctcttggcttttctcctcttcatcttctgtctctgattcatcctcacttcgcttcttacgtttcttctccttctccagaaccttcttaaagtaagcatactggaccaactccacagcttccttcgatcctgcaggtccacagtcttgctcatgcgggccttcgcatgggctgtggccagtcgaatcagagtttccagtgttcgggctgtaactggagatggaatgcgcggatcaagaagatcatgcagacggacgaagagattgggaaggtggcggcggcggtgcctgtcatcatctcccgggcgctcgagctcttcctagagtcgctgttgaagaaggcctgccaggtgacccagtcgcggaacgcgaagaccatgaccacatcccacctgaagcagtgcatcgagctggagcagcagtttgacttcttgaaggacctggtggcatctgttcccgacatgcagggggacggggaagacaaccacatggatggggacaagggcgcccgcaggggccggaagccaggcagcggcggccggaagaacggtgggatgggaacgaaaagcaaggacaagaagctgtccgggacagactcggagcaggaggatgaatctgaggacacagatactgatggggaagaggagacatcacaacccccaccccaggccagccacccctctgcccactttcagagccccccgacacccttcctgcccttcgcctctactctgcctttgcccccagcgcccccgggcccctcagcacctgatgaagaggacgaagaagattacgactcctagcgccttctgccccccagaccatagccccttttagttggtttttcattcccgttgttatggagggccacatctgccagagcctggagtctgcgaaggccgggaccggttccccggcccacag

SEQ ID NO: 423944 - DNA, 524 bp, Homo sapiens
ggtcttgttgattgtggcagatttgtggggtggaaggagaataactgaggagggcttgaaggcaggagactgttctcccgaaagatcctgctccaccctgccagggcccgtgggtggggcctgggcctgccctgcgtgagctgccctgggccttggccgcatggatctggagggtggtggtgggagggtcagatgggggagggagggtcttggcagctgcccctgtggagggcacggtggggctcaggcctgactctctcctgccttctgccctgcagccccccgacacccttcctgcccttcgcctctactctgcctttgcccccagcgcccccgggcccctcagcacctgatgaagaggacgaagaagattacgactcctagcgccttctgccccccagaccatagccccttttagttggttttagttgctctggggggaggagagaaggtagagctgttcttaaatttattaaaaaaaaaaataaaagggaatctcagtgtctgttccaggctctgcgcag

SEQ ID NO: 423945 - DNA, 1006 bp, Homo sapiens
ggcgggcgggagcggcggtccagactggggagggacgcgcaccggccaggaggcttcaagaggagggcactagggccctgcgagcggcgtcttaaccggcggcgctaggactccgcgggaaacggcgggggcggagcgggcggcaccaggacccaggggaaccgcgacgggcgggcggcgagcaggcccgggagccgggaggctgcgggcggcggcgctggacccgacgcggcgagagaggccccgagatgccgagcaagaagaagaagtacaacgcgcggttcccgccggcgcggatcaagaagatcatgcagacggacgaagagattgggaaggtggcggcggcggtgcctgtcatcatctcccgggcgctcgagctcttcctagagtcgctgttgaagaaggcctgccaggtgacccagtcgcggaacgcgaagaccatgaccacatcccacctgaagcagtgcatcgagctggagcagcagtttgacttcttgaaggacctggtggcatctgttcccgacatgcagggggacggggaagacaaccacatggatggggacaagggcgcccgcaggggccggaagccaggcagcggcggccggaagaacggtgggatgggaacgaaaagcaaggacaagaagctgtccgggacagactcggagcaggaggatgaatctgaggacacagatactgatggggaagaggagacatcacaacccccaccccaggccagccacccctctgcccactttcagagccccccgacacccttcctgcccttcgcctctactctgcctttgcccccagcgcccccgggcccctcagcacctgatgaagaggacgaagaagattacgactcctagcgccttctgccccccagaccatagccccttttagttggttttagttgctctggggggaggagagaaggtagagctgttcttaaatttattaaaaaaaaaaataaaagggaatctcagtgtctgttccaggctctgcgcag

SEQ ID NO: 423946 - DNA, 1480 bp, Homo sapiens
gccacgtcggtctgggtgttaagtgctccaaggaggtggccaccgccatccgtggggccatcatcctggccaagctctccatcgtccccgtgcgcagaggctactgggggaacaagatcggcaagccccacactgtcccttgcaaggtgacaggccgctgcggctctgtgctggtacgcctcatccctgcacccaggggcactggcatcgtctccgcacctgtgcctaagaagctgctcatgatggctggtatcgatgactgctacacctcagcccggggctgcactgccaccctgggcaacttcgccaaggccacctttgatgccatttctaagacctacagctacctgacccccgacctctggaaggagactgtattcaccaagtctccctatcaggagttcactgaccacctcgtcaagacccacaccagagtctccgtgcagcggactcaggctccagctgtggctacaacatagggtttttatacaagaaaaataacagtgaattaagcgtgttactgttttaaaaaaaaaaacggacgcgtgggcgggcggcgagcaggcccgggagccgggaggctgcgggcggcggcgctggacccgacgcggcgagagaggccccgagatgccgagcaagaagaagaagtacaacgcgcggttcccgccggcgcggatcaagaagatcatgcagacggacgaagagattgggaaggtggcggcggcggtgcctgtcatcatctgtatcctgccgggggcggaccgggtcgaggggcgtgggggagggaggcagcgggtcgccctctcctgccccggagttctccttgacgctcctcagcccgggcgctcgagctcttcctagagtcgctgttgaagaaggcctgccaggtgacccagtcgcggaacgcgaagaccatgaccacatcccacctgaagcagtgcatcgagctggagcagcagtttgacttcttgaaggacctggtggcatctgttcccgacatgcagggggacggggaagacaaccacatggatggggacaagggcgcccgcaggggccggaagccaggcagcggcggccggaagaacggtgggatgggaacgaaaagcaaggacaagaagctgtccgggacagactcggagcaggaggatgaatctgaggacacagatactgatggggaagaggagacatcacaacccccaccccaggccagccacccctctgcccactttcagagccccccgacacccttcctgcccttcgcctctactctgcctttgcccccagcgcccccgggcccctcagcacctgatgaagaggacgaagaagattacgactcctagcgccttctgccccccagaccatagccccttttagttggttttagttgctctggggggaggagagaaggtagagctgttcttaaatttattaaaaaaaaaaataaaagggaatctcagtgtctgttccaggctctgcgcag

SEQ ID NO: 423947 - DNA, 1382 bp, Homo sapiens
gccacgtcggtctgggtgttaagtgctccaaggaggtggccaccgccatccgtggggccatcatcctggccaagctctccatcgtccccgtgcgcagaggctactgggggaacaagatcggcaagccccacactgtcccttgcaaggtgacaggccgctgcggctctgtgctggtacgcctcatccctgcacccaggggcactggcatcgtctccgcacctgtgcctaagaagctgctcatgatggctggtatcgatgactgctacacctcagcccggggctgcactgccaccctgggcaacttcgccaaggccacctttgatgccatttctaagacctacagctacctgacccccgacctctggaaggagactgtattcaccaagtctccctatcaggagttcactgaccacctcgtcaagacccacaccagagtctccgtgcagcggactcaggctccagctgtggctacaacatagggtttttatacaagaaaaataacagtgaattaagcgtgttactgttttaaaaaaaaaaacggacgcgtgggcgggcggcgagcaggcccgggagccgggaggctgcgggcggcggcgctggacccgacgcggcgagagaggccccgagatgccgagcaagaagaagaagtacaacgcgcggttcccgccggcgcggatcaagaagatcatgcagacggacgaagagattgggaaggtggcggcggcggtgcctgtcatcatctcccgggcgctcgagctcttcctagagtcgctgttgaagaaggcctgccaggtgacccagtcgcggaacgcgaagaccatgaccacatcccacctgaagcagtgcatcgagctggagcagcagtttgacttcttgaaggacctggtggcatctgttcccgacatgcagggggacggggaagacaaccacatggatggggacaagggcgcccgcaggtggggccagggcctggcatacagtggggaaggccaaggccacagggcttgggggtggccaaggagtagggagcactccgggcagatggactgtaccttcccaaaggggccggaagccaggcagcggcggccggaagaacggtgggatgggaacgaaaagcaaggacaagaagctgtccgggacagactcggagcaggaggtgagtgaggccccagcccttcgccctgcccttggtgatgggacaggcagcctcgccaagctgacggaggagcagttaaccttctgaacggtgcccggaactgaacgggcagaggaagcggcgtccccagaggacgatactgaatacccggccggacagcccgggagacaccccaacacaaaaccacacgacaccacaaaacccaacaaccaccacaagaaccccc

SEQ ID NO: 423948 - DNA, 649 bp, Homo sapiens
gcctggtgtgattccgtcctgcgcggttgttctctggagcagcgttcttttatctccgtccgccttctctcctacctaagtgcgtgccgccacccgatggaagattcgatggacatggacatgagccccctgaggccccagaactatcttttcggttgtgaactaaaggccgacaaagattatcactttaaggtggataatgatgaacaatgagcaccagttatctttaagaacggtcagtttaggggctggtgcaaaggatgagttgcacattgttgaagcagaggcaatgaattacgaaggcagtccaattaaagtaacactggcaactttgaaaatgtctgtacagccaacggtttcccttgggggctttgaaataacaccaccagtggtcttaaggttgaagtgtggttcagggccagtgcatattagtggacagcacttagtagctgtggaggaagatgcagagtcagaagatgaacgaggacgaagaagattacgactcctagcgccttctgccccccagaccatagccccttttagttggttttagttgctctggggggaggagagaaggtagagctgttcttaaatttattaaaaaaaaaaataaaagggaatctcagtgtctgttccaggctctgcgcag

SEQ ID NO: 423949 - DNA, 1385 bp, Homo sapiens
gccacgtcggtctgggtgttaagtgctccaaggaggtggccaccgccatccgtggggccatcatcctggccaagctctccatcgtccccgtgcgcagaggctactgggggaacaagatcggcaagccccacactgtcccttgcaaggtgacaggccgctgcggctctgtgctggtacgcctcatccctgcacccaggggcactggcatcgtctccgcacctgtgcctaagaagctgctcatgatggctggtatcgatgactgctacacctcagcccggggctgcactgccaccctgggcaacttcgccaaggccacctttgatgccatttctaagacctacagctacctgacccccgacctctggaaggagactgtattcaccaagtctccctatcaggagttcactgaccacctcgtcaagacccacaccagagtctccgtgcagcggactcaggctccagctgtggctacaacatagggtttttatacaagaaaaataacagtgaattaagcgtgttactgttttaaaaaaaaaaacggacgcgtgggcgggcggcgagcaggcccgggagccgggaggctgcgggcggcggcgctggacccgacgcggcgagagaggccccgagatgccgagcaagaagaagaagtacaacgcgcggttcccgccggcgcggatcaagaagatcatgcagacggacgaagagattgggaaggtggcggcggcggtgcctgtcatcatctcccgggcgctcgagctcttcctagagtcgctgttgaagaaggcctgccaggtgacccagtcgcggaacgcgaagaccatgaccacatcccacctgaagcagtgcatcgagctggagcagcagtttgacttcttgaaggacctggtggcatctgttcccgacatgcagggggacggggaagacaaccacatggatggggacaagggcgcccgcaggggccggaagccaggcagcggcggccggaagaacggtgggatgggaacgaaaagcaaggacaagaagctgtccgggacagactcggagcaggaggatgaatctgaggacacagatactgatggggaagaggagacatcacaacccccaccccaggccagccacccctctgcccactttcagagccccccgacacccttcctgcccttcgcctctactctgcctttgcccccagcgcccccgggcccctcagcacctgatgaagaggacgaagaagattacgactcctagcgccttctgccccccagaccatagccccttttagttggttttagttgctctggggggaggagagaaggtagagctgttcttaaatttattaaaaaaaaaaataaaagggaatctcagtgtctgttccaggctctgcgcag

SEQ ID NO: 423950 - DNA, 1268 bp, Homo sapiens
gccacgtcggtctgggtgttaagtgctccaaggaggtggccaccgccatccgtggggccatcatcctggccaagctctccatcgtccccgtgcgcagaggctactgggggaacaagatcggcaagccccacactgtcccttgcaaggtgacaggccgctgcggctctgtgctggtacgcctcatccctgcacccaggggcactggcatcgtctccgcacctgtgcctaagaagctgctcatgatggctggtatcgatgactgctacacctcagcccggggctgcactgccaccctgggcaacttcgccaaggccacctttgatgccatttctaagacctacagctacctgacccccgacctctggaaggagactgtattcaccaagtctccctatcaggagttcactgaccacctcgtcaagacccacaccagagtctccgtgcagcggactcaggctccagctgtggctacaacatagggtttttatacaagaaaaataacagtgaattaagcgtgttactgttttaaaaaaaaaaacggacgcgtgggcgggcggcgagcaggcccgggagccgggaggctgcgggcggcggcgctggacccgacgcggcgagagaggccccgagatgccgagcaagaagaagaagtacaacgcgcggttcccgccggcgcggatcaagaagatcatgcagacggacgaagagattgggaaggtggcggcggcggtgcctgtcatcatctcccgggcgctcgagctcttcctagagtcgctgttgaagaaggcctgccagggggacggggaagacaaccacatggatggggacaagggcgcccgcaggggccggaagccaggcagcggcggccggaagaacggtgggatgggaacgaaaagcaaggacaagaagctgtccgggacagactcggagcaggaggatgaatctgaggacacagatactgatggggaagaggagacatcacaacccccaccccaggccagccacccctctgcccactttcagagccccccgacacccttcctgcccttcgcctctactctgcctttgcccccagcgcccccgggcccctcagcacctgatgaagaggacgaagaagattacgactcctagcgccttctgccccccagaccatagccccttttagttggttttagttgctctggggggaggagagaaggtagagctgttcttaaatttattaaaaaaaaaaataaaagggaatctcagtgtctgttccaggctctgcgcag

SEQ ID NO: 423951 - DNA, 235 bp, Homo sapiens
ctgggtgccaaagagcaggcctctggcgtgatgcccagaggcacctgcgaagtggtgctgatgcacctggagcaagtgcccatctgccctttcccatccttacaagcttctctcccttcttcctggaattggattttatgttaaacaacttctaaggccagaacattcctctaggtgggttcatcttacttaccagaaattggcttatccccaaaaactttgaagtctgttgaca

SEQ ID NO: 423952 - DNA, 433 bp, Homo sapiens
ttgatggagtcttgctctgtcaccaggctggagtgcagtggcgtgatctcagctcactgcaacctctgactcctgggttcaggtgattctcctgcctcagcctcccgagtagctaggactacaggtgcctgccaccatgcctggctaatttttgtatatttagtaaagatggggttttaccatgttggccaggctggtctcgaactcctgacctcatgatctgcccgcctcagcctcccaaagtgctgggattacaggtgtgagccaccgtgcctggccaaatctatcttttgctgtacattttaaaacatatttctgatagttatgttgaatttcttgtttgctaattctaacatctgcccacctgttggtctgctgctctttgcagtttttttcccttgattatagtcagttattggttgttgtccttcac

SEQ ID NO: 423953 - DNA, 1294 bp, Homo sapiens
ggcagctgcacggctcctggccccggagcatgcgcgagagccgccccggagcgccccggagccccccgccgtcccgcccgcggcgtcccgcgccccgccgccagcgcacccccggacgctatggcccacccctccggctggccccttctgtaggatggtagcacacaaccaggtggcagccgacaatgcagtctccacagcagcagagccccgacggcggccagaaccttcctcctcttcctcctcctcgcccgcggcccccgcgcgcccgcggccgtgccccgcggtcccggccccggcccccggcgacacgcacttccgcacattccgttcgcacgccgattaccggcgcatcacgcgcgccagcgcgctcctggacgcctgcggattctactgggggcccctgagcgtgcacggggcgcacgagcggctgcgcgccgagcccgtgggcaccttcctggtgcgcgacagccgccagcggaactgctttttcgcccttagcgtgaagatggcctcgggacccacgagcatccgcgtgcactttcaggccggccgctttcacctggatggcagccgcgagagcttcgactgcctcttcgagctgctggagcactacgtggcggcgccgcgccgcatgctgggggccccgctgcgccagcgccgcgtgcggccgctgcaggagctgtgccgccagcgcatcgtggccaccgtgggccgcgagaacctggctcgcatccccctcaaccccgtcctccgcgactacctgagctccttccccttccagatttgaccggcagcgcccgccgtgcacgcagcattaactgggatgccgtgttattttgttattacttgcctggaaccatgtgggtaccctccccggcctgggttggagggagcggatgggtgtaggggcgaggcgcctcccgccctcggctggagacgaggccgcagaccccttctcacctcttgagggggtcctccccctcctggtgctccctctgggtccccctggttgttgtagcagcttaactgtatctggagccaggacctgaactcgcacctcctacctcttcatgtttacatatacccagtatctttgcacaaaccaggggttgggggagggtctctggctttatttttctgctgtgcagaatcctattttatattttttaaagtcagtttaggtaataaactttattatgaaagtttttttttttttttttttttttttttttttttttttttttttttttttttttttattatactaaacaatataaaaagaaaccttaat

SEQ ID NO: 423954 - DNA, 1251 bp, Homo sapiens
ggcagctgcacggctcctggccccggagcatgcgcgagagccgccccggagcgccccggagccccccgccgtcccgcccgcggcgtcccgcgccccgccgccagcgcacccccggacgctatggcccacccctccggctggccccttctgtaggatggtagcacacaaccaggtggcagccgacaatgcagtctccacagcagcagagccccgacggcggccagaaccttcctcctcttcctcctcctcgcccgcggcccccgcgcgcccgcggccgtgccccgcggtcccggccccggcccccggcgacacgcacttccgcacattccgttcgcacgccgattaccggcgcatcacgcgcgccagcgcgctcctggacgcctgcggattctactgggggcccctgagcgtgcacggggcgcacgagcggctgcgcgccgagcccgtgggcaccttcctggtgcgcgacagccgccagcggaactgctttttcgcccttagcgtgaagatggcctcgggacccacgagcatccgcgtgcactttcaggccggccgctttcacctggatggcagccgcgagagcttcgactgcctcttcgagctgctggagcactacgtggcggcgccgcgccgcatgctgggggccccgctgcgccagcgccgcgtgcggccgctgcaggagctgtgccgccagcgcatcgtggccaccgtgggccgcgagaacctggctcgcatccccctcaaccccgtcctccgcgactacctgagctccttccccttccagatttgaccggcagcgcccgccgtgcacgcagcattaactgggatgccgtgttattttgttattacttgcctggaaccatgtgggtaccctccccggcctgggttggagggagcggatgggtgtaggggcgaggcgcctcccgccctcggctggagacgaggccgcagaccccttctcacctcttgagggggtcctccccctcctggtgctccctctgggtccccctggttgttgtagcagcttaactgtatctggagccaggacctgaactcgcacctcctacctcttcatgtttacatatacccagtatctttgcacaaaccaggggttgggggagggtctctggctttatttttctgctgtgcagaatcctattttatattttttaaagtcagtttaggtaataaactttattatgaaagttttttttttcgcacacccaggcctcgctacctagcgtatagttt

SEQ ID NO: 423955 - DNA, 1280 bp, Homo sapiens
ggcagctgcacggctcctggccccggagcatgcgcgagagccgccccggagcgccccggagccccccgccgtcccgcccgcggcgtcccgcgccccgccgccagcgcacccccggacgctatggcccacccctccggctggccccttctgtaggatggtagcacacaaccaggtggcagccgacaatgcagtctccacagcagcagagccccgacggcggccagaaccttcctcctcttcctcctcctcgcccgcggcccccgcgcgcccgcggccgtgccccgcggtcccggccccggcccccggcgacacgcacttccgcacattccgttcgcacgccgattaccggcgcatcacgcgcgccagcgcgctcctggacgcctgcggattctactgggggcccctgagcgtgcacggggcgcacgagcggctgcgcgccgagcccgtgggcaccttcctggtgcgcgacagccgccagcggaactgctttttcgcccttagcgtgaagatggcctcgggacccacgagcatccgcgtgcactttcaggccggccgctttcacctggatggcagccgcgagagcttcgactgcctcttcgagctgctggagcactacgtggcggcgccgcgccgcatgctgggggccccgctgcgccagcgccgcgtgcggccgctgcaggagctgtgccgccagcgcatcgtggccaccgtgggccgcgagaacctggctcgcatccccctcaaccccgtcctccgcgactacctgagctccttccccttccagatttgaccggcagcgcccgccgtgcacgcagcattaactgggatgccgtgttattttgttattacttgcctggaaccatgtgggtaccctccccggcctgggttggagggagcggatgggtgtaggggcgaggcgcctcccgccctcggctggagacgaggccgcagaccccttctcacctcttgagggggtcctccccctcctggtgctccctctgggtccccctggttgttgtagcagcttaactgtatctggagccaggacctgaactcgcacctcctacctcttcatgtttacatatacccagtatctttgcacaaaccaggggttgggggagggtctctggctttatttttctgctgtgcagaatcctattttatattttttaaagtcagtttaggtaataaactttattatgaaagttttttttttaaaattaaataaatttatttataatatataatatatataaaaaaaatttaattaactttttatt

SEQ ID NO: 423956 - DNA, 1105 bp, Homo sapiens
aatacttacgtaagagcaaagcctaaaaaaaccaggaaattaataattttcatcttcttagaccgcggcccccgcgcgcccgcggccgtgccccgcggtcccggccccggcccccggcgacacgcacttccgcacattccgttcgcacgccgattaccggcgcatcacgcgcgccagcgcgctcctggacgcctgcggattctactgggggcccctgagcgtgcacggggcgcacgagcggctgcgcgccgagcccgtgggcaccttcctggtgcgcgacagccgccagcggaactgctttttcgcccttagcgtgaagatggcctcgggacccacgagcatccgcgtgcactttcaggccggccgctttcacctggatggcagccgcgagagcttcgactgcctcttcgagctgctggagcactacgtggcggcgccgcgccgcatgctgggggccccgctgcgccagcgccgcgtgcggccgctgcaggagctgtgccgccagcgcatcgtggccaccgtgggccgcgagaacctggctcgcatccccctcaaccccgtcctccgcgactacctgagctccttccccttccagatttgaccggcagcgcccgccgtgcacgcagcattaactgggatgccgtgttattttgttattacttgcctggaaccatgtgggtaccctccccggcctgggttggagggagcggatgggtgtaggggcgaggcgcctcccgccctcggctggagacgaggccgcagaccccttctcacctcttgagggggtcctccccctcctggtgctccctctgggtccccctggttgttgtagcagcttaactgtatctggagccaggacctgaactcgcacctcctacctcttcatgtttacatatacccagtatctttgcacaaaccaggggttgggggagggtctctggctttatttttctgctgtgcagaatcctattttatattttttaaagtcagtttaggtaataaactttattatgaaagtttttttttttttttttttttttttttttttttttttttttttttttttttttttattatactaaacaatataaaaagaaaccttaat

SEQ ID NO: 423957 - DNA, 819 bp, Homo sapiens
aatacttacgtaagagcaaagcctaaaaaaaccaggaaattaataattttcatcttcttagaccgcggcccccgcgcgcccgcggccgtgccccgcggtcccggccccggcccccggcgacacgcacttccgcacattccgttcgcacgccgattaccggcgcatcacgcgcgccagcgcgctcctggacgcctgcggattctactgggggcccctgagcgtgcacggggcgcacgagcggctgcgcgccgagcccgtgggcaccttcctggtgcgcgacagccgccagcggaactgctttttcgcccttagcgtgaagatggcctcgggacccacgcagcattaactgggatgccgtgttattttgttattacttgcctggaaccatgtgggtaccctccccggcctgggttggagggagcggatgggtgtaggggcgaggcgcctcccgccctcggctggagacgaggccgcagaccccttctcacctcttgagggggtcctccccctcctggtgctccctctgggtccccctggttgttgtagcagcttaactgtatctggagccaggacctgaactcgcacctcctacctcttcatgtttacatatacccagtatctttgcacaaaccaggggttgggggagggtctctggctttatttttctgctgtgcagaatcctattttatattttttaaagtcagtttaggtaataaactttattatgaaagtttttttttttttttttttttttttttttttttttttttttttttttttttttttattatactaaacaatataaaaagaaaccttaat

SEQ ID NO: 423958 - DNA, 1246 bp, Homo sapiens
ggcagctgcacggctcctggccccggagcatgcgcgagagccgccccggagcgccccggagccccccgccgtcccgcccgcggcgtcccgcgccccgccgccagcgcacccccggacgctatggcccacccctccggctggccccttctgtaggatggtagcacacaaccaggtggcagccgacaatgcagtctccacagcagcagagccccgacggcggccagaaccttcctcctcttcctcctcctcgcccgcggcccccgcgcgcccgcggccgtgccccgcggtcccggccccggcccccggcgacacgcacttccgcacattccgttcgcacgccgattaccggcgcatcacgcgcgccagcgcgctcctggacgcctgcggattctactgggggcccctgagcgtgcacggggcgcacgagcggctgcgcgccgagcccgtgggcaccttcctggtgcgcgacagccgccagcggaactgctttttcgcccttagcgtgaagatggcctcgggacccacgagcatccgcgtgcactttcaggccggccgctttcacctggatggcagccgcgagagcttcgactgcctcttcgagctgctggagcactacgtggcggcgccgcgccgcatgctgggggccccgctgcgccagcgccgcgtgcggccgctgcaggagctgtgccgccagcgcatcgtggccaccgtgggccgcgagaacctggctcgcatccccctcaaccccgtcctccgcgactacctgagctccttccccttccagatttgaccggcagcgcccgccgtgcacgcagcattaactgggatgccgtgttattttgttattacttgcctggaaccatgtgggtaccctcccgccctcggctggagacgaggccgcagaccccttctcacctcttgagggggtcctccccctcctggtgctccctctgggtccccctggttgttgtagcagcttaactgtatctggagccaggacctgaactcgcacctcctacctcttcatgtttacatatacccagtatctttgcacaaaccaggggttgggggagggtctctggctttatttttctgctgtgcagaatcctattttatattttttaaagtcagtttaggtaataaactttattatgaaagtttttttttttttttttttttttttttttttttttttttttttttttttttttttattatactaaacaatataaaaagaaaccttaat

SEQ ID NO: 423959 - DNA, 765 bp, Homo sapiens
ggcagctgcacggctcctggccccggagcatgcgcgagagccgccccggagcgccccggagccccccgccgtcccgcccgcggcgtcccgcgccccgccgccagcgcacccccggacgctatggcccacccctccggctggccccttctgtaggatggtagcacacaaccaggtggcagccgacaatgcagtctccacagcagcagagccccgacggcggccagaaccttcctcctcttcctcctcctcgcccgcggcccccgcgcgcccgcggccgtgccccgcggtcccggccccggcccccggcgacacgcacttccgcacattccgttcgcacgccgattaccggcgcatcacgcgcgccagcgcgctcctggacgcctgcggattctactgggggcccctgagcgtgcacggggcgcacgagcggctgcgcgccgagcccgtgggcaccttcctggtgcgcgacagccgccagcggaactgctttttcgccttaactgtatctggagccaggacctgaactcgcacctcctacctcttcatgtttacatatacccagtatctttgcacaaaccaggggttgggggagggtctctggctttatttttctgctgtgcagaatcctattttatattttttaaagtcagtttaggtaataaactttattatgaaagtttttttttttttttttttttttttttttttttttttttttttttttttttttttattatactaaacaatataaaaagaaaccttaat

SEQ ID NO: 423960 - DNA, 749 bp, Homo sapiens
gctccgcggagtacagagcccattttctagctgtgtccactgaggctgaacggatccgcgcggacttggtgctccgtgctcgccccctagggccgggtccgccgggagcgccgccctccggagttgtccggccggcgcacacctgcccggccccgcagcgccccagctcaccgctttgtctctcccgcagcgcacccccggacgctatggcccacccctccggctggccccttctgtaggatggtagcacacaaccaggtggcagccgacaatgcagtctccacagcagcagagccccgacggcggccagaaccttcctcctcttcctcctcctcgcccgcggcccccgcgcgcccgcggccgtgccccgcggtcccggccccggcccccggcgacacgcacttccgcacattccgttcgcacgccgattaccggcgcatcacgcgcgccagcgcgctcctggacgcctgcggattctactgggggcccctgagcgtgcacggggcgcacgagcggctgcgcgccgagcccgtgggcaccttcctggtgcgcgacagccgccagcggaactgctttttcgcccttagcgtgaagatggcctcgggacccacgagcatccgcgtgcactttcaggccggccgctttcacctggatggcagccgcgagagcttcgactgcctcttcgagctgctggagcactacgtggcggcgccgcgccgcatgctgggggccccgctgcgccagcgccg

SEQ ID NO: 423961 - DNA, 872 bp, Homo sapiens
gacagtgatagggtgaaatggattgaattattccactcatagaaaagtgaggtgagactgacacacagaagagagaaagaaaagagaggaccaggtacaggagaaatgcataaattgtaacagcaatttagagaggatcagatattttgagcatgctttcaactctttactttctatcctttacatactaacctttgtggatatgttgtatataattacagataaaggcatgttatatattaattatatcatcaatggactgttttattacttctttcaaccaattcttcaattttactcaagctgcaaatcacactatcaaaagttaaagatgaaaaacacttgcaaggtcacggcttgtcctttttcctgagtagggggaggaaaaccagtgttttcttcagtattttgtaaaagtgatattctatctttccacgcttgtgtgcactactgaggtctgcgcaaatgctcttgctttgctggttggttttgctcagagacaggttttaaatgcactagaggaaagcagcttttgctaaatgttttataacgtgtcaggaaacctttatcgaacatttaatccaaaacctggctttgaaccagggaggcatacaatttcgtaattaattttttaaccttcttttgctaatcgctgataaaaagcttaattctattaacaactcgacttgacaaattgcaccgctcaatggaagcgtttagaaattaattacgcattttattgcattagatcggataaacaaggaaggatcagcaaggaaaaggaaaacccaaaaagaaggaaaatggccaaatatatacaatccactggtgtctgactatttccattattattcaatgtgtcaccaaaaaaa

SEQ ID NO: 423962 - DNA, 1611 bp, Homo sapiens
tgaggcctgactttttcaataaaacattgtgtagttctgggcctcctgctgccccggctctgtttcccctggcgccaagagaagaaggcggaactgaacccaggcccagagccggctccctgaggctgtgcccctttccggcaatctctggccacaacccccactggccaggccgtccctcccactggccctagggcccctcccactcccacaccagataaggacagcccagtgccgctttctctggcagtaggcaccagggctggaatggggccgcccggctccccatggcagtgggtgacgctgctgctggggctgctgctccctcctgccgcccccttctggctcctcaatgtgctcttccccccgcacaccacgcccaaggctgagctcagtaaccacacacggcccgtcatcctcgtgcccggctgcctggggaatcagctagaagccaagctggacaaaccagatgtggtgaactggatgtgctaccgcaagacagaggacttcttcaccatctggctggatctcaacatgttcctaccccttggggtagactgctggatcgataacaccagggttgtctacaaccggagctctgggctcgtgtccaacgcccctggtgtccagatccgcgtccctggctttggcaagacctactctgtggagtacctggacagcagcaagctggcagggtacctgcacacactggtgcagaacctggtcaacaatggctacgtgcgggacgagactgtgcgcgccgccccctatgactggcggctggagcccggccagcaggaggagtactaccgcaagctcgcagggctggtggaggagatgcacgctgcctatgggaagcctgtcttcctcattggccacagcctcggctgtctacacttgctctatttcctgctgcgccagccccaggcctggaaggaccgctttattgatggcttcatctctcttggggctccctggggtggctccatcaagcccatgctggtcttggcctcaggtgacaaccagggcatccccatcatgtccagcatcaagctgaaagaggagcagcgcataaccaccacctccccctggatgtttccctctcgcatggcgtggcctgaggaccacgtgttcatttccacacccagcttcaactacacaggccgtgacttccaacgcttctttgcagacctgcactttgaggaaggctggtacatgtggctgcagtcacgtgacctcctggcaggactcccagcacctggtgtggaagtatactgtctttacggcgtgggcctgcccacgccccgcacctacatctacgaccacggcttcccctacacggaccctgtgggtgtgctctatgaggatggtgatgacacggtggcgacccgcagcaccgagctctgtggcctgtggcagggccgccagccacagcctgtgcacctgctgcccctgcacgggatacagcatctcaacatggtcttcagcaacctgaccctggagcacatcaatgccatcctgctgggtgcctaccgccagggtccccctgcatccccgactgccagcccagagcccccgcctcctgaataaagaccttcctttgctaccgta

SEQ ID NO: 423963 - DNA, 1447 bp, Homo sapiens
catagtaactggttgctcttcctattggtcatagataaatgacacctgcacaattctccgagtgctttaagcaacttcgggaggcgtgactaagaccctttccttgctcccagcttcctatgtcccagggctgcctgtggcacctggactgctgctgctccctcctgccgcccccttctggctcctcaatgtgctcttccccccgcacaccacgcccaaggctgagctcagtaaccacacacggcccgtcatcctcgtgcccggctgcctggggaatcagctagaagccaagctggacaaaccagatgtggtgaactggatgtgctaccgcaagacagaggacttcttcaccatctggctggatctcaacatgttcctaccccttggggtagactgctggatcgataacaccagggttgtctacaaccggagctctgggctcgtgtccaacgcccctggtgtccagatccgcgtccctggctttggcaagacctactctgtggagtacctggacagcagcaagctggcagggtacctgcacacactggtgcagaacctggtcaacaatggctacgtgcgggacgagactgtgcgcgccgccccctatgactggcggctggagcccggccagcaggaggagtactaccgcaagctcgcagggctggtggaggagatgcacgctgcctatgggaagcctgtcttcctcattggccacagcctcggctgtctacacttgctctatttcctgctgcgccagccccaggcctggaaggaccgctttattgatggcttcatctctcttggggctccctggggtggctccatcaagcccatgctggtcttggcctcaggtgacaaccagggcatccccatcatgtccagcatcaagctgaaagaggagcagcgcataaccaccacctccccctggatgtttccctctcgcatggcgtggcctgaggaccacgtgttcatttccacacccagcttcaactacacaggccgtgacttccaacgcttctttgcagacctgcactttgaggaaggctggtacatgtggctgcagtcacgtgacctcctggcaggactcccagcacctggtgtggaagtatactgtctttacggcgtgggcctgcccacgccccgcacctacatctacgaccacggcttcccctacacggaccctgtgggtgtgctctatgaggatggtgatgacacggtggcgacccgcagcaccgagctctgtggcctgtggcagggccgccagccacagcctgtgcacctgctgcccctgcacgggatacagcatctcaacatggtcttcagcaacctgaccctggagcacatcaatgccatcctgctgggtgcctaccgccagggtccccctgcatccccgactgccagcccagagcccccgcctcctgaataaagaccttcctttgctaccgta

SEQ ID NO: 423964 - DNA, 923 bp, Homo sapiens
tgaggcctgactttttcaataaaacattgtgtagttctgggcctcctgctgccccggctctgtttcccctggcgccaagagaagaaggcggaactgaacccaggcccagagccggctccctgaggctgtgcccctttccggcaatctctggccacaacccccactggccaggccgtccctcccactggccctagggcccctcccactcccacaccagataaggacagcccagtgccgctttctctggcagtaggcaccagggctggaatggggccgcccggctccccatggcagtgggtgacgctgctgctggggctgctgctccctcctgccgcccccttctggctcctcaatgtgctcttccccccgcacaccacgcccaaggctgagctcagtaaccacacacggcccgtcatcctcggtaagcccccaccaggcccctgatgcaccacgccagaccctggggagcctgggccccagcccctggcagctgacctggccaaagcccttctgccctgcataagccccgacataagtacctgccctggtgtggggaggggccaaaagcttgtcccttagaggaatgacgtcccttctcccaccacactgtgactctcagttgtctaacccagggggggcggagtgggggacggggtgtgcctgaggtcttggctggggcatcacaagctgtggtcagtcacagccacaccagactctgggccaagccccaccactccttccttggcccccacccaccaaggacaagatgcccagcccaggatcggtgagcaggagaggcccatccatgcccggcccctattaggcccagcccccatgcccccagacctatctgttcccaccttggactttggcaataaaggagcgccagactgggtgtttgctctgcagaggcaggggtcagc

SEQ ID NO: 423965 - DNA, 2065 bp, Homo sapiens
tgaggcctgactttttcaataaaacattgtgtagttctgggcctcctgctgccccggctctgtttcccctggcgccaagagaagaaggcggaactgaacccaggcccagagccggctccctgaggctgtgcccctttccggcaatctctggccacaacccccactggccaggccgtccctcccactggccctagggcccctcccactcccacaccagataaggacagcccagtgccgctttctctggcagtaggcaccagggctggaatggggccgcccggctccccatggcagtgggtgacgctgctgctggggctgctgctccctcctgccgcccccttctggctcctcaatgtgctcttccccccgcacaccacgcccaaggctgagctcagtaaccacacacggcccgtcatcctcgtgcccggctgcctggggaatcagctagaagccaagctggacaaaccagatgtggtgaactggatgtgctaccgcaagacagaggacttcttcaccatctggctggatctcaacatgttcctaccccttggggtagactgctggatcgataacaccagggttgtctacaaccggagctctgggctcgtgtccaacgcccctggtgtccagatccgcgtccctggctttggcaagacctactctgtggagtacctggacagcagcaagctggcagggtacctgcacacactggtgcagaacctggtcaacaatggctacgtgcgggacgagactgtgcgcgccgccccctatgactggcggctggagcccggccagcaggaggagtactaccgcaagctcgcagggctggtggaggagatgcacgctgcctatgggaagcctgtcttcctcattggccacagcctcggctgtctacacttgctctatttcctgctgcgccagccccaggcctggaaggaccgctttattgatggcttcatctctcttggggctccctggggtggctccatcaagcccatgctggtcttggcctcaggtgacaaccagggcatccccatcatgtccagcatcaagctgaaagaggagcagcgcataaccaccacctccccctggatgtttccctctcgcatggcgtggcctgaggaccacgtgttcatttccacacccagcttcaactacacaggccgtgacttccaacgcttctttgcagacctgcactttgaggaaggctggtacatgtggctgcagtcacgtgacctcctggcaggactcccagcacctggtgtggaagtatactgtctttacggcgtgggcctgcccacgccccgcacctacatctacgaccacggcttcccctacacggaccctgtgggtgtgctctatgaggatggtgatgacacggtggcgacccgcagcaccgagctctgtggcctgtggcagggccgccagccacagcctgtgcacctgctgcccctgcacgggatacagcatctcaacatggtcttcagcaacctgaccctggagcacatcaatgccatcctgctgggtgcctaccgccagggtccccctgcatccccgactgccagcccagagcccccgcctcctgaataaagaccttcctttgctaccgtaagccctgatggctatgtttcaggttgaagggaggcactagagtcccacactaggtttcactcctcaccagccacaggctcagtgctgtgtgcagtgaggcaagatgggctctgctgaggcctgggactgagctgggcaccctagatgtacagctgcccactctcctggtcgagctgttgaggcagtgtgcaccgtgcctgcctctgtgctgggcgcggggactggagctggctccacccacagccctgtcagaggagcacggggcggtgggggggcggtgacaatttgagctgtctctcccagctcccaaaagggcaggtgagacgaccttttgagtgctgggtgaatgacagggccacaagtgtttagaggccgggcacggtggctcacgcctgtaatcctggcactttgggagaccgaggcaggcggatcacctgaactcaggagtttgaga

SEQ ID NO: 423966 - DNA, 1970 bp, Homo sapiens
tgaggcctgactttttcaataaaacattgtgtagttctgggcctcctgctgccccggctctgtttcccctggcgccaagagaagaaggcggaactgaacccaggcccagagccggctccctgaggctgtgcccctttccggcaatctctggccacaacccccactggccaggccgtccctcccactggccctagggcccctcccactcccacaccagataaggacagcccagtgccgctttctctggcagtaggcaccagggctggaatggggccgcccggctccccatggcagtgggtgacgctgctgctggggctgctgctccctcctgccgcccccttctggctcctcaatgtgctcttccccccgcacaccacgcccaaggctgagctcagtaaccacacacggcccgtcatcctcgtgcccggctgcctggggaatcagctagaagccaagctggacaaaccagatgtggtgaactggatgtgctaccgcaagacagaggacttcttcaccatctggctggatctcaacatgttcctaccccttggggtagactgctggatcgataacaccagggttgtctacaaccggagctctgggctcgtgtccaacgcccctggtgtccagatccgcgtccctggctttggcaagacctactctgtggagtacctggacagcagcaagctggcagggtacctgcacacactggtgcagaacctggtcaacaatggctacgtgcgggacgagactgtgcgcgccgccccctatgactggcggctggagcccggccagcaggaggagtactaccgcaagctcgcagggctggtggaggagatgcacgctgcctatgggaagcctgtcttcctcattggccacagcctcggctgtctacacttgctctatttcctgctgcgccagccccaggcctggaaggaccgctttattgatggcttcatctctcttggggctccctggggtggctccatcaagcccatgctggtcttggcctcaggtgacaaccagggcatccccatcatgtccagcatcaagctgaaagaggagcagcgcataaccaccacctccccctggatgtttccctctcgcatggcgtggcctgaggaccacgtgttcatttccacacccagcttcaactacacaggccgtgacttccaacgcttctttgcagacctgcactttgaggaaggctggtacatgtggctgcagtcacgtgacctcctggcaggactcccagcacctggtgtggaagtatactgtctttacggcgtgggcctgcccacgccccgcacctacatctacgaccacggcttcccctacacggaccctgtgggtgtgctctatgaggatggtgatgacacggtggcgacccgcagcaccgagctctgtggcctgtggcagggccgccagccacagcctgtgcacctgctgcccctgcacgggatacagcatctcaacatggtcttcagcaacctgaccctggagcacatcaatgccatcctgctgggtgcctaccgccagggtccccctgcatccccgactgccagcccagagcccccgcctcctgaataaagaccttcctttgctaccgtaagccctgatggctatgtttcaggttgaagggaggcactagagtcccacactaggtttcactcctcaccagccacaggctcagtgctgtgtgcagtgaggcaagatgggctctgctgaggcctgggactgagctgggcaccctagatgtacagctgcccactctcctggtcgagctgttgaggcagtgtgcaccgtgcctgcctctgtgctgggcgcggggactggagctggctccacccacagccctgtcagaggagcacggggcggtgggggggcggtgacaatttgagctgttgggccagggatggtggctcacgcctgtaatcccagcactttgggaggccgaggcaggtggatca

SEQ ID NO: 423967 - DNA, 913 bp, Homo sapiens
gactcctggcctcaagtgatcctcctgcctcagcctcccaaagtgttgggattacagaggggtggcgtggtgcctgtccctgccatccttttgaagccctacagctccacccaacagaggtcttatcagggcttctcattgagtaagctgacactgagcatcattgaatatcaggcctgctcaagcctgtggcttagagtctgtgtctagattgggcagggacaagattgagcatctggctgagcctacactcagcaggttgtgggccaggggtagccaggcctggctccctgtcccaccttgctccatatccacaggtgacaaccagggcatccccatcatgtccagcatcaagctgaaagaggagcagcgcataaccaccacctccccctggatgtttccctctcgcatggcgtggcctgaggaccacgtgttcatttccacacccagcttcaactacacaggccgtgacttccaacgcttctttgcagacctgcactttgaggaaggctggtacatgtggctgcagtcacgtgacctcctggcaggactcccagcacctggtgtggaagtatactgtctttacggcgtgggcctgcccacgccccgcacctacatctacgaccacggcttcccctacacggaccctgtgggtgtgctctatgaggatggtgatgacacggtggcgacccgcagcaccgagctctgtggcctgtggcagggccgccagccacagcctgtgcacctgctgcccctgcacgggatacagcatctcaacatggtcttcagcaacctgaccctggagcacatcaatgccatcctgctgggtgcctaccgccagggtccccctgcatccccgactgccagcccagagcccccgcctcctgaataaagaccttcctttgctaccgta

SEQ ID NO: 423968 - DNA, 1263 bp, Homo sapiens
gcagcatctggggtgacgggggtaagggtcacggggggaatccagagtccagagtgagggctgctgctcacagtgcccggctgcctggggaatcagctagaagccaagctggacaaaccagatgtggtgaactggatgtgctaccgcaagacagaggacttcttcaccatctggctggatctcaacatgttcctaccccttggggtagactgctggatcgataacaccagggttgtctacaaccggagctctgggctcgtgtccaacgcccctggtgtccagatccgcgtccctggctttggcaagacctactctgtggagtacctggacagcagcaagctggcagggtacctgcacacactggtgcagaacctggtcaacaatggctacgtgcgggacgagactgtgcgcgccgccccctatgactggcggctggagcccggccagcaggaggagtactaccgcaagctcgcagggctggtggaggagatgcacgctgcctatgggaagcctgtcttcctcattggccacagcctcggctgtctacacttgctctatttcctgctgcgccagccccaggcctggaaggaccgctttattgatggcttcatctctcttggggctccctggggtggctccatcaagcccatgctggtcttggcctcaggtgacaaccagggcatccccatcatgtccagcatcaagctgaaagaggagcagcgcataaccaccacctccccctggatgtttccctctcgcatggcgtggcctgaggaccacgtgttcatttccacacccagcttcaactacacaggccgtgacttccaacgcttctttgcagacctgcactttgaggaaggctggtacatgtggctgcagtcacgtgacctcctggcaggactcccagcacctggtgtggaagtatactgtctttacggcgtgggcctgcccacgccccgcacctacatctacgaccacggcttcccctacacggaccctgtgggtgtgctctatgaggatggtgatgacacggtggcgacccgcagcaccgagctctgtggcctgtggcagggccgccagccacagcctgtgcacctgctgcccctgcacgggatacagcatctcaacatggtcttcagcaacctgaccctggagcacatcaatgccatcctgctgggtgcctaccgccagggtccccctgcatccccgactgccagcccagagcccccgcctcctgaataaagaccttcctttgctaccgta

SEQ ID NO: 423969 - DNA, 1588 bp, Homo sapiens
tgaggcctgactttttcaataaaacattgtgtagttctgggcctcctgctgccccggctctgtttcccctggcgccaagagaagaaggcggaactgaacccaggcccagagccggctccctgaggctgtgcccctttccggcaatctctggccacaacccccactggccaggccgtccctcccactggccctagggcccctcccactcccacaccagataaggacagcccagtgccgctttctctggcagtaggcaccagggctggaatggggccgcccggctccccatggcagtgggtgacgctgctgctggggctgctgctccctcctgccgcccccttctggctcctcaatgtgctcttccccccgcacaccacgcccaaggctgagctcagtaaccacacacggcccgtcatcctcgctagaagccaagctggacaaaccagatgtggtgaactggatgtgctaccgcaagacagaggacttcttcaccatctggctggatctcaacatgttcctaccccttggggtagactgctggatcgataacaccagggttgtctacaaccggagctctgggctcgtgtccaacgcccctggtgtccagatccgcgtccctggctttggcaagacctactctgtggagtacctggacagcagcaagctggcagggtacctgcacacactggtgcagaacctggtcaacaatggctacgtgcgggacgagactgtgcgcgccgccccctatgactggcggctggagcccggccagcaggaggagtactaccgcaagctcgcagggctggtggaggagatgcacgctgcctatgggaagcctgtcttcctcattggccacagcctcggctgtctacacttgctctatttcctgctgcgccagccccaggcctggaaggaccgctttattgatggcttcatctctcttggggctccctggggtggctccatcaagcccatgctggtcttggcctcaggtgacaaccagggcatccccatcatgtccagcatcaagctgaaagaggagcagcgcataaccaccacctccccctggatgtttccctctcgcatggcgtggcctgaggaccacgtgttcatttccacacccagcttcaactacacaggccgtgacttccaacgcttctttgcagacctgcactttgaggaaggctggtacatgtggctgcagtcacgtgacctcctggcaggactcccagcacctggtgtggaagtatactgtctttacggcgtgggcctgcccacgccccgcacctacatctacgaccacggcttcccctacacggaccctgtgggtgtgctctatgaggatggtgatgacacggtggcgacccgcagcaccgagctctgtggcctgtggcagggccgccagccacagcctgtgcacctgctgcccctgcacgggatacagcatctcaacatggtcttcagcaacctgaccctggagcacatcaatgccatcctgctgggtgcctaccgccagggtccccctgcatccccgactgccagcccagagcccccgcctcctgaataaagaccttcctttgctaccgta

SEQ ID NO: 423970 - DNA, 1342 bp, Homo sapiens
gcagcatctggggtgacgggggtaagggtcacggggggaatccagagtccagagtgagggctgctgctcacagtgcccggctgcctggggaatcagctagaagccaagctggacaaaccagatgtggtgaactggatgtgctaccgcaagacagaggacttcttcaccatctggctggatctcaacatgttcctaccccttggggtagactgctggatcgataacaccaggtacagccatgtgctccaccctagccccaacacgctgccccttggctactggctgctgagtggcacccccgccccgcagggttgtctacaaccggagctctgggctcgtgtccaacgcccctggtgtccagatccgcgtccctggctttggcaagacctactctgtggagtacctggacagcagcaagctggcagggtacctgcacacactggtgcagaacctggtcaacaatggctacgtgcgggacgagactgtgcgcgccgccccctatgactggcggctggagcccggccagcaggaggagtactaccgcaagctcgcagggctggtggaggagatgcacgctgcctatgggaagcctgtcttcctcattggccacagcctcggctgtctacacttgctctatttcctgctgcgccagccccaggcctggaaggaccgctttattgatggcttcatctctcttggggctccctggggtggctccatcaagcccatgctggtcttggcctcaggtgacaaccagggcatccccatcatgtccagcatcaagctgaaagaggagcagcgcataaccaccacctccccctggatgtttccctctcgcatggcgtggcctgaggaccacgtgttcatttccacacccagcttcaactacacaggccgtgacttccaacgcttctttgcagacctgcactttgaggaaggctggtacatgtggctgcagtcacgtgacctcctggcaggactcccagcacctggtgtggaagtatactgtctttacggcgtgggcctgcccacgccccgcacctacatctacgaccacggcttcccctacacggaccctgtgggtgtgctctatgaggatggtgatgacacggtggcgacccgcagcaccgagctctgtggcctgtggcagggccgccagccacagcctgtgcacctgctgcccctgcacgggatacagcatctcaacatggtcttcagcaacctgaccctggagcacatcaatgccatcctgctgggtgcctaccgccagggtccccctgcatccccgactgccagcccagagcccccgcctcctgaataaagaccttcctttgctaccgta

SEQ ID NO: 423971 - DNA, 1212 bp, Homo sapiens
cgggccagtacgtgatgtggagagaggtggggcaggacagggcccgtcaagccccagaggtaaccaagactgagaaggagtcttgctctgttgcccaggctggagtgcaatggcactatctcggctcactgcaacctctgcctccgtggttcaagtgattctcctgcctcagcctcccgagtagctgggattacaggcacctgccaccacacccagctaatttttgtatttttattagagacggggtttcaccatgctggccaggctggtctcgaactcccagcctcaggcgatccacccgccttggcctcccaaagttctgggattacaggcttgagccaccaggcccagccgggccagtacggatgtgcatccggcacttcctccagaccttatgctggcgcagcaggaagggcagaagcatgaggtctggaggagatgcacgctgcctatgggaagcctgtcttcctcattggccacagcctcggctgtctacacttgctctatttcctgctgcgccagccccaggcctggaaggaccgctttattgatggcttcatctctcttggggctccctggggtggctccatcaagcccatgctggtcttggcctcaggtgacaaccagggcatccccatcatgtccagcatcaagctgaaagaggagcagcgcataaccaccacctccccctggatgtttccctctcgcatggcgtggcctgaggaccacgtgttcatttccacacccagcttcaactacacaggccgtgacttccaacgcttctttgcagacctgcactttgaggaaggctggtacatgtggctgcagtcacgtgacctcctggcaggactcccagcacctggtgtggaagtatactgtctttacggcgtgggcctgcccacgccccgcacctacatctacgaccacggcttcccctacacggaccctgtgggtgtgctctatgaggatggtgatgacacggtggcgacccgcagcaccgagctctgtggcctgtggcagggccgccagccacagcctgtgcacctgctgcccctgcacgggatacagcatctcaacatggtcttcagcaacctgaccctggagcacatcaatgccatcctgctgggtgcctaccgccagggtccccctgcatccccgactgccagcccagagcccccgcctcctgaataaagaccttcctttgctaccgta

SEQ ID NO: 423972 - DNA, 653 bp, Homo sapiens
gactcctggcctcaagtgatcctcctgcctcagcctcccaaagtgttgggattacaggtgacaaccagggcatccccatcatgtccagcatcaagctgaaagaggagcagcgcataaccaccacctccccctggatgtttccctctcgcatggcgtggcctgaggaccacgtgttcatttccacacccagcttcaactacacaggccgtgacttccaacgcttctttgcagacctgcactttgaggaaggctggtacatgtggctgcagtcacgtgacctcctggcaggactcccagcacctggtgtggaagtatactgtctttacggcgtgggcctgcccacgccccgcacctacatctacgaccacggcttcccctacacggaccctgtgggtgtgctctatgaggatggtgatgacacggtggcgacccgcagcaccgagctctgtggcctgtggcagggccgccagccacagcctgtgcacctgctgcccctgcacgggatacagcatctcaacatggtcttcagcaacctgaccctggagcacatcaatgccatcctgctgggtgcctaccgccagggtccccctgcatccccgactgccagcccagagcccccgcctcctgaataaagaccttcctttgctaccgta

SEQ ID NO: 423973 - DNA, 738 bp, Homo sapiens
gactcctggcctcaagtgatcctcctgcctcagcctcccaaagtgttgggattacagaggggtggcgtggtgcctgtccctgccatccttttgaagccctacagctccacccaacagaggtcttatcagggcttctcattgagtgacaaccagggcatccccatcatgtccagcatcaagctgaaagaggagcagcgcataaccaccacctccccctggatgtttccctctcgcatggcgtggcctgaggaccacgtgttcatttccacacccagcttcaactacacaggccgtgacttccaacgcttctttgcagacctgcactttgaggaaggctggtacatgtggctgcagtcacgtgacctcctggcaggactcccagcacctggtgtggaagtatactgtctttacggcgtgggcctgcccacgccccgcacctacatctacgaccacggcttcccctacacggaccctgtgggtgtgctctatgaggatggtgatgacacggtggcgacccgcagcaccgagctctgtggcctgtggcagggccgccagccacagcctgtgcacctgctgcccctgcacgggatacagcatctcaacatggtcttcagcaacctgaccctggagcacatcaatgccatcctgctgggtgcctaccgccagggtccccctgcatccccgactgccagcccagagcccccgcctcctgaataaagaccttcctttgctaccgta

SEQ ID NO: 423974 - DNA, 1166 bp, Homo sapiens
tgaggcctgactttttcaataaaacattgtgtagttctgggcctcctgctgccccggctctgtttcccctggcgccaagagaagaaggcggaactgaacccaggcccagagccggctccctgaggctgtgcccctttccggcaatctctggccacaacccccactggccaggccgtccctcccactggccctagggcccctcccactcccacaccagataaggacagcccagtgccgctttctctggcagtaggcaccagggctggaatggggccgcccggctccccatggcagtgggtgacgctgctgctggggctgctgctccctcctgccgcccccttctggctcctcaatgtgctcttccccccgcacaccacgcccaaggctgagctcagtaaccacacacggcccgtcatcctcgtgcccggctgcctggggaatcagctagaagccaagctggacaaaccagatgtggtgaactggatgtgctaccgcaagacagaggacttcttcaccatctggctggatctcaacatgttcctaccccttggggtagactgctggatcgataacaccagggttgtctacaaccggagctctgggctcgtgtccaacgcccctggtgtccagatccgcgtccctggctttggcaagacctactctgtggagtacctggacagcagcaagctggcagggtacctgcacacactggtgcagaacctggtcaacaatggctacgtgcgggacgagactgtgcgcgccgccccctatgactggcggctggagcccggccagcaggaggagtactaccgcaagctcgcagggctggtggaggagatgcacgctgcctatgggaagcctgtcttcctcattggccacagcctcggctgtctacacttgctctatttcctgctgcgccagccccaggcctggaaggaccgctttattgatggcttcatctctcttggggctccctggggtggctccatcaagcccatgctggtcttggcctcagggagtggcaccagggcccagcactgacacagctaccacctactccccaccccctgtaccctgggagctggtctggagagagaaacacagtctggacaagagaaacgctcatcagacaccaccaataaacatcaaacagacaccatcttgtt

SEQ ID NO: 423975 - DNA, 1256 bp, Homo sapiens
tgaggcctgactttttcaataaaacattgtgtagttctgggcctcctgctgccccggctctgtttcccctggcgccaagagaagaaggcggaactgaacccaggcccagagccggctccctgaggctgtgcccctttccggcaatctctggccacaacccccactggccaggccgtccctcccactggccctagggcccctcccactcccacaccagataaggacagcccagtgccgctttctctggcagtaggcaccagggctggaatggggccgcccggctccccatggcagtgggtgacgctgctgctggggctgctgctccctcctgccgcccccttctggctcctcaatgtgctcttccccccgcacaccacgcccaaggctgagctcagtaaccacacacggcccgtcatcctcgtgcccggctgcctggggaatcagctagaagccaagctggacaaaccagatgtggtgaactggatgtgctaccgcaagacagaggacttcttcaccatctggctggatctcaacatgttcctaccccttggggtagactgctggatcgataacaccagggttgtctacaaccggagctctgggctcgtgtccaacgcccctggtgtccagatccgcgtccctggctttggcaagacctactctgtggagtacctggacagcagcaagctggcagggtacctgcacacactggtgcagaacctggtcaacaatggctacgtgcgggacgagactgtgcgcgccgccccctatgactggcggctggagcccggccagcaggaggagtactaccgcaagctcgcagggctggtggaggagatgcacgctgcctatgggaagcctgtcttcctcattggccacagcctcggctgtctacacttgctctatttcctgctgcgccagccccaggcctggaaggaccgctttattgatggcttcatctctcttggggctccctggggtggctccatcaagcccatgctggtcttggcctcaggagtgcctttgcccagggatgtgcttcactgaggatggatctgccagagctagggccagaccccccgaggccccacctgctcttccctagggagtggcaccagggcccagcactgacacagctaccacctactccccaccccctgtaccctgggagctggtctggagagagaaacacagtctggacaagagaaacgctcatcagacaccaccaataaacatcaaacagacaccatcttgtt

SEQ ID NO: 423976 - DNA, 1341 bp, Homo sapiens
tgaggcctgactttttcaataaaacattgtgtagttctgggcctcctgctgccccggctctgtttcccctggcgccaagagaagaaggcggaactgaacccaggcccagagccggctccctgaggctgtgcccctttccggcaatctctggccacaacccccactggccaggccgtccctcccactggccctagggcccctcccactcccacaccagataaggacagcccagtgccgctttctctggcagtaggcaccagggctggaatggggccgcccggctccccatggcagtgggtgacgctgctgctggggctgctgctccctcctgccgcccccttctggctcctcaatgtgctcttccccccgcacaccacgcccaaggctgagctcagtaaccacacacggcccgtcatcctcgtgcccggctgcctggggaatcagctagaagccaagctggacaaaccagatgtggtgaactggatgtgctaccgcaagacagaggacttcttcaccatctggctggatctcaacatgttcctaccccttggggtagactgctggatcgataacaccagggttgtctacaaccggagctctgggctcgtgtccaacgcccctggtgtccagatccgcgtccctggctttggcaagacctactctgtggagtacctggacagcagcaagctggcagggtacctgcacacactggtgcagaacctggtcaacaatggctacgtgcgggacgagactgtgcgcgccgccccctatgactggcggctggagcccggccagcaggaggagtactaccgcaagctcgcagggctggtggaggagatgcacgctgcctatgggaagcctgtcttcctcattggccacagcctcggctgtctacacttgctctatttcctgctgcgccagccccaggcctggaaggaccgctttattgatggcttcatctctcttggggctccctggggtggctccatcaagcccatgctggtcttggcctcaggtgagaaggcctcgaacacttaggtccagcgatgggtgagaccaagctgatcctgggcctgccttcattgcggctcctgctcacagtggcctctaggggtgctatctaccactcctgggctggcatgcttgctgtcactggcccccagagcagtgaccctggcctgagcaattagggtggctccttccagagtctgtgtcagtgatggcaaaggggcagtgaacacagaaagtgaatcccactggtctggagagagaaacacagtctggacaagagaaacgctcatcagacaccaccaataaacatcaaacagacaccatcttgtt

SEQ ID NO: 423977 - DNA, 942 bp, Homo sapiens
cgggccagtacgtgatgtggagagaggtggggcaggacagggcccgtcaagccccagaggtaaccaagactgagaaggagtcttgctctgttgcccaggctggagtgcaatggcactatctcggctcactgcaacctctgcctccgtggttcaagtgattctcctgcctcagcctcccgagtagctgggattacaggcacctgccaccacacccagctaatttttgtatttttattagagacggggtttcaccatgctggccaggctggtctcgaactcccagcctcaggcgatccacccgccttggcctcccaaagttctgggattacaggcttgagccaccaggcccagccgggccagtacggatgtgcatccggcacttcctccagaccttatgctggcgcagcaggaagggcagaagcatgaggtctggaggagatgcacgctgcctatgggaagcctgtcttcctcattggccacagcctcggctgtctacacttgctctatttcctgctgcgccagccccaggcctggaaggaccgctttattgatggcttcatctctcttggggctccctggggtggctccatcaagcccatgctggtcttggcctcaggtgagaaggcctcgaacacttaggtccagcgatgggtgagaccaagctgatcctgggcctgccttcattgcggctcctgctcacagtggcctctaggggtgctatctaccactcctgggctggcatgcttgctgtcactggcccccagagcagtgaccctggcctgagcaattagggtggctccttccagagtctgtgtcagtgatggcaaaggggcagtgaacacagaaagtgaatcccactggtctggagagagaaacacagtctggacaagagaaacgctcatcagacaccaccaataaacatcaaacagacaccatcttgtt

SEQ ID NO: 423978 - DNA, 786 bp, Homo sapiens
gcagcatctggggtgacgggggtaagggtcacggggggaatccagagtccagagtgagggctgctgctcacagtgcccggctgcctggggaatcagctagaagccaagctggacaaaccagatgtggtgaactggatgtgctaccgcaagacagaggacttcttcaccatctggctggatctcaacatgttcctaccccttggggtagactgctggatcgataacaccagggttgtctacaaccggagctctgggctcgtggtccccctgcatccccgactgccagcccagagcccccgcctcctgaataaagaccttcctttgctaccgtaagccctgatggctatgtttcaggttgaagggaggcactagagtcccacactaggtttcactcctcaccagccacaggctcagtgctgtgtgcagtgaggcaagatgggctctgctgaggcctgggactgagctgggcaccctagatgtacagctgcccactctcctggtcgagctgttgaggcagtgtgcaccgtgcctgcctctgtgctgggcgcggggactggagctggctccacccacagccctgtcagaggagcacggggcggtgggggggcggtgacaatttgagctgtctctcccagctcccaaaagggcaggtgagacgaccttttgagtgctgggtgaatgacagggccacaagtgtttagaggccgggcacggtggctcacgcctgtaatcctggcactttgggagaccgaggcaggcggatcacctgaactcaggagtttgaga

SEQ ID NO: 423979 - DNA, 349 bp, Homo sapiens
tgctcccagggtttgttcttgtagccccagagcctgcctgcccagcccttgcctgccttccacttgctcgcaggagtgcctttgcccagggatgtgcttcactgaggatggatctgccagagctagggccagaccccccgaggccccacctgctcttccctagggagtggcaccagggcccagcactgacacagctaccacctactccccaccccctgtaccctgggagctggtctggagagagaaacacagtctggacaagagaaacgctcatcagacaccaccaataaacatcaaacagacaccatcttgtttccccctttctggagcacaactctgtggcccccat

SEQ ID NO: 423980 - DNA, 939 bp, Homo sapiens
ggtgttgttgaaactgaaaatactacattatgctaatcgcggccgggcccgcgcgcacgggggtggggcccgcgcgtataaagggggcgcaggcgggctgggcgttccagcaggccaagtgcgctgtgctcgaggggtgccggccaggcctgagcgagcgagctagccagcaggcatcgagggggcgcggctgccgtccggacgagacaggcgaacccgacgcagaagagtccaccaccggacagccagcacatccacgatggagcgtcttgtcgcccgtgggaccttcccagtactagtgcgcaccagcgcctgccgcagcctcttcgggccggtggaccacgaggagctgagccgcgagctgcaggcccgcctggccgagctgaacgccgaggaccagaaccgctgggattacgacttccagcaggacatgccgctgcggggccctggacgcctgcagtggaccgaagtggacagcgactcggtgcccgcgttctaccgcgagacggtgcagatttcttcgccaagcgcaagagatcagcgcctgagaagtcgtcgggcgatgtccccgcgccgtgtccctctccaagcgccgcccctggcgtgggctcggtggagcagaccccgcgcaagaggctgcggtgagccaatttagagcccaaagagccccgagggaacctgccggggcagcggacgttggaagggcgctgggcctcggctgggaccgttcatgtagcagcaaccggcggcggctgccgcagagcagcgttcggttttgtttttaaattttgaaaactgtgcaatgtattaataacgtctttttatatctaaatgtattctgcacgagaaggtacactggtcccaaggtgtaaagctttaagagtcatttatataaaatgtttaatctctgctgaaactcagtgcaaaaaaaagaaaaaa

SEQ ID NO: 423981 - DNA, 1638 bp, Homo sapiens
ggtgttgttgaaactgaaaatactacattatgctaatcgcggccgggcccgcgcgcacgggggtggggcccgcgcgtataaagggggcgcaggcgggctgggcgttccagcaggccaagtgcgctgtgctcgaggggtgccggccaggcctgagcgagcgagctagccagcaggcatcgagggggcgcggctgccgtccggacgagacaggcgaacccgacgcagaagagtccaccaccggacagccaggtagccgccgcgtccctcgcacacgcagagtcgggcggcgcggggtctcccttgcgcccggcctccgccctctcctcctctcctttccccttcttctcgctgtcctctcctctctcgctgcccgcgtttgcgcagccccgggccatgtccgacgcgtccctccgcagcacatccacgatggagcgtcttgtcgcccgtgggaccttcccagtactagtgcgcaccagcgcctgccgcagcctcttcgggccggtggaccacgaggagctgagccgcgagctgcaggcccgcctggccgagctgaacgccgaggaccagaaccgctgggattacgacttccagcaggacatgccgctgcggggccctggacgcctgcagtggaccgaagtggacagcgactcggtgcccgcgttctaccgcgagacggtgcaggtggggcgctgccgcctgctgctggcgccgcggcccgtcgcggtcgcggtggctgtcagcccgcccctcgagccggccgctgagtccctcgacggcctcgaggaggcgccggagcagctgcctagtgtcccggtcccggccccggcgtccaccccgcccccagtcccggtcctggctccagccccggccccggctccggctccggtcgcggctccggtcgcggctccggtcgcggtcgcggtcctggccccggccccggccccggctccggctccggctccggccccggctccagtcgcggccccggccccagccccggccccggccccggccccggcccccgccccggccccggccccggacgcggcgcctcaagagagcgccgagcagggcgcgaaccaggggcagcgcggccaggagcctctcgctgaccagctgcactcggggatttcgggacgtcccgcggccggcaccgcggccgccagcgccaacggcgcggcgatcaagaagctgtccgggcctctgatctccgatttcttcgccaagcgcaagagatcagcgcctgagaagtcgtcgggcgatgtccccgcgccgtgtccctctccaagcgccgcccctggcgtgggctcggtggagcagaccccgcgcaagaggctgcggtgagccaatttagagcccaaagagccccgagggaacctgccggggcagcggacgttggaagggcgctgggcctcggctgggaccgttcatgtagcagcaaccggcggcggctgccgcagagcagcgttcggttttgtttttaaattttgaaaactgtgcaatgtattaataacgtctttttatatctaaatgtattctgcacgagaaggtacactggtcccaaggtgtaaagctttaagagtcatttatataaaatgtttaatctctgctgaaactcagtgcaaaaaaaagaaaaaa

SEQ ID NO: 423982 - DNA, 1471 bp, Homo sapiens
ggtgttgttgaaactgaaaatactacattatgctaatcgcggccgggcccgcgcgcacgggggtggggcccgcgcgtataaagggggcgcaggcgggctgggcgttccagcaggccaagtgcgctgtgctcgaggggtgccggccaggcctgagcgagcgagctagccagcaggcatcgagggggcgcggctgccgtccggacgagacaggcgaacccgacgcagaagagtccaccaccggacagccagcacatccacgatggagcgtcttgtcgcccgtgggaccttcccagtactagtgcgcaccagcgcctgccgcagcctcttcgggccggtggaccacgaggagctgagccgcgagctgcaggcccgcctggccgagctgaacgccgaggaccagaaccgctgggattacgacttccagcaggacatgccgctgcggggccctggacgcctgcagtggaccgaagtggacagcgactcggtgcccgcgttctaccgcgagacggtgcaggtggggcgctgccgcctgctgctggcgccgcggcccgtcgcggtcgcggtggctgtcagcccgcccctcgagccggccgctgagtccctcgacggcctcgaggaggcgccggagcagctgcctagtgtcccggtcccggccccggcgtccaccccgcccccagtcccggtcctggctccagccccggccccggctccggctccggtcgcggctccggtcgcggctccggtcgcggtcgcggtcctggccccggccccggccccggctccggctccggctccggccccggctccagtcgcggccccggccccagccccggccccggccccggccccggcccccgccccggccccggccccggacgcggcgcctcaagagagcgccgagcagggcgcgaaccaggggcagcgcggccaggagcctctcgctgaccagctgcactcggggatttcgggacgtcccgcggccggcaccgcggccgccagcgccaacggcgcggcgatcaagaagctgtccgggcctctgatctccgatttcttcgccaagcgcaagagatcagcgcctgagaagtcgtcgggcgatgtccccgcgccgtgtccctctccaagcgccgcccctggcgtgggctcggtggagcagaccccgcgcaagaggctgcggtgagccaatttagagcccaaagagccccgagggaacctgccggggcagcggacgttggaagggcgctgggcctcggctgggaccgttcatgtagcagcaaccggcggcggctgccgcagagcagcgttcggttttgtttttaaattttgaaaactgtgcaatgtattaataacgtctttttatatctaaatgtattctgcacgagaaggtacactggtcccaaggtgtaaagctttaagagtcatttatataaaatgtttaatctctgctgaaactcagtgcaaaaaaaagaaaaaa

SEQ ID NO: 423983 - DNA, 2004 bp, Homo sapiens
ggtgttgttgaaactgaaaatactacattatgctaatcgcggccgggcccgcgcgcacgggggtggggcccgcgcgtataaagggggcgcaggcgggctgggcgttccagcaggccaagtgcgctgtgctcgaggggtgccggccaggcctgagcgagcgagctagccagcaggcatcgagggggcgcggctgccgtccggacgagacaggcgaacccgacgcagaagagtccaccaccggacagccagcacatccacgatggagcgtcttgtcgcccgtgggaccttcccagtactagtgcgcaccagcgcctgccgcagcctcttcgggccggtggaccacgaggagctgagccgcgagctgcaggcccgcctggccgagctgaacgccgaggaccagaaccgctgggattacgacttccagcaggacatgccgctgcggggccctggacgcctgcagtggaccgaagtggacagcgactcggtgcccgcgttctaccgcgagacggtgcaggtggggcgctgccgcctgctgctggcgccgcggcccgtcgcggtcgcggtggctgtcagcccgcccctcgagccggccgctgagtccctcgacggcctcgaggaggcgccggagcagctgcctagtgtcccggtcccggccccggcgtccaccccgcccccagtcccggtcctggctccagccccggccccggctccggctccggtcgcggctccggtcgcggctccggtcgcggtcgcggtcctggccccggccccggccccggctccggctccggctccggccccggctccagtcgcggccccggccccagccccggccccggccccggccccggcccccgccccggccccggccccggacgcggcgcctcaagagagcgccgagcagggcgcgaaccaggggcagcgcggccaggagcctctcgctgaccagctgcactcggggatttcgggacgtcccgcggccggcaccgcggccgccagcgccaacggcgcggcgatcaagaagctgtccgggcctctgatctccggtgagccccgcacggccccgccccggcccgggccggccccgctttgtccggccggccggtccccccagccctcgggggcctcgctgggttcccgcctcctcccgtggcattaaagggcccgcagcgctcagggcgcggctgcgcttacccccctccccgccccgttgttgtgccctccacggcttcgcgcgggccggggtgggaggctgaatcccggccgcgaccccccgggagcgcagttttcgcccccggccgcgggagcccctccccgggcgcgcccgcgccccgtgagcacggcgtggagggggttaagcgcggcggcggccccggggggcttgacagcacattgcgcggcgacgtaaacaaagctgacccgccgcggacctcggcgcgggcggggacggcgccaccaccccgcgggcggggacggcgcccccaccccggccggcccgcgccccgcgccctctcccggccccctctcgggtctccgggccggccccgccctgaccggccgcgcgcgctgtcgcccgcagatttcttcgccaagcgcaagagatcagcgcctgagaagtcgtcgggcgatgtccccgcgccgtgtccctctccaagcgccgcccctggcgtgggctcggtggagcagaccccgcgcaagaggctgcggtgagccaatttagagcccaaagagccccgagggaacctgccggggcagcggacgttggaagggcgctgggcctcggctgggaccgttcatgtagcagcaaccggcggcggctgccgcagagcagcgttcggttttgtttttaaattttgaaaactgtgcaatgtattaataacgtctttttatatctaaatgtattctgcacgagaaggtacactggtcccaaggtgtaaagctttaagagtcatttatataaaatgtttaatctctgctgaaactcagtgcaaaaaaaagaaaaaa

SEQ ID NO: 423984 - DNA, 1880 bp, Homo sapiens
ggtgttgttgaaactgaaaatactacattatgctaatcgcggccgggcccgcgcgcacgggggtggggcccgcgcgtataaagggggcgcaggcgggctgggcgttccagcaggccaagtgcgctgtgctcgaggggtgccggccaggcctgagcgagcgagctagccagcaggcatcgagggggcgcggctgccgtccggacgagacaggcgaacccgacgcagaagagtccaccaccggacagccagcacatccacgatggagcgtcttgtcgcccgtgggaccttcccagtactagtgcgcaccagcgcctgccgcagcctcttcgggccggtggaccacgaggagctgagccgcgagctgcaggcccgcctggccgagctgaacgccgaggaccagaaccgctgggattacgacttccagcaggacatgccgctgcggggccctggacgcctgcagtggaccgaagtggacagcgactcggtgcccgcgttctaccgcgagacggtgcaggtggggcgctgccgcctgctgctggcgccgcggcccgtcgcggtcgcggtggctgtcagcccgcccctcgagccggccgctgagtccctcgacggcctcgaggaggcgccggagcagctgcctagtgtcccggtcccggccccggcgtccaccccgcccccagtcccggtcctggctccagccccggccccggctccggctccggtcgcggctccggtcgcggctccggtcgcggtcgcggtcctggccccggccccggccccggctccggctccggctccggccccggctccagtcgcggccccggccccagccccggccccggccccggccccggcccccgccccggccccggccccggacgcggcgcctcaagagagcgccgagcagggcgcgaaccaggggcagcgcggccaggagcctctcgctgaccagctgcactcggggatttcgggacgtcccgcggccggcaccgcggccgccagcgccaacggcgcggcgatcaagaagctgtccgggcctctgatctccgatttcttcgccaagcgcaagagatcagcgcctgagaagtcgtcgggcgatgtccccgcgccgtgtccctctccaagcgccgcccctggcgtgggctcggtggagcagaccccgcgcaagaggctgcggtgagccaatttagagcccaaagagccccgagggaacctgccggggcagcggacgttggaagggcgctgggcctcggctgggaccgttcatgtagcagcaaccggcggcggctgccgcagagcagcgttcggttttgtttttaaattttgaaaactgtgcaatgtattaataacgtctttttatatctaaatgtattctgcacgagaaggtacactggtcccaaggtgtaaagctttaagagtcatttatataaaatgtttaatctctgctgaaactcagtgcaaaaaaaagaaaaaagaaaaaaaaaaggaaaaaataaaaaaaccatgtatatttgtacaaaaagtttttaaagttatactaacttatattttctatttatgtccaggcgtggaccgctctgccacgcactagctcggttattggttatgccaaaggcactctccatctcccacatctggttattgacaagtgtaactttattttcatcgcggactctggggaagggggtcactcacaagctgtagctgccatacatgcccatctagcttgcagtctcttcgcgctttcgctgtctctcttattatgactgtgtttatctgaaacttgaagacaagtctgttaaaatggttcctgagccgtctgtaccactgccccggcccctcgtccgccgggttctaaataaagaggccgaaaaatgctgcaa

SEQ ID NO: 423985 - DNA, 2363 bp, Homo sapiens
ggtgttgttgaaactgaaaatactacattatgctaatcgcggccgggcccgcgcgcacgggggtggggcccgcgcgtataaagggggcgcaggcgggctgggcgttccagcaggccaagtgcgctgtgctcgaggggtgccggccaggcctgagcgagcgagctagccagcaggcatcgagggggcgcggctgccgtccggacgagacaggcgaacccgacgcagaagagtccaccaccggacagccagcacatccacgatggagcgtcttgtcgcccgtgggaccttcccagtactagtgcgcaccagcgcctgccgcagcctcttcgggccggtggaccacgaggagctgagccgcgagctgcaggcccgcctggccgagctgaacgccgaggaccagaaccgctgggattacgacttccagcaggacatgccgctgcggggccctggacgcctgcagtggaccgaagtggacagcgactcggtgcccgcgttctaccgcgagacggtgcaggtggggcgctgccgcctgctgctggcgccgcggcccgtcgcggtcgcggtggctgtcagcccgcccctcgagccggccgctgagtccctcgacggcctcgaggaggcgccggagcagctgcctagtgtcccggtcccggccccggcgtccaccccgcccccagtcccggtcctggctccagccccggccccggctccggctccggtcgcggctccggtcgcggctccggtcgcggtcgcggtcctggccccggccccggccccggctccggctccggctccggccccggctccagtcgcggccccggccccagccccggccccggccccggccccggcccccgccccggccccggccccggacgcggcgcctcaagagagcgccgagcagggcgcgaaccaggggcagcgcggccaggagcctctcgctgaccagctgcactcggggatttcgggacgtcccgcggccggcaccgcggccgccagcgccaacggcgcggcgatcaagaagctgtccgggcctctgatctccgatttcttcgccaagcgcaagagatcagcgcctgagaagtcgtcgggcgatgtccccgcgccgtgtccctctccaagcgccgcccctggcgtgggctcggtggagcagaccccgcgcaagaggctgcggtgagccaatttagagcccaaagagccccgagggaacctgccggggcagcggacgttggaagggcgctgggcctcggctgggaccgttcatgtagcagcaaccggcggcggctgccgcagagcagcgttcggttttgtttttaaattttgaaaactgtgcaatgtattaataacgtctttttatatctaaatgtattctgcacgagaaggtacactggtcccaaggtgtaaagctttaagagtcatttatataaaatgtttaatctctgctgaaactcagtgcaaaaaaaagaaaaaagaaaaaaaaaaggaaaaaataaaaaaaaaaaaaaaaaaaggggggggggccgatcaaaaagtattctccccgggagaggggcgcccacacattataatcgtatctacccaggatttcatgtcagaaaaagggtggtgccccaaatattataggtcgcgctcattttataacacctctatagacacgtggcagcattagttaaacacaactgtcaagactgtggagaaacacctcggttcacacctggggcggactctcctgtgtagcgaacagaacaccctataaatctggggcggggcgagccccacattctaggtgggcccacaacacccacaccacacacgatagtatctactacgaccccccctgagcggcggtacatcattagtaccacgtttgccaacgtgctgctctcacagtgttgacaagcacacaaacactcggtgtagaaatatattagcaggaacgtcgatcgtactagaaagaaaagtacttgcgctgtcctacacagtgtaagtgaattactctactaccttctaaacgaaacatctcattttaacaaccccgcgagggtcactcactttctttcaaatcaagccacgcacgccaaaataccagtaccgatatcgaacgctatacacagcggcgtgtaacgcagggaagaatataaagcaaacgactacactatttggcatcgtagatcatgcgtcacgagggacacttgaaagccacgtaatcttagcagctgtagctgagtcaagacaggacagcgcgtagtggtaggcgagtcagataggacatagagagagacacgtaacagcgagaaaactccaaacgacaaaatcacgcacgaccccaatgaacctgacatatgaatacgagagcgataccg

SEQ ID NO: 423986 - DNA, 421 bp, Homo sapiens
gtctgttatgtgctagaaacacccagaagctaattctggcactactgtgaattcagattttgaaaattgggaaatgtatcccaataatgcattttttcagaagcttgccaagctgatttagatgaattccattgtcatcagtagtggtgagtttgaccattaggggcctatatctggttttagttgtcttaaaacttaatgacatcatgcaatatttttaaagttactctatttctctttgagtttgtactctttagtggaggggaaaaagctgcatatttcatacgtataccagtataggcttcatatatgtgagcacagcaatgaagtctttactaatttatttgggcatggcatatataaattaaaagtttttgaaaaaatggtatttgagaatttaataaaatggcccaataaaggg

SEQ ID NO: 423987 - DNA, 491 bp, Homo sapiens
ttctgaattcatggtttctctgcatgacccgtaaagtctttagtctatgtccagggaatcacagttcaatgtacaatattttttgattcctccaaatttatttggacatgttttactatctcccaggggctcaaccctggtaaagagaatgaagccaagatccagtggtgtgctagcgccagtttatataagctcataaaattttattgttagaatcttcccacccactaccactgctgttatcactgccagagagctgtagcatgagctccacagagcctgagagccacctacctagactggctgccactggcagaaaccccaccccgcctccagcagcaaggttgccacacacttgcatacatgctgaggatagcctgctgctgctggggcatgccaaccagggcctgggaattgccccactttgcccaccacagcctattcctatgcatgccactgggggcctcaggacaggcacacctggcctggca

SEQ ID NO: 423988 - DNA, 444 bp, Homo sapiens
ctctcgtgagctcttactcactatcatgagactagcatgggggaaaacatccccatgattcaattacctcccatctgctccctcccatgatatgtggggattatgggaactacaattcaagatgagatttgggtggggacacagccaaactatatcaaccatactttctccactacactcatgcatcacatttatcttaggtgactggataatttgtggtctgtttctagactttcttttttccaatagtctatttgtctctcctgagctaatatcgtactaaattaatacctataactttatattatgtcttgatgtgtggtaatataagttatctagctttatttttcaagattatcttggctattcttggccttttacaaactaaattttagaatcaacttgtcaatttctgttaaaatatttttctgggatttttattaa

SEQ ID NO: 423989 - DNA, 1657 bp, Homo sapiens
cgggatttagatcacgtcccgcaggccggcggaagtagctgatactctcattggttgcaaaaccttgatctgtgaaagcgggcgttttggaagataccggaagtagagtcacggagaggtattaagaaatggagagaaaaataagcagaatccaccttgtttctgaacccagtataactcattttctacaagtatcttgggagaaaacactggaatctggttttgttattacacttactgatggtcattcagcatggactgggacagtttctgaatcagagatttcccaagaagctgatgacatggcaatggaaaaagggaaatatgttggtgaactgagaaaagcattgttgtcaggagcaggaccagctgatgtatacacgtttaatttttctaaagagtcttgttatttcttctttgagaaaaacctgaaagatgtctcattcagacttggttccttcaacctagagaaagttgaaaacccagctgaagtcattagagaacttatttgttattgcttggacaccattgcagaaaatcaagccaaaaatgagcacctgcagaaagaaaatgaaaggcttctgagagattggaatgatgttcaaggacgatttgaaaaatgtgtgagtgctaaggaagctttggagactgatctttataagcggtttattctggtgttgaatgagaagaaaacaaaaatcagaagtttgcataataaattattaaatgcagctcaagaacgagaaaaggacatcaaacaagaaggggaaactgcaatctgttctgaaatgactgctgaccgagatccagtctatgatgagagtactgatgaggaaagtgaaaaccaaactgatctctctgggttggcttcagctgctgtaagtaaagatgattccattatttcaagtcttgatgtcactgatattgcaccaagtagaaaaaggagacagcgaatgcaaagaaatcttgggacagaacctaaaatggctcctcaggagaatcagcttcaagaaaaggaaaattctaggcctgattcttcactacctgagacgtctaaaaaggagcacatctcagctgaaaacatgtctttagaaactctgagaaacagcagcccagaagacctctttgatgagatttaacagtctcaaaaaatactttgatgttcactagactatgttttctattcatttctttaaaatgaaaaaggagaatttcaagtcagcagccgctattaccgtatcttacaatttaattacatacacagtgaattgaaaccattgtgcaaaatggattacacatgtatacaaagatacgatttgatgatgacactggcacattattctaaactattcattcagcatgcctataattacataaattgtatgagactttttgttgcaaaggacacatttatcatattcattcacacatattatatgtgatagctgtccaacatcctgtctgggaagattttgaaaacaggacaaagaaaacatcattttaaaatgtcttcagctttttttgaatagacgtattcaaacatattctgaacattgatgtttgaacattttaatttgtgtgatgatgtagaaaatataattttagtttgtacataaacattgtgaaaatctgataataaaatttttgatacattgaa

SEQ ID NO: 423990 - DNA, 1845 bp, Homo sapiens
cgggatttagatcacgtcccgcaggccggcggaagtagctgatactctcattggttgcaaaaccttgatctgtgaaagcgggcgttttggaagataccggaagtagagtcacggagaggtaggatccggaagtggggctgcctctttaaataacaaaaatctgaggtattaagaaatggagagaaaaataagcagaatccaccttgtttctgaacccagtataactcattttctacaagtatcttgggagaaaacactggaatctggttttgttattacacttactgatggtcattcagcatggactgggacagtttctgaatcagagatttcccaagaagctgatgacatggcaatggaaaaagggaaatatgttggtgaactgagaaaagcattgttgtcaggagcaggaccagctgatgtatacacgtttaatttttctaaagagtcttgttatttcttctttgagaaaaacctgaaagatgtctcattcagacttggttccttcaacctagagaaagttgaaaacccagctgaagtcattagagaacttatttgttattgcttggacaccattgcagaaaatcaagccaaaaatgagcacctgcagaaagaaaatgaaaggcttctgagagattggaatgatgttcaaggacgatttgaaaaatgtgtgagtgctaaggaagctttggagactgatctttataagcggtttattctggtgttgaatgagaagaaaacaaaaatcagaagtttgcataataaattattaaatgcagctcaagaacgagaaaaggacatcaaacaagaaggggaaactgcaatctgttctgaaatgactgctgaccgagatccagtctatgatgagagtactgatgaggaaagtgaaaaccaaactgatctctctgggttggcttcagctgctgtaagtaaagatgattccattatttcaagtcttgatgtcactgatattgcaccaagtagaaaaaggagacagcgaatgcaaagaaatcttgggacagaacctaaaatggctcctcaggagaatcagcttcaagaaaaggaaaattctaggcctgattcttcactacctgagacgtctaaaaaggagcacatctcagctgaaaacatgtctttagaaactctgagaaacagcagcccagaagacctctttgatgagatttaacagtctcaaaaaatactttgatgttcactagactatgttttctattcatttctttaaaatgaaaaaggagaatttcaagtcagcagccgctattaccgtatcttacaatttaattacatacacagtgaattgaaaccattgtgcaaaatggattacacatgtatacaaagatacgatttgatgatgacactggcacattattctaaactattcattcagcatgcctataattacataaattgtatgagactttttgttgcaaaggacacatttatcatattcattcacacatattatatgtgatagctgtccaacatcctgtctgggaagattttgaaaacaggacaaagaaaacatcattttaaaatgtcttcagctttttttgaatagacgtattcaaacatattctgaacattgatgtttgaacattttaatttgtgtgatgatgtagaaaatataattttagtttgtacataaacattgtgaaaatctgataataaaatttttgatacattgaaaaaaaaaaaatattctttttgcttgttttacctcttgtcttgctgtacacgcacatatcttcttttgttttaaaatatatctctatatacgcagcactccactctaacctattattttaatagaaactaaaacaaacgtag

SEQ ID NO: 423991 - DNA, 1301 bp, Homo sapiens
cgggatttagatcacgtcccgcaggccggcggaagtagctgatactctcattggttgcaaaaccttgatctgtgaaagcgggcgttttggaagataccggaagtagagtcacggagaggtattaagaaatggagagaaaaataagcagaatccaccttgtttctgaacccagtataactcattttctacaagtatcttgggagaaaacactggaatctggttttgttattacacttactgatggtcattcagcatggactgggacagtttctgaatcagagatttcccaagaagctgatgacatggcaatggaaaaagggaaatatgttggtgaactgagaaaagcattgttgtcaggagcaggaccagctgatgtatacacgtttaatttttctaaagagtcttgttatttcttctttgagaaaaacctgaaagatgtctcattcagacttggttccttcaacctagagaaagttgaaaacccagctgaagtcattagagaacttatttgttattgcttggacaccattgcagaaaatcaagccaaaaatgagcacctgcagaaagaaaatgaaaggcttctgagagattggaatgatgttcaaggacgatttgaaaaatgtgtgagtgctaaggaagctttggagactgatctttataagcggtttattctggtgttgaatgagaagaaaacaaaaatcagaagtttgcataataaattattaaatgcagctcaagaacgagaaaaggacatcaaacaagaaggggaaactgcaatctgttctgaaatgactgctgaccgagatccagtctatgatgagagtactgatgaggaaagtgaaaaccaaactgatctctctgggttggcttcagctgctgtaagtaaagatgattccattatttcaagtcttgatgtcactgatattgcaccaagtagaaaaaggagacagcgaatgcaaagaaatcttgggacagaacctaaaatggctcctcaggagaatcagcttcaagaaaaggaaaaagggaggaagaaggagacttcagagaaagaggccgtgtgatggaagcaaaatcagagagaaaagatgctaagctgctgcctttgaataaggaggaacgtgagccaacagatccaagaactgaagctctaggcagtggaaaagccaaggaaactgatcttcccttcgagcctccggagggagtgtagccctgccaacacctttattttagccccataacagtcatttcagacttgtggcctccagaattttaagagaataaatttttattgtattaagcca

SEQ ID NO: 423992 - DNA, 942 bp, Homo sapiens
ctagtacaacaattcggtgaaggatgaggctggcttagaccagagtgatggagaggcgatgagcaaggagcagattctaggtgtgcttagaggcagcaggatttgctgatgaaggggttatgactgagcaaataagactgagaaggagcagccaggagctgctgtaagtaaagatgattccattatttcaagtcttgatgtcactgatattgcaccaagtagaaaaaggagacagcgaatgcaaagaaatcttgggacagaacctaaaatggctcctcaggagaatcagcttcaagaaaaggaaaattctaggcctgattcttcactacctgagacgtctaaaaaggagcacatctcagctgaaaacatgtctttagaaactctgagaaacagcagcccagaagacctctttgatgagatttaacagtctcaaaaaatactttgatgttcactagactatgttttctattcatttctttaaaatgaaaaaggagaatttcaagtcagcagccgctattaccgtatcttacaatttaattacatacacagtgaattgaaaccattgtgcaaaatggattacacatgtatacaaagatacgatttgatgatgacactggcacattattctaaactattcattcagcatgcctataattacataaattgtatgagactttttgttgcaaaggacacatttatcatattcattcacacatattatatgtgatagctgtccaacatcctgtctgggaagattttgaaaacaggacaaagaaaacatcattttaaaatgtcttcagctttttttgaatagacgtattcaaacatattctgaacattgatgtttgaacattttaatttgtgtgatgatgtagaaaatataattttagtttgtacataaacattgtgaaaatctgataataaaatttttgatacattgaa

SEQ ID NO: 423993 - DNA, 839 bp, Homo sapiens
gctgcctttgcatgggcctggcccggctcgcattcgtcagtgactccaaccctcctgcttgctgtacttgggatgaaacgaccccacaggtcaggtggagggtggggcgtgggcatcagccaggattgccgttacagtctttttctcaggagctacaaagatctctgtcgtgtgtggagtgccatccccaagggtgtctgaacttctaggcctgattcttcactacctgagacgtctaaaaaggagcacatctcagctgaaaacatgtctttagaaactctgagaaacagcagcccagaagacctctttgatgagatttaacagtctcaaaaaatactttgatgttcactagactatgttttctattcatttctttaaaatgaaaaaggagaatttcaagtcagcagccgctattaccgtatcttacaatttaattacatacacagtgaattgaaaccattgtgcaaaatggattacacatgtatacaaagatacgatttgatgatgacactggcacattattctaaactattcattcagcatgcctataattacataaattgtatgagactttttgttgcaaaggacacatttatcatattcattcacacatattatatgtgatagctgtccaacatcctgtctgggaagattttgaaaacaggacaaagaaaacatcattttaaaatgtcttcagctttttttgaatagacgtattcaaacatattctgaacattgatgtttgaacattttaatttgtgtgatgatgtagaaaatataattttagtttgtacataaacattgtgaaaatctgataataaaatttttgatacattgaa

SEQ ID NO: 423994 - DNA, 694 bp, Homo sapiens
  misc_feature (39)..(40): n is a, c, g, or t
  misc_feature (54)..(54): n is a, c, g, or t
gggcgtcccgaccctggacagagggtttggttttttttnngccaaacggggttngagattctaggcctgattcttcactacctgagacgtctaaaaaggagcacatctcagctgaaaacatgtctttagaaactctgagaaacagcagcccagaagacctctttgatgagatttaacagtctcaaaaaatactttgatgttcactagactatgttttctattcatttctttaaaatgaaaaaggagaatttcaagtcagcagccgctattaccgtatcttacaatttaattacatacacagtgaattgaaaccattgtgcaaaatggattacacatgtatacaaagatacgatttgatgatgacactggcacattattctaaactattcattcagcatgcctataattacataaattgtatgagactttttgttgcaaaggacacatttatcatattcattcacacatattatatgtgatagctgtccaacatcctgtctgggaagattttgaaaacaggacaaagaaaacatcattttaaaatgtcttcagctttttttgaatagacgtattcaaacatattctgaacattgatgtttgaacattttaatttgtgtgatgatgtagaaaatataattttagtttgtacataaacattgtgaaaatctgataataaaatttttgatacattgaa

SEQ ID NO: 423995 - DNA, 569 bp, Homo sapiens
aaagtattttgatggaagaatagtacctgataagaaactgatttaatattaattataataagtactaaattcagattaaaattagggaaactgcaatctgttctgaaatgactgctgaccgagatccagtctatgatgagagtactgatgaggaaagtgaaaaccaaactgatctctctgggttggcttcagctgctgtaagtaaagatgattccattatttcaagtcttgatgtcactgatattgcaccaagtagaaaaaggagacagcgaatgcaaagaaatcttgggacagaacctaaaatggctcctcaggagaatcagcttcaagaaaaggaaaaatggagtcttgctctgtcaccaggcaatcattaatgatattggttgtaattttagagttataaaaaaaataagaaaatggggagaaagaaaagggggaaacaggaagaagataaaggagagaacagaaaaagaaggaaagaagaaaggcaggaaagcaggaaggaagcagcaagggaggaagagaaggaggaagacagacaatcacaaagcagacttttcaggtaactg

SEQ ID NO: 423996 - DNA, 1674 bp, Homo sapiens
cgggatttagatcacgtcccgcaggccggcggaagtagctgatactctcattggttgcaaaaccttgatctgtgaaagcgggcgttttggaagataccggaagtagagtcacggagaggtattaagaaatggagagaaaaataagcagaatccaccttgtttctgaacccagtataactcattttctacaagtatcttgggagaaaacactggaatctggttttgttattacacttactgatggtcattcagcatggactgggacagtttctgaatcagagatttcccaagaagctgatgacatggcaatggaaaaagggaaatatgttggtgaactgagaaaagcattgttgtcaggagcaggaccagctgatgtatacacgtttaatttttctaaagagtcttgttatttcttctttgagaaaaacctgaaagatgtctcattcagacttggttccttcaacctagagaaagttgaaaacccagctgaagtcattagagaacttatttgttattgcttggacaccattgcagaaaatcaagccaaaaatgagcacctgcagaaagaaaatgaaaggcttctgagagattggaatgatgttcaaggacgatttgaaaaatgtgtgagtgctaaggaagctttggagactgatctttataagcggtttattctggtgttgaatgagaagaaaacaaaaatcagaagtttgcataataaattattaaatgcagctcaagaacgagaaaaggacatcaaacaagaaggggaaactgcaatctgttctgaaatgactgctgaccgagatccagtctatgatgagagtactgatgaggaaagtgaaaaccaaactgatctctctgggttggcttcagctgctgtaagtaaagatgattccattatttcaagtcttgatgtcactgatattgcaccaagtagaaaaaggagacagcgaatgcaaagaaatcttgggacagaacctaaaatggctcctcaggagaatcagcttcaagaaaaggaaaattctaggcctgattcttcactacctgagacgtctaaaaaggagcacatctcagctgaaaacatgtctttagaaactctgagaaacagcagcccagaagacctctttgatgagatttaacagtctcaaaaaatactttgatgttcactagactatgttttctattcatttctttaaaatgaaaaaggagaatttcaagtcagcagccgctattaccgtatcttacaatttaattacatacacagtgaattgaaaccattgtgcaaaatggattacacatgtatacaaagatacgatttgatgatgacactggcacattattctaaactattcattcagcatgcctataattacataaattgtatgagactttttgttgcaaaggacacatttatcatattcattcacacatattatatgtgatagctgtccaacatcctgtctgggaagattttgaaaacaggacaaagaaaacatcattttaaaatgtcttcagctttttttgaatagacgtattcaaacatattctgaacattgatgtttgaacattttaatttgtgtgatgatgtagaaaatataattttagtttgtacataaacattgtgaaaatctgataataaaatttttgatacattgaacattgaagattttgtgt

SEQ ID NO: 423997 - DNA, 1947 bp, Homo sapiens
cgggatttagatcacgtcccgcaggccggcggaagtagctgatactctcattggttgcaaaaccttgatctgtgaaagcgggcgttttggaagataccggaagtagagtcacggagaggtattaagaaatggagagaaaaataagcagaatccaccttgtttctgaacccagtataactcattttctacaagtatcttgggagaaaacactggaatctggttttgttattacacttactgatggtcattcagcatggactgggacagtttctgaatcagagatttcccaagaagctgatgacatggcaatggaaaaagggaaatatgttggtgaactgagaaaagcattgttgtcaggagcaggaccagctgatgtatacacgtttaatttttctaaagagtcttgttatttcttctttgagaaaaacctgaaagatgtctcattcagacttggttccttcaacctagagaaagttgaaaacccagctgaagtcattagagaacttatttgttattgcttggacaccattgcagaaaatcaagccaaaaatgagcacctgcagaaagaaaatgaaaggcttctgagagattggaatgatgttcaaggacgatttgaaaaatgtgtgagtgctaaggaagctttggagactgatctttataagcggtttattctggtgttgaatgagaagaaaacaaaaatcagaagtttgcataataaattattaaatgcagctcaagaacgagaaaaggacatcaaacaagaaggggaaactgcaatctgttctgaaatgactgctgaccgagatccagtctatgatgagagtactgatgaggaaagtgaaaaccaaactgatctctctgggttggcttcagctgctgtaagtaaagatgattccattatttcaagtcttgatgtcactgatattgcaccaagtagaaaaaggagacagcgaatgcaaagaaatcttgggacagaacctaaaatggctcctcaggagaatcagcttcaagaaaaggaaaattctaggcctgattcttcactacctgagacgtctaaaaaggagcacatctcagctgaaaacatgtctttagaaactctgagaaacagcagcccagaagacctctttgatgagatttaacagtctcaaaaaatactttgatgttcactagactatgttttctattcatttctttaaaatgaaaaaggagaatttcaagtcagcagccgctattaccgtatcttacaatttaattacatacacagtgaattgaaaccattgtgcaaaatggattacacatgtatacaaagatacgatttgatgatgacactggcacattattctaaactattcattcagcatgcctataattacataaattgtatgagactttttgttgcaaaggacacatttatcatattcattcacacatattatatgtgatagctgtccaacatcctgtctgggaagattttgaaaacaggacaaagaaaacatcattttaaaatgtcttcagctttttttgaatagacgtattcaaacatattctgaacattgatgtttgaacattttaatttgtgtgatgatgtagaaaatataattttagtttgtacataaacattgtgaaaatctgataataaaatttttgatacattgaaaaaaaaaaaaaaaaaaaaaaaaaaaaattgtgttggggcggcttgggccctggaaaaagttttttaaaccattggttgggggcggggggccccgttaggtaccgtgacctggggccaaacgcggtccccaaggagaaacccgggcacaggaccaagggtccgggatttcctcccccatataaagaaacgcccgggggggcacacagagggtttctgaacaatcccgagggagctcggaaggccacacgggctcctacacacagggagtccaagagagtcgaaataatacg

SEQ ID NO: 423998 - DNA, 1450 bp, Homo sapiens
tagtgagtccagtgcgtagctcgtatactcaatttacgccccgcaccgtgactgggacagtttctgaatcagagatttcccaagaagctgatgacatggcaatggaaaaagggaaatatgttggtgaactgagaaaagcattgttgtcaggagcaggaccagctgatgtatacacgtttaatttttctaaagagtcttgttatttcttctttgagaaaaacctgaaagatgtctcattcagacttggttccttcaacctagagaaagttgaaaacccagctgaagtcattagagaacttatttgttattgcttggacaccattgcagaaaatcaagccaaaaatgagcacctgcagaaagaaaatgaaaggcttctgagagattggaatgatgttcaaggacgatttgaaaaatgtgtgagtgctaaggaagctttggagactgatctttataagcggtttattctggtgttgaatgagaagaaaacaaaaatcagaagtttgcataataaattattaaatgcagctcaagaacgagaaaaggacatcaaacaagaaggggaaactgcaatctgttctgaaatgactgctgaccgagatccagtctatgatgagagtactgatgaggaaagtgaaaaccaaactgatctctctgggttggcttcagctgctgtaagtaaagatgattccattatttcaagtcttgatgtcactgatattgcaccaagtagaaaaaggagacagcgaatgcaaagaaatcttgggacagaacctaaaatggctcctcaggagaatcagcttcaagaaaaggaaaattctaggcctgattcttcactacctgagacgtctaaaaaggagcacatctcagctgaaaacatgtctttagaaactctgagaaacagcagcccagaagacctctttgatgagatttaacagtctcaaaaaatactttgatgttcactagactatgttttctattcatttctttaaaatgaaaaaggagaatttcaagtcagcagccgctattaccgtatcttacaatttaattacatacacagtgaattgaaaccattgtgcaaaatggattacacatgtatacaaagatacgatttgatgatgacactggcacattattctaaactattcattcagcatgcctataattacataaattgtatgagactttttgttgcaaaggacacatttatcatattcattcacacatattatatgtgatagctgtccaacatcctgtctgggaagattttgaaaacaggacaaagaaaacatcattttaaaatgtcttcagctttttttgaatagacgtattcaaacatattctgaacattgatgtttgaacattttaatttgtgtgatgatgtagaaaatataattttagtttgtacataaacattgtgaaaatctgataataaaatttttgatacattgaa

SEQ ID NO: 423999 - DNA, 1477 bp, Homo sapiens
tcaccgcttgtccctctgactgcagccaggaacgtttctctaattttaagtatttatgtgaatacattgggctcacccagaaaataatgaagaataatctctcatctcaaagattataaccttaatctcatttataaagtcccactttactgtggaaggtaacatcccaagtttcaataattagcttgtagacatctttgggggaacatcattctgtctaccacattcaggaatattttgacctattcaagcatagaaagaagttcagacttggttccttcaacctagagaaagttgaaaacccagctgaagtcattagagaacttatttgttattgcttggacaccattgcagaaaatcaagccaaaaatgagcacctgcagaaagaaaatgaaaggcttctgagagattggaatgatgttcaaggacgatttgaaaaatgtgtgagtgctaaggaagctttggagactgatctttataagcggtttattctggtgttgaatgagaagaaaacaaaaatcagaagtttgcataataaattattaaatgcagctcaagaacgagaaaaggacatcaaacaagaaggggaaactgcaatctgttctgaaatgactgctgaccgagatccagtctatgatgagagtactgatgaggaaagtgaaaaccaaactgatctctctgggttggcttcagctgctgtaagtaaagatgattccattatttcaagtcttgatgtcactgatattgcaccaagtagaaaaaggagacagcgaatgcaaagaaatcttgggacagaacctaaaatggctcctcaggagaatcagcttcaagaaaaggaaaattctaggcctgattcttcactacctgagacgtctaaaaaggagcacatctcagctgaaaacatgtctttagaaactctgagaaacagcagcccagaagacctctttgatgagatttaacagtctcaaaaaatactttgatgttcactagactatgttttctattcatttctttaaaatgaaaaaggagaatttcaagtcagcagccgctattaccgtatcttacaatttaattacatacacagtgaattgaaaccattgtgcaaaatggattacacatgtatacaaagatacgatttgatgatgacactggcacattattctaaactattcattcagcatgcctataattacataaattgtatgagactttttgttgcaaaggacacatttatcatattcattcacacatattatatgtgatagctgtccaacatcctgtctgggaagattttgaaaacaggacaaagaaaacatcattttaaaatgtcttcagctttttttgaatagacgtattcaaacatattctgaacattgatgtttgaacattttaatttgtgtgatgatgtagaaaatataattttagtttgtacataaacattgtgaaaatctgataataaaatttttgatacattgaa

SEQ ID NO: 424000 - DNA, 1153 bp, Homo sapiens
cgggatttagatcacgtcccgcaggccggcggaagtagctgatactctcattggttgcaaaaccttgatctgtgaaagcgggcgttttggaagataccggaagtagagtcacggagaggtattaagaaatggagagaaaaataagcagaatccaccttgtttctgaacccagtataactcattttctacaagtatcttgggagaaaacactggaatctggttttgttattacacttactgatggtcattcagcatggactgggacagtttctgaatcagagatttcccaagaagctgatgacatggcaatggaaaaagggaaatatgttggtgaactgagaaaagcattgttgtcaggagcaggaccagctgatgtatacacgtttaatttttctaaagagtcttgttatttcttctttgagaaaaacctgaaagatgtctcattcagacttggttccttcaacctagagaaagttgaaaacccagctgaagtcattagagaacttatttgttattgcttggacaccattgcagaaaatcaagccaaaaatgagcacctgcagaaagaaaatgaaaggcttctgagagattggaatgatgttcaaggacgatttgaaaaatgtgtgagtgctaaggaagctttggagactgatctttataagcggtttattctggtgttgaatgagaagaaaacaaaaatcagaagtttgcataataaattattaaatgcagctcaagaacgagaaaaggacatcaaacaagaaggggaaactgcaatctgttctgaaatgactgctgaccgagatccagtctatgatgagagtactgatgaggaaagtgaaaaccaaactgatctctctgggttggcttcagagggaggaagaaggagacttcagagaaagaggccgtgtgatggaagcaaaatcagagagaaaagatgctaagctgctgcctttgaataaggaggaacgtgagccaacagatccaagaactgaagctctaggcagtggaaaagccaaggaaactgatcttcccttcgagcctccggagggagtgtagccctgccaacacctttattttagccccataacagtcatttcagacttgtggcctccagaattttaagagaataaatttttattgtattaagcca

SEQ ID NO: 424001 - DNA, 599 bp, Homo sapiens
cgggatttagatcacgtcccgcaggccggcggaagtagctgatactctcattggttgcaaaaccttgatctgtgaaagcgggcgttttggaagataccggaagtagagtcacggagaggtattaagaaatggagagaaaaataagcagaatccaccttgtttctgaacccagtataactcattttctacaagtatcttgggagaaaacactggaatctggttttgttattacacttactgatggtcattcagcatggactgggacagtttctgaatcagagatttcccaagaagctgatgacatggcaatggaaaaagggaaatatgttggtgaactgagaaaagcattgttgtcaggagcaggaccagctgatgtatacacgtttaatttttctaaagagtcttgttatttcttctttgagaaaaacctgaaagatgtctcattcagacttggttccttcaacctagagaaagttgaaaacccagctgaagtcattagagaacttatttgttattgcttggacaccattggaaatttggaagattttcaaagggcaatttggaaatatgtgagaggtatagaaatttttggactttgt

SEQ ID NO: 424002 - DNA, 487 bp, Homo sapiens
  misc_feature (464)..(464): n is a, c, g, or t
  misc_feature (468)..(468): n is a, c, g, or t
  misc_feature (471)..(471): n is a, c, g, or t
  misc_feature (475)..(475): n is a, c, g, or t
  misc_feature (479)..(479): n is a, c, g, or t
ccgctcccccccactctcctctttccgataaagtcaccttccacccttactacacaagtcaaagacgcccactctcctctttccggcggtgacgacctacgcacacgagaacatgcctctcgcaaaggatctccttcatccctctccagaagaggagaagaggaaacacaagaagaaacgcctggtgcagagccccaattcctacttcatggatgtgaaatgcccaggatgctataaaatcaccacggtctttagccatgcacaaacggtagttttgtgtgttggctgctccactgtcctctgccagcctacaggaggaaaagcaaggcttacagaaggatgttccttcaggaggaagcagcactaaaagcactctgagtcaagatgagtgggaaaccatctcaataaacacattttggatcaaaaaaaaaaaaaaaaacaaacaaaaaaaaaccttgttgggnccgnccngggncccnggaaaaag

SEQ ID NO: 424003 - DNA, 429 bp, Homo sapiens
  misc_feature (406)..(406): n is a, c, g, or t
  misc_feature (410)..(410): n is a, c, g, or t
  misc_feature (413)..(413): n is a, c, g, or t
  misc_feature (417)..(417): n is a, c, g, or t
  misc_feature (421)..(421): n is a, c, g, or t
caattttgctttccggtggagtttccggcggtgacgacctacgcacacgagaacatgcctctcgcaaaggatctccttcatccctctccagaagaggagaagaggaaacacaagaagaaacgcctggtgcagagccccaattcctacttcatggatgtgaaatgcccaggatgctataaaatcaccacggtctttagccatgcacaaacggtagttttgtgtgttggctgctccactgtcctctgccagcctacaggaggaaaagcaaggcttacagaaggatgttccttcaggaggaagcagcactaaaagcactctgagtcaagatgagtgggaaaccatctcaataaacacattttggatcaaaaaaaaaaaaaaaaacaaacaaaaaaaaaccttgttgggnccgnccngggncccnggaaaaag

SEQ ID NO: 424004 - DNA, 229 bp, Homo sapiens
  misc_feature (165)..(165): n is a, c, g, or t
  misc_feature (173)..(173): n is a, c, g, or t
  misc_feature (209)..(209): n is a, c, g, or t
  misc_feature (218)..(218): n is a, c, g, or t
ttgaggatccccgctattcatcggcacctcgtattcatcgtttccggcggtgacgacctacgcacacgagaacatgcctctcgcaaaggatctccttcatccctctccagaagaggagaagaggaaacacaagaagaaacgcctggtgcagagccccaattcctnaccttcantggggcacttggtttgaacaacaatttgggcccccnaaagcgaantgggctttaat

SEQ ID NO: 424005 - DNA, 448 bp, Homo sapiens
  misc_feature (425)..(425): n is a, c, g, or t
  misc_feature (429)..(429): n is a, c, g, or t
  misc_feature (432)..(432): n is a, c, g, or t
  misc_feature (436)..(436): n is a, c, g, or t
  misc_feature (440)..(440): n is a, c, g, or t
ttgaggatccccgctattcatcggcacctcgtattcatcgtttccggcggtgacgacctacgcacacgagaacatgcctctcgcaaaggatctccttcatccctctccagaagaggagaagaggaaacacaagaagaaacgcctggtgcagagccccaattcctacttcatggatgtgaaatgcccaggatgctataaaatcaccacggtctttagccatgcacaaacggtagttttgtgtgttggctgctccactgtcctctgccagcctacaggaggaaaagcaaggcttacagaaggatgttccttcaggaggaagcagcactaaaagcactctgagtcaagatgagtgggaaaccatctcaataaacacattttggatcaaaaaaaaaaaaaaaaacaaacaaaaaaaaaccttgttgggnccgnccngggncccnggaaaaag

SEQ ID NO: 424006 - DNA, 781 bp, Homo sapiens
gcaccagtaaaattcatactggtgagaaacgctataatgtaaggaatatgggaaagcatttgctgtggatgatcagctgtctcaacatcagaaaattcagaatagttagaaattttgtgacaataaggagtgtggacaagccttcactgtgtacgaaaaatttactcaacaccagagagctcatattgatgagaaatcttgtgaacataaaagaatgtgtgaagaactttcatcatggcctgggatttgctcaacttctgagtattcatacttctgagaaatctttgagtgtaaggaatgtggggcgttttatagccacactaaataccttagagttcggagaagataattcttgtgagaaagtctttgaatgaggaatatagggtagttgtcatgttcacaatgtactccctatgaaataatttaccagatacaggcatacctcgctgaattgtgcattgcagttattgtgttttatacaaactgaaggtttgtggcaaccctgtggtgagcaagacgatcaggtccattttcccaacgtcaggtgtgcatttcatgtctttatgtcacattttggtaattctcagaatatttcaaactatttcattgttatatatctatcatggtgatcaatgaccagtgatttttgatgttgctattgtaattgctttgggataccacaaattctgcccataaaagatggtaaacctagttgatacttgttgtgggttttgaaagaatagtcaaatatacaatcatataccccaacctagattcaaaa

SEQ ID NO: 424007 - DNA, 735 bp, Homo sapiens
gcaccagtaaaattcatactggtgagaaacgctataatgtaaggaatatgggaaagcatttgctgtggatgatcagctgtctcaacatcagaaaattcagaatagttagaaattttgtgacaataaggagtgtggacaagccttcactgtgtacgaaaaatttactcaacaccagagagctcatattgatgagaaatcttgtgaacataaaagaattattcatacttctgagaaatctttgagtgtaaggaatgtggggcgttttatagccacactaaataccttagagttcggagaagataattcttgtgagaaagtctttgaatgaggaatatagggtagttgtcatgttcacaatgtactccctatgaaataatttaccagatacaggcatacctcgctgaattgtgcattgcagttattgtgttttatacaaactgaaggtttgtggcaaccctgtggtgagcaagacgatcaggtccattttcccaacgtcaggtgtgcatttcatgtctttatgtcacattttggtaattctcagaatatttcaaactatttcattgttatatatctatcatggtgatcaatgaccagtgatttttgatgttgctattgtaattgctttgggataccacaaattctgcccataaaagatggtaaacctagttgatacttgttgtgggttttgaaagaatagtcaaatatacaatcatataccccaacctagattcaaaa

SEQ ID NO: 424008 - DNA, 432 bp, Homo sapiens
gcaccagtaaaattcatactggtgagaaacgctataatgtaaggaatatgggaaagcatttgctgtggatgatcagctgtctcaacatcagaaaattcagaatagttagaaattttgtgacaataaggagtgtggacaagccttcactgtgtacgaaaaatttactcaacaccagagagctcatattgatgagaaatcttgtgaacataaaagaatatccctcatgaataaattaatgccctctctggattgaggggtgagtgagctatcgctctgttaatttttgtgatgtctgcatacactggctctcccttcatcatctgccatgagtggaagcagcctgagacccttagcagaagcagatgctgcaccatgattcttgtacattctgcagaacagtgagccaaataaacctctttattaatcacccag

SEQ ID NO: 424009 - DNA, 727 bp, Homo sapiens
tctgtatttgttccatcttgcttttacagatcaatacaaataggtaactataccttctaaacaaacatcaagttggtggaaaaaaggcatatgaacagttctttctcacctactatcaacaaacagtaaattaaacattcctaactgcagcctccttttgtaaaatttataaccatttatcttttgagtgtgacatgatactagatgtatgataattacatgttttgtgtatcagtatgaacatgatttttaacagacttgttccaatgaactattatagagatggtccccaacaatgtcaactaacaatttctcagctttatgatggtacaaaagtgatatgttgctatagtttggatatttgtccctccaaatctcatgttgaagtttgatctcagtgttggaggtggggcctaatggaaggtgtttgggtcatggtggaagatccctcatgaataaattaatgccctctctggattgaggggtgagtgagctatcgctctgttaatttttgtgagagctggttgttcaaaagaacctggcacctcctccctcaccctcttgttttctctcttgccatgtgatgtctgcatacactggctctcccttcatcatctgccatgagtggaagcagcctgagacccttagcagaagcagatgctgcaccatgattcttgtacattctgcagaacagtgagccaaataaacctctttattaatcacccag

SEQ ID NO: 424010 - DNA, 1031 bp, Homo sapiens
agtacccggtgcgaggctgggtggcgaaacaagttgaaggagccggctttacttcgcaagctgggccggaaggtggtggtcgtacgctgtgaaggcatcaacatttctggcaatttctacagaaacaagtcacttccgggcccccagccgcatcttctggcggaccgtgcgaggtatgctgccccacaaaaccaagcgaggccaggccgctctggaccgtctcaaggtgtttgacggcatcccaccgccctacgacaagaaaaagcggatggtggttcctgctgccctcaaggtcgtgcgtctgaagcctacaagaaagtttgcctatctggggcgcctggctcacgaggttggctggaagtaccaggcagtgacagccaccctggaggagaagaggaaagagaaagccaagatccactaccggaagaagaaacagctcatgaggctacggaaacaggccgagaagaacgtggagaagaaaattgacaaatacacagaggtcctcaagacccacggactcctggtctgagcccaataaagactgttaattcctcatgcgttgcctgcccttcctccattgttgccctggaatgtacgggacccaggggcagcagcagtccaggtgccacaggcagccctgggacataggaagctgggagcaaggaaagggtcttagtcactgcctcccgaagttgcttgaaagcactcggagaattgtgcaggtgtcatttatctatgaccaataggaagagcaaccagttactatgagtgaaagggagccagaagactgattggagggccctatcttgtgagtggggcatctgttggactttccacctggtcatatactctgcagctgttagaatgtgcaagcacttggggacagcatgagcttgctgttgtacacagggtatttctagaagcagaaatagactgggaagatgcacaaccaaggggttacaggcatcgcccatgctcctcacctgtattttgtaatcagaaataaattgcttttaaagaaaacaaaaaaa

SEQ ID NO: 424011 - DNA, 587 bp, Homo sapiens
cttttccaagcggctgcgaagatggcggaggtgcaggtcctggtgcttgatggtcgaggccatctcctgggccgcctggcggccatcgtggctaaacaggtactgtgaagtacctggctttcctccgcaagcggatgaacaccaacccttcccgaggcccctaccacttccgggcccccagccgcatcttctggcggaccgtgcgaggtatgctgccccacaaaaccaagcgaggccaggccgctctggaccgtctcaaggtgtttgacggcatcccaccgccctacgacaagaaaaagcggatggtggttcctgctgccctcaaggtcgtgcgtctgaagcctacaagaaagtttgcctatctggggcgcctggctcacgaggttggctggaagtaccaggcagtgacagccaccctggaggagaagaggaaagagaaagccaagatccactaccggaagaagaaacagctcatgaggctacggaaacaggccgagaagaacgtggagaagaaaattgacaaatacacagaggtcctcaagacccacggactcctggtctgagcccaataaagactgttaattcct

SEQ ID NO: 424012 - DNA, 736 bp, Homo sapiens
gaaacagctcatgaggctacggatcttggctttctctttcctcttctcctccaggttggctggaagtaccaggcagtgacagccaccctggaggagaagaggaaagagaaagccaagatccactaccggaagaagaaacagctcatgaggctacggaaacaggccgagaagaacgtggagaagaaaattgacaaatacacagaggtcctcaagacccacggactcctggtctgagcccaataaagactgttaattcctcatgcgttgcctgcccttcctccattgttgccctggaatgtacgggacccaggggcagcagcagtccaggtgccacaggcagccctgggacataggaagctgggagcaaggaaagggtcttagtcactgcctcccgaagttgcttgaaagcactcggagaattgtgcaggtgtcatttatctatgaccaataggaagagcaaccagttactatgagtgaaagggagccagaagactgattggagggccctatcttgtgagtggggcatctgttggactttccacctggtcatatactctgcagctgttagaatgtgcaagcacttggggacagcatgagcttgctgttgtacacagggtatttctagaagcagaaatagactgggaagatgcacaaccaaggggttacaggcatcgcccatgctcctcacctgtattttgtaatcagaaataaattgcttttaaagaaaacaaaaaaa

SEQ ID NO: 424013 - DNA, 156 bp, Homo sapiens
ctgctcgaattcaagcttctaacgatgtacggggaacagctcatgaggctacggaaacaggccgagaagaacgtggagaagaaaattgacaaatacacagaggtcctcaagacccacggactcctggtctgagcccaataaagactgttaattcct

SEQ ID NO: 424014 - DNA, 1135 bp, Homo sapiens
cttttccaagcggctgcgaagatggcggaggtgcaggtcctggtgcttgatggtcgaggccatctcctgggccgcctggcggccatcgtggctaaacaggtactgctgggccggaaggtggtggtcgtacgctgtgaaggcatcaacatttctggcaatttctacagaaacaagttgaagtacctggctttcctccgcaagcggatgaacaccaacccttcccgaggcccctaccacttccgggcccccagccgcatcttctggcggaccgtgcgaggtatgctgccccacaaaaccaagcgaggccaggccgctctggaccgtctcaaggtgtttgacggcatcccaccgccctacgacaagaaaaagcggatggtggttcctgctgccctcaaggtcgtgcgtctgaagcctacaagaaagtttgcctatctggggcgcctggctcacgaggttggctggaagtaccaggcagtgacagccaccctggaggagaagaggaaagagaaagccaagatccactaccggaagaagaaacagctcatgaggctacggaaacaggccgagaagaacgtggagaagaaaattgacaaatacacagaggtcctcaagacccacggactcctggtctgagcccaataaagactgttaattcctcatgcgttgcctgcccttcctccattgttgccctggaatgtacgggacccaggggcagcagcagtccaggtgccacaggcagccctgggacataggaagctgggagcaaggaaagggtcttagtcactgcctcccgaagttgcttgaaagcactcggagaattgtgcaggtgtcatttatctatgaccaataggaagagcaaccagttactatgagtgaaagggagccagaagactgattggagggccctatcttgtgagtggggcatctgttggactttccacctggtcatatactctgcagctgttagaatgtgcaagcacttggggacagcatgagcttgctgttgtacacagggtatttctagaagcagaaatagactgggaagatgcacaaccaaggggttacaggcatcgcccatgctcctcacctgtattttgtaatcagaaataaattgcttttaaagaaaacaaaaaaa

SEQ ID NO: 424015 - DNA, 882 bp, Homo sapiens
ttccgcacccaggcgcacttctgcacccaggcgcacttctgcaccagcgaggccaggccgctctggaccgtctcaaggtgtttgacggcatcccaccgccctacgacaagaaaaagcggatggtggttcctgctgccctcaaggtcgtgcgtctgaagcctacaagaaagtttgcctatctggggcgcctggctcacgaggttggctggaagtaccaggcagtgacagccaccctggaggagaagaggaaagagaaagccaagatccactaccggaagaagaaacagctcatgaggctacggaaacaggccgagaagaacgtggagaagaaaattgacaaatacacagaggtcctcaagacccacggactcctggtctgagcccaataaagactgttaattcctcatgcgttgcctgcccttcctccattgttgccctggaatgtacgggacccaggggcagcagcagtccaggtgccacaggcagccctgggacataggaagctgggagcaaggaaagggtcttagtcactgcctcccgaagttgcttgaaagcactcggagaattgtgcaggtgtcatttatctatgaccaataggaagagcaaccagttactatgagtgaaagggagccagaagactgattggagggccctatcttgtgagtggggcatctgttggactttccacctggtcatatactctgcagctgttagaatgtgcaagcacttggggacagcatgagcttgctgttgtacacagggtatttctagaagcagaaatagactgggaagatgcacaaccaaggggttacaggcatcgcccatgctcctcacctgtattttgtaatcagaaataaattgcttttaaagaaaacaaaaaaa

SEQ ID NO: 424016 - DNA, 883 bp, Homo sapiens
tattggtcatagataaatgacacccgcaccattctccgagtgctttcaagcaacttcgggaggcagtgactaagaccctttccttgctcccagcttcctatgtcccagggcgcctgtggcacctggactgctgctgccctcaaggtcgtgcgtctgaagcctacaagaaagtttgcctatctggggcgcctggctcacgaggttggctggaagtaccaggcagtgacagccaccctggaggagaagaggaaagagaaagccaagatccactaccggaagaagaaacagctcatgaggctacggaaacaggccgagaagaacgtggagaagaaaattgacaaatacacagaggtcctcaagacccacggactcctggtctgagcccaataaagactgttaattcctcatgcgttgcctgcccttcctccattgttgccctggaatgtacgggacccaggggcagcagcagtccaggtgccacaggcagccctgggacataggaagctgggagcaaggaaagggtcttagtcactgcctcccgaagttgcttgaaagcactcggagaattgtgcaggtgtcatttatctatgaccaataggaagagcaaccagttactatgagtgaaagggagccagaagactgattggagggccctatcttgtgagtggggcatctgttggactttccacctggtcatatactctgcagctgttagaatgtgcaagcacttggggacagcatgagcttgctgttgtacacagggtatttctagaagcagaaatagactgggaagatgcacaaccaaggggttacaggcatcgcccatgctcctcacctgtattttgtaatcagaaataaattgcttttaaagaaaacaaaaaaa

SEQ ID NO: 424017 - DNA, 657 bp, Homo sapiens
cttttccaagcggctgcgaagatggcggaggtgcaggtcctggtgcttgatggtcgaggccatctcctgggccgcctggcggccatcgtggctaaacaggtactgctgggccggaaggtggtggtcgtacgctgtgaaggcatcaacatttctggcaatttctacagaaacaagttgaagtacctggctttcctccgcaagcggatgaacaccaacccttcccgaggcccctaccacttccgggcccccagccgcatcttctggcggaccgtgcgaggtatgctgccccacaaaaccaagcgaggccaggccgctctggaccgtctcaaggtgtttgacggcatcccaccgccctacgacaagaaaaagcggatggtggttcctgctgccctcaaggtcgtgcgtctgaagcctacaagaaagtttgcctatctggggcgcctggctcacgaggttggctggaagtaccaggcagtgacagccaccctggaggagaagaggaaagagaaagccaagatccactaccggaagaagaaacagctcatgaggctacggaaacaggccgagaagaacgtggagaagaaaattgacaaatacacagaggtcctcaagacccacggactcctggtctgagcccaataaagactgttaattcct

SEQ ID NO: 424018 - DNA, 1318 bp, Homo sapiens
cttttccaagcggctgcgaagatggcggaggtgcaggtcctggtgcttgatggtcgaggccatctcctgggccgcctggcggccatcgtggctaaacaggtactgctgggccggaaggtggtggtcgtacgctgtgaaggcatcaacatttctggcaatttctacagaaacaagttgaagtacctggctttcctccgcaagcggatgaacaccaacccttcccgaggcccctaccacttccgggcccccagccgcatcttctggcggaccgtgcgaggtatgctgccccacaaaaccaagcgaggccaggccgctctggaccgtctcaaggtgtttgacggcatcccaccgccctacgacaagaaaaagcggatggtggttcctgctgccctcaaggtcgtgcgtctgaagcctacaagaaagtttgcctatctggggcgcctggctcacgaggttggctggaagtaccaggcagtgacagccaccctggaggagaagaggaaagagaaagccaagatccactaccggaagaagaaacagctcatgaggctacggaaacaggccgagaagaacgtggagaagaaaattgacaaatacacagaggtcctcaagacccacggactcctggtctgagcccaataaagactgttaattccttcctaaaaaaaaaaaaaaaaaaaaaaaaaagaaaaaggaaaaaaaacaagaaaaaaaaaaaaaaaaaaaacgaaaaaaaaacaaaaaaaaaaaaaaaaaaaaaaaaaaaagggggcgggcgcgcggcgcaaccagtttcctccggggggagagacacgaagataagatgacacaggacgaagcgttttgttaattgtagaaaaagagagaggggggcactaatatagagagagaggggagtgagtatgtatattataaataaaaaggaaagagagcgtgaggtagggggattgatgttaaatataaagaagagagaagtggaagagagagaggaaaaaaaaatgagtagtaagaataggatggtagttatatattgattgtaagaagacgacgcgcaactctcaatactgcacgagcgagggggacgggagcagagagaacagaaacgagggaggaggagggagcgaagcagaagaagaacgaacacccataacgagcaaaccgaatacagataaaagaacacacaaacacagcaataagagcgagggagcaaacatcaaatgcaatgaacacagagcgcaagcgagaggggggcgacagacagagacgagagagaagagaaaacaacaaacgaaccaacagcaacgagaagagaagcaac

SEQ ID NO: 424019 - DNA, 1081 bp, Homo sapiens
cttttccaagcggctgcgaagatggcggaggtgcaggtcctggtgcttgatggtcgaggccatctcctgggccgcctggcggccatcgtggctaaacaggtactgctgggccggaaggtggtggtcgtacgctgtgaaggcatcaacatttctggcaatttctacagaaacaagttgaagtacctggctttcctccgcaagcggatgaacaccaacccttcccgaggcccctaccacttccgggcccccagccgcatcttctggcggaccgtgcgaggtatgctgccccacaaaaccaagcgaggccaggccgctctggaccgtctcaaggtgtttgacggcatcccaccgccctacgacaagaaaaagcggatggtggttcctgctgccctcaaggtcgtgcgtctgaagcctacaagaaagtttgcctatctggggcgcctggctcacgaggttggctggaagtaccaggcagtgacagccaccctggaggagaagaggaaagagaaagccaagatccactaccggaagaagaaacagctcatgaggctacggaaacaggccgagaagaacgtggagaagcaataaagactgttaattcctcatgcgttgcctgcccttcctccattgttgccctggaatgtacgggacccaggggcagcagcagtccaggtgccacaggcagccctgggacataggaagctgggagcaaggaaagggtcttagtcactgcctcccgaagttgcttgaaagcactcggagaattgtgcaggtgtcatttatctatgaccaataggaagagcaaccagttactatgagtgaaagggagccagaagactgattggagggccctatcttgtgagtggggcatctgttggactttccacctggtcatatactctgcagctgttagaatgtgcaagcacttggggacagcatgagcttgctgttgtacacagggtatttctagaagcagaaatagactgggaagatgcacaaccaaggggttacaggcatcgcccatgctcctcacctgtattttgtaatcagaaataaattgcttttaaagaaaacaaaaaaa

SEQ ID NO: 424020 - DNA, 1753 bp, Homo sapiens
acagtaggacgcggggcacgccggtacctgaagtccttcagaagtgcacgccgggaccaggattccgggaggccgactcctccctgccccacgaatgccgggaattgtggtctccgccggacgcgagttgtgagacggcccaaggggccgcggggtatgctgggaccgctagcccttccggcgcgcctcaggacttcgggtcccctcaccccgggcggatgcccaaagactccgccttcccaagagcccctgcggccgggcgcgaaaatggcggcggcggcgacggccgggcgctcctgaagcagcagttatggagcttccctcagggccggggccggagcggctctttgactcgcaccggcttccgggtgactgcttcctactgctcgtgctgctgctctacgcgccagtcgggttctgcctcctcgtcctgcgcctctttctcgggatccacgtcttcctggtcagctgcgcgctgccagacagcgtccttcgcagattcgtagtgcggaccatgtgtgcggtgctagggctcgtggcccggcaggaggactccggactccgggatcacagtgtcagggtcctcatttccaaccatgtgacacctttcgaccacaacatagtcaatttgcttaccacctgtagcacccctctactcaatagtccccccagctttgtgtgctggtctcggggcttcatggagatgaatgggcggggggagttggtggagtcactcaagagattctgtgcttccacgaggcttccccccactcctctgctgctattccctgaggaagaggccaccaatggccgggaggggctcctgcgcttcagttcctggccattttctatccaagatgtggtacaacctcttaccctgcaagttcagagacccctggtctctgtgacggtgtcagatgcctcctgggtctcagaactgctgtggtcacttttcgtccctttcacggtgtatcaagtaaggtggcttcgtcctgttcatcgccaactaggggaagcgaatgaggagtttgcactccgtgtacaacagctggtggccaaggaattgggccagacagggacacggctcactccagctgacaaagcagagcacatgaagcgacaaagacaccccagattgcgcccccagtcagcccagtcttctttccctccctcccctggtccttctcctgatgtgcaactggcaactctggctcagagagtcaaggaagttttgccccatgtgccattgggtgtcatccagagagacctggccaagactggctgtgtagacttgactatcactaatctgcttgagggggccgtagctttcatgcctgaagacatcaccaagggaactcagtccctacccacagcctctgcctccaaggcattcgatgcgtgtttaatgatgatgactccgcaagccctctgacattgtgatcacctcagtttcccagctctggcccggtgacccctcagccaacagccctaacatttgccaagtcttcctgggcccggcaggagagcctgcaggagcgcaagcaagcactatatgaatacgcaagaaggagattcacagagagacgagcccaggaggctgactgagctcaaaggaacaggatggcacccagagccgcaggacggagactgggggcagccctcacccaactcacaacaggctggatgggtgggtggtaaaaagggaaggatgaggctcccccaatgtcacattaaattcatggttttcattcaa

SEQ ID NO: 424021 - DNA, 410 bp, Homo sapiens
ggctgtgtagacttgactatcactaatctgcttgagggggccgtagctttcatgcctgaagacatcaccaagggaactcagtccctacccacagcctctgcctccaagtttcccagacagggacacggctcactccagctgacaaagcagagcacatgaagcgacaaagacaccccagattgcgcccccagtcagcccagtcttctttccctccctcccctggtccttctcctgatgtgcaactggcaactctggctcagagagtcaaggaagttttgccccatgtggagccgcaggacggagactgggggcagccctcacccaactcacaacaggctggatgggtgggtggtaaaaagggaaggatgaggctcccccaatgtcacattaaattcatggttttcattcaa

SEQ ID NO: 424022 - DNA, 1888 bp, Homo sapiens
acagtaggacgcggggcacgccggtacctgaagtccttcagaagtgcacgccgggaccaggattccgggaggccgactcctccctgccccacgaatgccgggaattgtggtctccgccggacgcgagttgtgagacggcccaaggggccgcggggtatgctgggaccgctagcccttccggcgcgcctcaggacttcgggtcccctcaccccgggcggatgcccaaagactccgccttcccaagagcccctgcggccgggcgcgaaaatggcggcggcggcgacggccgggcgctcctgaagcagcagttatggagcttccctcagggccggggccggagcggctctttgactcgcaccggcttccgggtgactgcttcctactgctcgtgctgctgctctacgcgccagtcgggttctgcctcctcgtcctgcgcctctttctcgggatccacgtcttcctggtcagctgcgcgctgccagacagcgtccttcgcagattcgtagtgcggaccatgtgtgcggtgctagggctcgtggcccggcaggaggactccggactccgggatcacagtgtcagggtcctcatttccaaccatgtgacacctttcgaccacaacatagtcaatttgcttaccacctgtagcaccgtgagtgagagcgaggccgagagcgccacggggcggttccctggggcccagctgaaggcccccctgtccccactcgcgttccgcatggaggatactgagccttacccctaaccccgatcctctacccaacatgtcagtttttttttttcattttcctcaatatttttcttcttgctttctcttctcctggttcccagcctctactcaatagtccccccagctttgtgtgctggtctcggggcttcatggagatgaatgggcggggggagttggtggagtcactcaagagattctgtgcttccacgaggcttccccccactcctctgctgctattccctgaggaagaggccaccaatggccgggaggggctcctgcgcttcagttcctggccattttctatccaagatgtggtacaacctcttaccctgcaagttcagagacccctggtctctgtgacggtgtcagatgcctcctgggtctcagaactgctgtggtcacttttcgtccctttcacggtgtatcaagtaaggtggcttcgtcctgttcatcgccaactaggggaagcgaatgaggagtttgcactccgtgtacaacagctggtggccaaggaattgggccagacagggacacggctcactccagctgacaaagcagagcacatgaagcgacaaagacaccccagattgcgcccccagtcagcccagtcttctttccctccctcccctggtccttctcctgatgtgcaactggcaactctggctcagagagtcaaggaagttttgccccatgtgccattgggtgtcatccagagagacctggccaagactggctgtgtagacttgactatcactaatctgcttgagggggccgtagctttcatgcctgaagacatcaccaagggaactcagtccctacccacagcctctgcctccaagtttcccagctctggcccggtgacccctcagccaacagccctaacatttgccaagtcttcctgggcccggcaggagagcctgcaggagcgcaagcaagcactatatgaatacgcaagaaggagattcacagagagacgagcccaggaggctgactgagctcaaaggaacaggatggcacccagagccgcaggacggagactgggggcagccctcacccaactcacaacaggctggatgggtgggtggtaaaaagggaaggatgaggctcccccaatgtcacattaaattcatggttttcattcaa

SEQ ID NO: 424023 - DNA, 2174 bp, Homo sapiens
acagtaggacgcggggcacgccggtacctgaagtccttcagaagtgcacgccgggaccaggattccgggaggccgactcctccctgccccacgaatgccgggaattgtggtctccgccggacgcgagttgtgagacggcccaaggggccgcggggtatgctgggaccgctagcccttccggcgcgcctcaggacttcgggtcccctcaccccgggcggatgcccaaagactccgccttcccaagagcccctgcggccgggcgcgaaaatggcggcggcggcgacggccgggcgctcctgaagcagcagttatggagcttccctcagggccggggccggagcggctctttgactcgcaccggcttccgggtgactgcttcctactgctcgtgctgctgctctacgcgccagtcgggttctgcctcctcgtcctgcgcctctttctcgggatccacgtcttcctggtcagctgcgcgctgccagacagcgtccttcgcagattcgtagtgcggaccatgtgtgcggtgctagggctcgtggcccggcaggaggactccggactccgggatcacagtgtcagggtcctcatttccaaccatgtgacacctttcgaccacaacatagtcaatttgcttaccacctgtagcacccctctactcaatagtccccccagctttgtgtgctggtctcggggcttcatggagatgaatgggcggggggagttggtggagtcactcaagagattctgtgcttccacgaggcttccccccactcctctgctgctattccctgaggaagaggccaccaatggccgggaggggctcctgcgcttcagttcctggccattttctatccaagatgtggtacaacctcttaccctgcaagttcagagacccctggtctctgtgacggtgtcagatgcctcctgggtctcagaactgctgtggtcacttttcgtccctttcacggtgtatcaagtaaggtggcttcgtcctgttcatcgccaactaggggaagcgaatgaggagtttgcactccgtgtacaacagctggtggccaaggaattgggccagacagggacacggctcactccagctgacaaagcagagcacatgaagcgacaaagacaccccagattgcgcccccagtcagcccagtcttctttccctccctcccctggtccttctcctgatgtgcaactggcaactctggctcagagagtcaaggaagttttgccccatgtgccattgggtgtcatccagagagacctggccaagactggctgtgtagacttgactatcactaatctgcttgagggggccgtagctttcatgcctgaagacatcaccaagggaactcagtccctacccacagcctctgcctccaagtttcccagctctggcccggtgacccctcagccaacagccctaacatttgccaagtcttcctgggcccggcaggagagcctgcaggagcgcaagcaagcactatatgaatacgcaagaaggagattcacagagagacgagcccaggaggctgactgagctcaaaggaacaggatggcacccagagccgcaggacggagactgggggcagccctcacccaactcacaacaggctggatgggtgggtggtaaaaagggaaggatgaggctcccccaatgtcacattaaattcatggttttcattcaaacaaaaaacaaaaaacagacaaacgagaaaaaacataaaaagggtgggcacactaagacagtcgcccataaagcagcactactctccgaccaccgagaataaagaaaaacagaggaagcccaaaccaacagcgcgtacactagacgacggggcgagtgaacagacccccaccgaaacacatacactacacaccctatcaaaaactactacctcgacacggtaaatatcagaacacacacctccacataaccaacctaaagcgcaacacaaccacacaaccctaactcgccaacacaccatactcaccgcctcaaacccactacaacattaaataacatcaaacagcaagccaaaataaacagactaactagaacgaaatatacagaacaaagaaacaaaactaaacaacaataactaagcacactaaacatccacacaaaacaaaccaaccactcacctgataactcatctacactccaccaa

SEQ ID NO: 424024 - DNA, 1792 bp, Homo sapiens
acagtaggacgcggggcacgccggtacctgaagtccttcagaagtgcacgccgggaccaggattccgggaggccgactcctccctgccccacgaatgccgggaattgtggtctccgccggacgcgagttgtgagacggcccaaggggccgcggggtatgctgggaccgctagcccttccggcgcgcctcaggacttcgggtcccctcaccccgggcggatgcccaaagactccgccttcccaagagcccctgcggccgggcgcgaaaatggcggcggcggcgacggccgggcgctcctgaagcagcagttatggagcttccctcagggccggggccggagcggctctttgactcgcaccggcttccgggtgactgcttcctactgctcgtgctgctgctctacgcgccagtcgggttctgcctcctcgtcctgcgcctctttctcgggatccacgtcttcctggtcagctgcgcgctgccagacagcgtccttcgcagattcgtagtgcggaccatgtgtgcggtgctagggctcgtggcccggcaggaggactccggactccgggatcacagtgtcagggtcctcatttccaaccatgtgacacctttcgaccacaacatagtcaatttgcttaccacctgtagcacccctctactcaatagtccccccagctttgtgtgctggtctcggggcttcatggagatgaatgggcggggggagttggtggagtcactcaagagattctgtgcttccacgaggcttccccccactcctctgctgctattccctgaggaagaggccaccaatggccgggaggggctcctgcgcttcagttcctggccattttctatccaagatgtggtacaacctcttaccctgcaagttcagagacccctggtctctgtgacggtgtcagatgcctcctgggtctcagaactgctgtggtcacttttcgtccctttcacggtgtatcaagtaaggtggcttcgtcctgttcatcgccaactaggggaagcgaatgaggagtttgcactccgtgtacaacaggtggtcgggtgcacagacagggtggaggcggggtccctgcttaggaggagagggaggaaagcttgagatcttgacacttccagtcttccaattctccctagctggtggccaaggaattgggccagacagggacacggctcactccagctgacaaagcagagcacatgaagcgacaaagacaccccagattgcgcccccagtcagcccagtcttctttccctccctcccctggtccttctcctgatgtgcaactggcaactctggctcagagagtcaaggaagttttgccccatgtgccattgggtgtcatccagagagacctggccaagactggctgtgtagacttgactatcactaatctgcttgagggggccgtagctttcatgcctgaagacatcaccaagggaactcagtccctacccacagcctctgcctccaagtttcccagctctggcccggtgacccctcagccaacagccctaacatttgccaagtcttcctgggcccggcaggagagcctgcaggagcgcaagcaagcactatatgaatacgcaagaaggagattcacagagagacgagcccaggaggctgactgagctcaaaggaacaggatggcacccagagccgcaggacggagactgggggcagccctcacccaactcacaacaggctggatgggtgggtggtaaaaagggaaggatgaggctcccccaatgtcacattaaattcatggttttcattcaa

SEQ ID NO: 424025 - DNA, 1798 bp, Homo sapiens
acagtaggacgcggggcacgccggtacctgaagtccttcagaagtgcacgccgggaccaggattccgggaggccgactcctccctgccccacgaatgccgggaattgtggtctccgccggacgcgagttgtgagacggcccaaggggccgcggggtatgctgggaccgctagcccttccggcgcgcctcaggacttcgggtcccctcaccccgggcggatgcccaaagactccgccttcccaagagcccctgcggccgggcgcgaaaatggcggcggcggcgacggccgggcgctcctgaagcagcagttatggagcttccctcagggccggggccggagcggctctttgactcgcaccggcttccgggtgactgcttcctactgctcgtgctgctgctctacgcgccagtcgggttctgcctcctcgtcctgcgcctctttctcgggatccacgtcttcctggtcagctgcgcgctgccagacagcgtccttcgcagattcgtagtgcggaccatgtgtgcggtgctagggctcgtggcccggcaggaggactccggactccgggatcacagtgtcagggtcctcatttccaaccatgtgacacctttcgaccacaacatagtcaatttgcttaccacctgtagcacccctctactcaatagtccccccagctttgtgtgctggtctcggggcttcatggagatgaatgggcggggggagttggtggagtcactcaagagattctgtgcttccacgaggcttccccccactcctctgctgctattccctgaggaagaggccaccaatggccgggaggggctcctgcgcttcagttcctggccattttctatccaagatgtggtacaacctcttaccctgcaagttcagagacccctggtctctgtgacggtgtcagatgcctcctgggtctcagaactgctgtggtcacttttcgtccctttcacggtgtatcaagtaaggtggcttcgtcctgttcatcgccaactaggggaagcgaatgaggagtttgcactccgtgtacaacagctggtggccaaggaattgggccagacagggacacggctcactccagctgacaaagcagagcacatgaagcgacaaagacaccccagattgcgcccccagtcagcccagtcttctttccctccctcccctggtccttctcctgatgtgcaactggcaactctggctcagagagtcaaggaagttttgccccatgtgccattgggtgtcatccagagagacctgggtatgggaaagggtggccccacactgggagatgggcacagggaggaaaagtgggttgtgaaggaagaaagtaagtagggagtggactcccttctcttttctccccagccaagactggctgtgtagacttgactatcactaatctgcttgagggggccgtagctttcatgcctgaagacatcaccaagggaactcagtccctacccacagcctctgcctccaagtttcccagctctggcccggtgacccctcagccaacagccctaacatttgccaagtcttcctgggcccggcaggagagcctgcaggagcgcaagcaagcactatatgaatacgcaagaaggagattcacagagagacgagcccaggaggctgactgagctcaaaggaacaggatggcacccagagccgcaggacggagactgggggcagccctcacccaactcacaacaggctggatgggtgggtggtaaaaagggaaggatgaggctcccccaatgtcacattaaattcatggttttcattcaa

SEQ ID NO: 424026 - DNA, 1880 bp, Homo sapiens
acagtaggacgcggggcacgccggtacctgaagtccttcagaagtgcacgccgggaccaggattccgggaggccgactcctccctgccccacgaatgccgggaattgtggtctccgccggacgcgagttgtgagacggcccaaggggccgcggggtatgctgggaccgctagcccttccggcgcgcctcaggacttcgggtcccctcaccccgggcggatgcccaaagactccgccttcccaagagcccctgcggccgggcgcgaaaatggcggcggcggcgacggccgggcgctcctgaagcagcagttatggagcttccctcagggccggggccggagcggctctttgactcgcaccggcttccgggtgactgcttcctactgctcgtgctgctgctctacgcgccagtcgggttctgcctcctcgtcctgcgcctctttctcgggatccacgtcttcctggtcagctgcgcgctgccagacagcgtccttcgcagattcgtagtgcggaccatgtgtgcggtgctagggctcgtggcccggcaggaggactccggactccgggatcacagtgtcagggtcctcatttccaaccatgtgacacctttcgaccacaacatagtcaatttgcttaccacctgtagcacccctctactcaatagtccccccagctttgtgtgctggtctcggggcttcatggagatgaatgggcggggggagttggtggagtcactcaagagattctgtgcttccacgaggcttccccccactcctctgctgctattccctgaggaagaggccaccaatggccgggaggggctcctgcgcttcagttcctggccattttctatccaagatgtggtacaacctcttaccctgcaagttcagagacccctggtctctgtgacggtgtcagatgcctcctgggtctcagaactgctgtggtcacttttcgtccctttcacggtgtatcaagtaaggtggcttcgtcctgttcatcgccaactaggggaagcgaatgaggagtttgcactccgtgtacaacagctggtggccaaggaattgggccagacagggacacggctcactccagctgacaaagcagagcacatgaagcgacaaagacaccccagattgcgcccccagtcagcccagtcttctttccctccctcccctggtccttctcctgatgtgcaactggcaactctggctcagagagtcaaggaagttttgccccatgtgccattgggtgtcatccagagagacctggccaagactggctgtgtagacttgactatcactaatctgcttgagggggccgtagctttcatgcctgaagacatcaccaagggaactcagtccctacccacagcctctgcctccaagggtgagacccaggaaatggtcagatccaagtgttggggtgagttgggggcaggctatgtactcccttatccctgacctttcttttttgatcctgagaccctagcatagtgcctctcttgcaaagtaggcattcgatgcgtgtttaatgatgatgactccgcaagccctctgacattgtgatcacctcagtttcccagctctggcccggtgacccctcagccaacagccctaacatttgccaagtcttcctgggcccggcaggagagcctgcaggagcgcaagcaagcactatatgaatacgcaagaaggagattcacagagagacgagcccaggaggctgactgagctcaaaggaacaggatggcacccagagccgcaggacggagactgggggcagccctcacccaactcacaacaggctggatgggtgggtggtaaaaagggaaggatgaggctcccccaatgtcacattaaattcatggttttcattcaa

SEQ ID NO: 424027 - DNA, 1932 bp, Homo sapiens
acagtaggacgcggggcacgccggtacctgaagtccttcagaagtgcacgccgggaccaggattccgggaggccgactcctccctgccccacgaatgccgggaattgtggtctccgccggacgcgagttgtgagacggcccaaggggccgcggggtatgctgggaccgctagcccttccggcgcgcctcaggacttcgggtcccctcaccccgggcggatgcccaaagactccgccttcccaagagcccctgcggccgggcgcgaaaatggcggcggcggcgacggccgggcgctcctgaagcagcagttatggagcttccctcagggccggggccggagcggctctttgactcgcaccggcttccgggtgactgcttcctactgctcgtgctgctgctctacgcgccagtcgggttctgcctcctcgtcctgcgcctctttctcgggatccacgtcttcctggtcagctgcgcgctgccagacagcgtccttcgcagattcgtagtgcggaccatgtgtgcggtgctagggctcgtggcccggcaggaggactccggactccgggatcacagtgtcagggtcctcatttccaaccatgtgacacctttcgaccacaacatagtcaatttgcttaccacctgtagcacccctctactcaatagtccccccagctttgtgtgctggtctcggggcttcatggagatgaatgggcggggggagttggtggagtcactcaagagattctgtgcttccacgaggcttccccccactcctctgctgctattccctgaggaagaggccaccaatggccgggaggggctcctgcgcttcagttcctggccattttctatccaagatgtggtacaacctcttaccctgcaagttcagagacccctggtctctgtgacggtgtcagatgcctcctgggtctcagaactgctgtggtcacttttcgtccctttcacggtgtatcaagtaaggtattaactgtcctcacattttggtcgctggggagaggctcacctcaaggtcaaggaattagtggcctctgccctgtccatttgtagatctttatatcaaggttctaccacagaggcaacacaaagtatttacagtatttactattttcccacccaccatgcaaagaggtaccaaagtggggaatggtgacagcctctaccctgggtgcccacaacatagccctggattgtttctttgcaggtggcttcgtcctgttcatcgccaactaggggaagcgaatgaggagtttgcactccgtgtacaacagctggtggccaaggaattgggccagacagggacacggctcactccagctgacaaagcagagcacatgaagcgacaaagacaccccagattgcgcccccagtcagcccagtcttctttccctccctcccctggtccttctcctgatgtgcaactggcaactctggctcagagagtcaaggaagttttgccccatgtgccattgggtgtcatccagagagacctggccaagactggctgtgtagacttgactatcactaatctgcttgagggggccgtagctttcatgcctgaagacatcaccaagggaactcagtccctacccacagcctctgcctccaagtttcccagctctggcccggtgacccctcagccaacagccctaacatttgccaagtcttcctgggcccggcaggagagcctgcaggagcgcaagcaagcactatatgaatacgcaagaaggagattcacagagagacgagcccaggaggctgactgagctcaaaggaacaggatggcacccagagccgcaggacggagactgggggcagccctcacccaactcacaacaggctggatgggtgggtggtaaaaagggaaggatgaggctcccccaatgtcacattaaattcatggttttcattcaa

SEQ ID NO: 424028 - DNA, 1631 bp, Homo sapiens
acagtaggacgcggggcacgccggtacctgaagtccttcagaagtgcacgccgggaccaggattccgggaggccgactcctccctgccccacgaatgccgggaattgtggtctccgccggacgcgagttgtgagacggcccaaggggccgcggggtatgctgggaccgctagcccttccggcgcgcctcaggacttcgggtcccctcaccccgggcggatgcccaaagactccgccttcccaagagcccctgcggccgggcgcgaaaatggcggcggcggcgacggccgggcgctcctgaagcagcagttatggagcttccctcagggccggggccggagcggctctttgactcgcaccggcttccgggtgactgcttcctactgctcgtgctgctgctctacgcgccagtcgggttctgcctcctcgtcctgcgcctctttctcgggatccacgtcttcctggtcagctgcgcgctgccagacagcgtccttcgcagattcgtagtgcggaccatgtgtgcggtgctagggctcgtggcccggcaggaggactccggactccgggatcacagtgtcagggtcctcatttccaaccatgtgacacctttcgaccacaacatagtcaatttgcttaccacctgtagcacccctctactcaatagtccccccagctttgtgtgctggtctcggggcttcatggagatgaatgggcggggggagttggtggagtcactcaagagattctgtgcttccacgaggcttccccccactcctctgctgctattccctgaggaagaggccaccaatggccgggaggggctcctgcgcttcagttcctggccattttctatccaagatgtggtacaacctcttaccctgcaagttcagagacccctggtctctgtgacggtgtcagatgcctcctgggtctcagaactgctgtggtcacttttcgtccctttcacggtgtatcaagtaaggtggcttcgtcctgttcatcgccaactaggggaagcgaatgaggagtttgcactccgtgtacaacagctggtggccaaggaattgggccagacagggacacggctcactccagctgacaaagcagagcacatgaagcgacaaagacaccccagattgcgcccccagtcagcccagtcttctttccctccctcccctggtccttctcctgatgtgcaactggcaactctggctcagagagtcaaggaagttttgccccatgtgccattgggtgtcatccagagagacctggccaagactggctgtgtagacttgactatcactaatctgcttgagggggccgtagctttcatgcctgaagacatcaccaagggaactcagtccctacccacagcctctgcctccaagtgggcccggcaggagagcctgcaggagcgcaagcaagcactatatgaatacgcaagaaggagattcacagagagacgagcccaggaggctgactgagctcaaaggaacaggatggcacccagagccgcaggacggagactgggggcagccctcacccaactcacaacaggctggatgggtgggtggtaaaaagggaaggatgaggctcccccaatgtcacattaaattcatggttttcattcaa

SEQ ID NO: 424029 - DNA, 2149 bp, Homo sapiens
acagtaggacgcggggcacgccggtacctgaagtccttcagaagtgcacgccgggaccaggattccgggaggccgactcctccctgccccacgaatgccgggaattgtggtctccgccggacgcgagttgtgagacggcccaaggggccgcggggtatgctgggaccgctagcccttccggcgcgcctcaggacttcgggtcccctcaccccgggcggatgcccaaagactccgccttcccaagagcccctgcggccgggcgcgaaaatggcggcggcggcgacggccgggcgctcctgaagcagcagttatggagcttccctcagggccggggccggagcggctctttgactcgcaccggcttccgggtgactgcttcctactgctcgtgctgctgctctacgcgccagtcgggttctgcctcctcgtcctgcgcctctttctcgggatccacgtcttcctggtcagctgcgcgctgccagacagcgtccttcgcagattcgtagtgcggaccatgtgtgcggtgctagggctcgtggcccggcaggaggactccggactccgggatcacagtgtcagggtcctcatttccaaccatgtgacacctttcgaccacaacatagtcaatttgcttaccacctgtagcaccgtgagtgagagcgaggccgagagcgccacggggcggttccctggggcccagctgaaggcccccctgtccccactcgcgttccgcatggaggatactgagccttacccctaaccccgatcctctacccaacatgtcagtttttttttttcattttcctcaatatttttcttcttgctttctcttctcctggttcccagcctctactcaatagtccccccagctttgtgtgctggtctcggggcttcatggagatgaatgggcggggggagttggtggagtcactcaagagattctgtgcttccacgaggcttccccccactcctctgctgctattccctgaggaagaggccaccaatggccgggaggggctcctgcgcttcaggtgggtttagcacaggtatggggcgccagctgggtaggtggtcaagcttgtgggcccttgagtttttacaactttcttcggcccttagaccccatcatctccagttcatttcctttctgtccactttaagttctttctcctgaatcccttcattcttcaattatgtgcttgtagagtttgacagttgcctgttataaggcaggtgtgagctgctgactaggctggctggattcccatcctactttctccttcctcttctagttcctggccattttctatccaagatgtggtacaacctcttaccctgcaagttcagagacccctggtctctgtgacggtgtcagatgcctcctgggtctcagaactgctgtggtcacttttcgtccctttcacggtgtatcaagtaaggtggcttcgtcctgttcatcgccaactaggggaagcgaatgaggagtttgcactccgtgtacaacagctggtggccaaggaattgggccagacagggacacggctcactccagctgacaaagcagagcacatgaagcgacaaagacaccccagattgcgcccccagtcagcccagtcttctttccctccctcccctggtccttctcctgatgtgcaactggcaactctggctcagagagtcaaggaagttttgccccatgtgccattgggtgtcatccagagagacctggccaagactggctgtgtagacttgactatcactaatctgcttgagggggccgtagctttcatgcctgaagacatcaccaagggaactcagtccctacccacagcctctgcctccaagtttcccagctctggcccggtgacccctcagccaacagccctaacatttgccaagtcttcctgggcccggcaggagagcctgcaggagcgcaagcaagcactatatgaatacgcaagaaggagattcacagagagacgagcccaggaggctgactgagctcaaaggaacaggatggcacccagagccgcaggacggagactgggggcagccctcacccaactcacaacaggctggatgggtgggtggtaaaaagggaaggatgaggctcccccaatgtcacattaaattcatggttttcattcaa

SEQ ID NO: 424030 - DNA, 2033 bp, Homo sapiens
acagtaggacgcggggcacgccggtacctgaagtccttcagaagtgcacgccgggaccaggattccgggaggccgactcctccctgccccacgaatgccgggaattgtggtctccgccggacgcgagttgtgagacggcccaaggggccgcggggtatgctgggaccgctagcccttccggcgcgcctcaggacttcgggtcccctcaccccgggcggatgcccaaagactccgccttcccaagagcccctgcggccgggcgcgaaaatggcggcggcggcgacggccgggcgctcctgaagcagcagttatggagcttccctcagggccggggccggagcggctctttgactcgcaccggcttccgggtgactgcttcctactgctcgtgctgctgctctacgcgccagtcgggttctgcctcctcgtcctgcgcctctttctcgggatccacgtcttcctggtcagctgcgcgctgccagacagcgtccttcgcagattcgtagtgcggaccatgtgtgcggtgctagggctcgtggcccggcaggaggactccggactccgggatcacagtgtcagggtcctcatttccaaccatgtgacacctttcgaccacaacatagtcaatttgcttaccacctgtagcacccctctactcaatagtccccccagctttgtgtgctggtctcggggcttcatggagatgaatgggcggggggagttggtggagtcactcaagagattctgtgcttccacgaggcttccccccactcctctgctgctattccctgaggaagaggccaccaatggccgggaggggctcctgcgcttcagttcctggccattttctatccaagatgtggtacaacctcttaccctgcaagttcagagacccctggtctctgtgacggtgtcagatgcctcctgggtctcagaactgctgtggtcacttttcgtccctttcacggtgtatcaagtaaggtattaactgtcctcacattttggtcgctggggagaggctcacctcaaggtcaaggaattagtggcctctgccctgtccatttgtagatctttatatcaaggttctaccacagaggcaacacaaagtatttacagtatttactattttcccacccaccatgcaaagaggtaccaaagtggggaatggtgacagcctctaccctgggtgcccacaacatagccctggattgtttctttgcaggtggcttcgtcctgttcatcgccaactaggggaagcgaatgaggagtttgcactccgtgtacaacaggtggtcgggtgcacagacagggtggaggcggggtccctgcttaggaggagagggaggaaagcttgagatcttgacacttccagtcttccaattctccctagctggtggccaaggaattgggccagacagggacacggctcactccagctgacaaagcagagcacatgaagcgacaaagacaccccagattgcgcccccagtcagcccagtcttctttccctccctcccctggtccttctcctgatgtgcaactggcaactctggctcagagagtcaaggaagttttgccccatgtgccattgggtgtcatccagagagacctggccaagactggctgtgtagacttgactatcactaatctgcttgagggggccgtagctttcatgcctgaagacatcaccaagggaactcagtccctacccacagcctctgcctccaagtttcccagctctggcccggtgacccctcagccaacagccctaacatttgccaagtcttcctgggcccggcaggagagcctgcaggagcgcaagcaagcactatatgaatacgcaagaaggagattcacagagagacgagcccaggaggctgactgagctcaaaggaacaggatggcacccagagccgcaggacggagactgggggcagccctcacccaactcacaacaggctggatgggtgggtggtaaaaagggaaggatgaggctcccccaatgtcacattaaattcatggttttcattcaa

SEQ ID NO: 424031 - DNA, 1987 bp, Homo sapiens
acagtaggacgcggggcacgccggtacctgaagtccttcagaagtgcacgccgggaccaggattccgggaggccgactcctccctgccccacgaatgccgggaattgtggtctccgccggacgcgagttgtgagacggcccaaggggccgcggggtatgctgggaccgctagcccttccggcgcgcctcaggacttcgggtcccctcaccccgggcggatgcccaaagactccgccttcccaagagcccctgcggccgggcgcgaaaatggcggcggcggcgacggccgggcgctcctgaagcagcagttatggagcttccctcagggccggggccggagcggctctttgactcgcaccggcttccgggtgactgcttcctactgctcgtgctgctgctctacgcgccagtcgggttctgcctcctcgtcctgcgcctctttctcgggatccacgtcttcctggtcagctgcgcgctgccagacagcgtccttcgcagattcgtagtgcggaccatgtgtgcggtgctagggctcgtggcccggcaggaggactccggactccgggatcacagtgtcagggtcctcatttccaaccatgtgacacctttcgaccacaacatagtcaatttgcttaccacctgtagcacccctctactcaatagtccccccagctttgtgtgctggtctcggggcttcatggagatgaatgggcggggggagttggtggagtcactcaagagattctgtgcttccacgaggcttccccccactcctctgctgctattccctgaggaagaggccaccaatggccgggaggggctcctgcgcttcagttcctggccattttctatccaagatgtggtacaacctcttaccctgcaagttcagagacccctggtctctgtgacggtgtcagatgcctcctgggtctcagaactgctgtggtcacttttcgtccctttcacggtgtatcaagtaaggtggcttcgtcctgttcatcgccaactaggggaagcgaatgaggagtttgcactccgtgtacaacagctggtggccaaggaattgggccagacagggacacggctcactccagctgacaaagcagagcacatgaagcgacaaagacaccccagattgcgcccccagtcagcccagtcttctttccctccctcccctggtccttctcctgatgtgcaactggcaactctggctcagagagtcaaggaagttttgccccatgtgccattgggtgtcatccagagagacctgggtatgggaaagggtggccccacactgggagatgggcacagggaggaaaagtgggttgtgaaggaagaaagtaagtagggagtggactcccttctcttttctccccagccaagactggctgtgtagacttgactatcactaatctgcttgagggggccgtagctttcatgcctgaagacatcaccaagggaactcagtccctacccacagcctctgcctccaagggtgagacccaggaaatggtcagatccaagtgttggggtgagttgggggcaggctatgtactcccttatccctgacctttcttttttgatcctgagaccctagcatagtgcctctcttgcaaagtaggcattcgatgcgtgtttaatgatgatgactccgcaagccctctgacattgtgatcacctcagtttcccagctctggcccggtgacccctcagccaacagccctaacatttgccaagtcttcctgggcccggcaggagagcctgcaggagcgcaagcaagcactatatgaatacgcaagaaggagattcacagagagacgagcccaggaggctgactgagctcaaaggaacaggatggcacccagagccgcaggacggagactgggggcagccctcacccaactcacaacaggctggatgggtgggtggtaaaaagggaaggatgaggctcccccaatgtcacattaaattcatggttttcattcaa

SEQ ID NO: 424032 - DNA, 1506 bp, Homo sapiens
acagtaggacgcggggcacgccggtacctgaagtccttcagaagtgcacgccgggaccaggattccgggaggccgactcctccctgccccacgaatgccgggaattgtggtctccgccggacgcgagttgtgagacggcccaaggggccgcggggtatgctgggaccgctagcccttccggcgcgcctcaggacttcgggtcccctcaccccgggcggatgcccaaagactccgccttcccaagagcccctgcggccgggcgcgaaaatggcggcggcggcgacggccgggcgctcctgaagcagcagttatggagcttccctcagggccggggccggagcggctctttgactcgcaccggcttccgggtgactgcttcctactgctcgtgctgctgctctacgcgccagtcgggttctgcctcctcgtcctgcgcctctttctcgggatccacgtcttcctggtcagctgcgcgctgccagacagcgtccttcgcagattcgtagtgcggaccatgtgtgcggtgctagggctcgtggcccggcaggaggactccggactccgggatcacagtgtcagggtcctcatttccaaccatgtgacacctttcgaccacaacatagtcaatttgcttaccacctgtagcaccttcctggccattttctatccaagatgtggtacaacctcttaccctgcaagttcagagacccctggtctctgtgacggtgtcagatgcctcctgggtctcagaactgctgtggtcacttttcgtccctttcacggtgtatcaagtaaggtggcttcgtcctgttcatcgccaactaggggaagcgaatgaggagtttgcactccgtgtacaacagctggtggccaaggaattgggccagacagggacacggctcactccagctgacaaagcagagcacatgaagcgacaaagacaccccagattgcgcccccagtcagcccagtcttctttccctccctcccctggtccttctcctgatgtgcaactggcaactctggctcagagagtcaaggaagttttgccccatgtgccattgggtgtcatccagagagacctggccaagactggctgtgtagacttgactatcactaatctgcttgagggggccgtagctttcatgcctgaagacatcaccaagggaactcagtccctacccacagcctctgcctccaagtttcccagctctggcccggtgacccctcagccaacagccctaacatttgccaagtcttcctgggcccggcaggagagcctgcaggagcgcaagcaagcactatatgaatacgcaagaaggagattcacagagagacgagcccaggaggctgactgagctcaaaggaacaggatggcacccagagccgcaggacggagactgggggcagccctcacccaactcacaacaggctggatgggtgggtggtaaaaagggaaggatgaggctcccccaatgtcacattaaattcatggttttcattcaa

SEQ ID NO: 424033 - DNA, 1342 bp, Homo sapiens
acagtaggacgcggggcacgccggtacctgaagtccttcagaagtgcacgccgggaccaggattccgggaggccgactcctccctgccccacgaatgccgggaattgtggtctccgccggacgcgagttgtgagacggcccaaggggccgcggggtatgctgggaccgctagcccttccggcgcgcctcaggacttcgggtcccctcaccccgggcggatgcccaaagactccgccttcccaagagcccctgcggccgggcgcgaaaatggcggcggcggcgacggccgggcgctcctgaagcagcagttatggagcttccctcagggccggggccggagcggctctttgactcgcaccggcttccgggtgactgcttcctactgctcgtgctgctgctctacgcgccagtcgggttctgcctcctcgtcctgcgcctctttctcgggatccacgtcttcctggtcagctgcgcgctgccagacagcgtccttcgcagattcgtagtgcggaccatgtgtgcggtgctagggctcgtggcccggcaggaggactccggactccgggatcacagtgtcagggtcctcatttccaaccatgtgacacctttcgaccacaacatagtcaatttgcttaccacctgtagcacccctctactcaatagtccccccagctttgtgtgctggtctcggggcttcatggagatgaatgggcggggggagttggtggagtcactcaagagattctgtgcttccacgaggcttccccccactcctctgctgctattccctgaggaagaggccaccaatggccgggaggggctcctgcgcttcagttcctggccattttctatccaagatgtggtacaacctcttaccctgcaagttcagagacccctggtctctgtgacggtgtcagatgcctcctgggtctcagaactgctgtggtcacttttcgtccctttcacggtgtatcaagtaaggtggcttcgtcctgttcatcgccaactaggggaagcgaatgaggagtttgcactccgtgtacaacagctggtggccaaggaattgggccagacagggacacggctcactccagctgacaaagcagagcacatgaagcgacaaagacaccccagattgcgcccccagtcagcccagtcttctttccctccctcccctggtccttctcctgatgtgcaactggcaactctggctcagagagagccgcaggacggagactgggggcagccctcacccaactcacaacaggctggatgggtgggtggtaaaaagggaaggatgaggctcccccaatgtcacattaaattcatggttttcattcaa

SEQ ID NO: 424034 - DNA, 695 bp, Homo sapiens
ctctagagtatcccacgcttgtcgctttcgagttgcactccgtgtacaacagctggtggccaaggaattgggccagacagggacacggctcactccagctgacaaagcagagcacatgaagcgacaaagacaccccagattgcgcccccagtcagcccagtcttctttccctccctcccctggtccttctcctgatgtgcaactggcaactctggctcagagagtcaaggaagttttgccccatgtgccattgggtgtcatccagagagacctggccaagactggctgtgtagacttgactatcactaatctgcttgagggggccgtagctttcatgcctgaagacatcaccaagggaactcagtccctacccacagcctctgcctccaagtttcccagctctggcccggtgacccctcagccaacagccctaacatttgccaagtcttcctgggcccggcaggagagcctgcaggagcgcaagcaagcactatatgaatacgcaagaaggagattcacagagagacgagcccaggaggctgactgagctcaaaggaacaggatggcacccagagccgcaggacggagactgggggcagccctcacccaactcacaacaggctggatgggtgggtggtaaaaagggaaggatgaggctcccccaatgtcacattaaattcatggttttcattcaa

SEQ ID NO: 424035 - DNA, 1745 bp, Homo sapiens
acagtaggacgcggggcacgccggtacctgaagtccttcagaagtgcacgccgggaccaggattccgggaggccgactcctccctgccccacgaatgccgggaattgtggtctccgccggacgcgagttgtgagacggcccaaggggccgcggggtatgctgggaccgctagcccttccggcgcgcctcaggacttcgggtcccctcaccccgggcggatgcccaaagactccgccttcccaagagcccctgcggccgggcgcgaaaatggcggcggcggcgacggccgggcgctcctgaagcagcagttatggagcttccctcagggccggggccggagcggctctttgactcgcaccggcttccgggtgactgcttcctactgctcgtgctgctgctctacgcgccagtcgggttctgcctcctcgtcctgcgcctctttctcgggatccacgtcttcctggtcagctgcgcgctgccagacagcgtccttcgcagattcgtagtgcggaccatgtgtgcggtgctagggctcgtggcccggcaggaggactccggactccgggatcacagtgtcagggtcctcatttccaaccatgtgacacctttcgaccacaacatagtcaatttgcttaccacctgtagcacccctctactcaatagtccccccagctttgtgtgctggtctcggggcttcatggagatgaatgggcggggggagttggtggagtcactcaagagattctgtgcttccacgaggcttccccccactcctctgctgctattccctgaggaagaggccaccaatggccgggaggggctcctgcgcttcaggtgggtttagcacaggtatggggcgccagctgggtaggtggtcaagcttgtgggcccttgagtttttacaactttcttcggcccttagaccccatcatctccagttcatttcctttctgtccactttaagttctttctcctgaatcccttcattcttcaattatgtgcttgtagagtttgacagttgcctgttataaggcaggtgtgagctgctgactaggctggctggattcccatcctactttctccttcctcttctagttcctggccattttctatccaagatgtggtacaacctcttaccctgcaagttcagagacccctggtctctgtgacggtgtcagatgcctcctgggtctcagaactgctgtggtcacttttcgtccctttcacggtgtatcaagtaaggtggcttcgtcctgttcatcgccaactaggggaagcgaatgaggagtttgcactccgtgtacaacagctggtggccaaggaattgggccagacagggacacggctcactccagctgacaaagcagagcacatgaagcgacaaagacaccccagattgcgcccccagtcagcccagtcttctttccctccctcccctggtccttctcctgatgtgcaactggcaactctggctcagagagtcaaggaagttttgccccatgtgccattgggtgtcatccagagagacctggccaagactggctgtgtagacttgactatcactaatctgcttgagggggccgtagctttcatgcctgaagacatcaccaagggaactcagtccctacccacagcctctgcctccaagtttcccagttgtggctcggggaccccttagccaacagccttaacatttcgcgtcttcttggcccggcatgtcttccaggcgtctgctggcttttttc

SEQ ID NO: 424036 - DNA, 583 bp, Homo sapiens
tgtctagggagggagggaaagaagcactgggctgactgggggcgcaatctggggtgtctttgtcgcttcatgtgctctgcttgtcatccagagagacctggccaagactggctgtgtagacttgactatcactaatctgcttgagggggccgtagctttcatgcctgaagacatcaccaagggaactcagtccctacccacagcctctgcctccaaggcattcgatgcgtgtttaatgatgatgactccgcaagccctctgacattgtgatcacctcagtttcccagctctggcccggtgacccctcagccaacagccctaacatttgccaagtcttcctgggcccggcaggagagcctgcaggagcgcaagcaagcactatatgaatacgcaagaaggagattcacagagagacgagcccaggaggctgactgagctcaaaggaacaggatggcacccagagccgcaggacggagactgggggcagccctcacccaactcacaacaggctggatgggtgggtggtaaaaagggaaggatgaggctcccccaatgtcacattaaattcatggttttcattcaa

SEQ ID NO: 424037 - DNA, 370 bp, Homo sapiens
ccctaacatttgccaagtcttcctgggcccggcaggagagcctgcaggagcgcaagcaagcactatatgaatacgcaagaaggtgagggggttagaggacaattaataggatgtggcaaattggagaatggaattatggagctactacggcaaagcctgaataatatctctccctatgtcccacaggagattcacagagagacgagcccaggaggctgactgagctcaaaggaacaggatggcacccagagccgcaggacggagactgggggcagccctcacccaactcacaacaggctggatgggtgggtggtaaaaagggaaggatgaggctcccccaatgtcacattaaattcatggttttcattca

SEQ ID NO: 424038 - DNA, 346 bp, Homo sapiens
aggggaaatttcccatccctggccctggcttaggcctcatctcatgccctcccctcagacggtgtcagatgcctcctgggtctcagaactgctgtggtcacttttcgtccctttcacggtgtatcaagtaaggtattaactgtcctcacattttggtcgctggggagaggctcacctcaaggtcaaggaattagtggcctctgccctgtccatttgtagatctttatatcaaggttctaccacagaggcaacacaaagtatttacagtatttactattttcccacccaccatgcaaagaggtaccaaagtggggaatggtgacagcctctaccctgggtgcccaca

SEQ ID NO: 424039 - DNA, 1691 bp, Homo sapiens
acagtaggacgcggggcacgccggtacctgaagtccttcagaagtgcacgccgggaccaggattccgggaggccgactcctccctgccccacgaatgccgggaattgtggtctccgccggacgcgagttgtgagacggcccaaggggccgcggggtatgctgggaccgctagcccttccggcgcgcctcaggacttcgggtcccctcaccccgggcggatgcccaaagactccgccttcccaagagcccctgcggccgggcgcgaaaatggcggcggcggcgacggccgggcgctcctgaagcagcagttatggagcttccctcagggccggggccggagcggctctttgactcgcaccggcttccgggtgactgcttcctactgctcgtgctgctgctctacgcgccagtcgggttctgcctcctcgtcctgcgcctctttctcgggatccacgtcttcctggtcagctgcgcgctgccagacagcgtccttcgcagattcgtagtgcggaccatgtgtgcggtgctagggctcgtggcccggcaggaggactccggactccgggatcacagtgtcagggtcctcatttccaaccatgtgacacctttcgaccacaacatagtcaatttgcttaccacctgtagcacccctctactcaatagtccccccagctttgtgtgctggtctcggggcttcatggagatgaatgggcggggggagttggtggagtcactcaagagattctgtgcttccacgaggcttccccccactcctctgctgctattccctgaggaagaggccaccaatggccgggaggggctcctgcgcttcagttcctggccattttctatccaagatgtggtacaacctcttaccctgcaagttcagagacccctggtctctgtgacggtgtcagatgcctcctgggtctcagaactgctgtggtcacttttcgtccctttcacggtgtatcaagtaaggtggcttcgtcctgttcatcgccaactaggggaagcgaatgaggagtttgcactccgtgtacaacagctggtggccaaggaattgggccagacagggacacggctcactccagctgacaaagcagagcacatgaagcgacaaagacaccccagattgcgcccccagtcagcccagtcttctttccctccctcccctggtccttctcctgatgtgcaactggcaactctggctcagagagtcaaggaagttttgccccatgtgccattgggtgtcatccagagagacctggccaagactggctgtgtagacttgactatcactaatctgcttgagggggccgtagctttcatgcctgaagacatcaccaagggaactcagtccctacccacagcctctgcctccaagtttcccagctctggcccggtgacccctcagccaacagccctaacatttgccaagtcttcctgggcccggcaggagagcctgcaggagcgcaagcaagcactatatgaatacgcaagaaggagattcacagagagacgagcccaggaggctgactgagctcaaaggaacaggatggcacccagagccgcaggacggagactgggggcagccctcacccaactcacaacaggctggatgggtgggtggtaaaaagggaaggatgaggctcccccaatgtcacattaaattcatggttttcattcaa

SEQ ID NO: 424040 - DNA, 2158 bp, Homo sapiens
acagtaggacgcggggcacgccggtacctgaagtccttcagaagtgcacgccgggaccaggattccgggaggccgactcctccctgccccacgaatgccgggaattgtggtctccgccggacgcgagttgtgagacggcccaaggggccgcggggtatgctgggaccgctagcccttccggcgcgcctcaggacttcgggtcccctcaccccgggcggatgcccaaagactccgccttcccaagagcccctgcggccgggcgcgaaaatggcggcggcggcgacggccgggcgctcctgaagcagcagttatggagcttccctcagggccggggccggagcggctctttgactcgcaccggcttccgggtgactgcttcctactgctcgtgctgctgctctacgcgccagtcgggttctgcctcctcgtcctgcgcctctttctcgggatccacgtcttcctggtcagctgcgcgctgccagacagcgtccttcgcagattcgtagtgcggaccatgtgtgcggtgctagggctcgtggcccggcaggaggactccggactccgggatcacagtgtcagggtcctcatttccaaccatgtgacacctttcgaccacaacatagtcaatttgcttaccacctgtagcacccctctactcaatagtccccccagctttgtgtgctggtctcggggcttcatggagatgaatgggcggggggagttggtggagtcactcaagagattctgtgcttccacgaggcttccccccactcctctgctgctattccctgaggaagaggccaccaatggccgggaggggctcctgcgcttcagttcctggccattttctatccaagatgtggtacaacctcttaccctgcaagttcagagacccctggtctctgtgacggtgtcagatgcctcctgggtctcagaactgctgtggtcacttttcgtccctttcacggtgtatcaagtaaggtggcttcgtcctgttcatcgccaactaggggaagcgaatgaggagtttgcactccgtgtacaacagctggtggccaaggaattgggccagacagggacacggctcactccagctgacaaagcagagcacatgaagcgacaaagacaccccagattgcgcccccagtcagcccagtcttctttccctccctcccctggtccttctcctgatgtgcaactggcaactctggctcagagagtcaaggaagttttgccccatgtgccattgggtgtcatccagagagacctggccaagactggctgtgtagacttgactatcactaatctgcttgagggggccgtagctttcatgcctgaagacatcaccaagggaactcagtccctacccacagcctctgcctccaagtttcccagctctggcccggtgacccctcagccaacagccctaacatttgccaagtcttcctgggcccggcaggagagcctgcaggagcgcaagcaagcactatatgaatacgcaagaaggagattcacagagagacgagcccaggaggctgactgagctcaaaggaacaggatggcacccagagccgcaggacggagactgggggcagccctcacccaactcacaacaggctggatgggtgggtggtaaaaagggaaggatgaggctcccccaatgtcacattaaattcatggttttcattcaaaaaaaaacacccaataccacaacaccacaaaaggggcgcggggccataaagaagatcaccccctcgggggcggcccccgacttaaagcgggcgccccagctttgtgcccaacgagggggccccaagaggaagaccgcaataatcagatatagctaacgtagccgatgtgttaataaccacgcgtgctgcgcacgggtggacacacttgcgtcactcgacgggcgaccccctgggcgacaagcgagcaccccattactcttgtggggtggggggacaatcaggtgcgggccaccctataaccccctacgcagatactatttaagccgcgtccgtaaccgcataattataaacagctacgctggctgatactaaggtggtgccacctcaagctgtaatatgcctactctgtccgtcattacagctattctgcatcacggacgacgactatatgcaaactactcatcagg

SEQ ID NO: 424041 - DNA, 1540 bp, Homo sapiens
acagtaggacgcggggcacgccggtacctgaagtccttcagaagtgcacgccgggaccaggattccgggaggccgactcctccctgccccacgaatgccgggaattgtggtctccgccggacgcgagttgtgagacggcccaaggggccgcggggtatgctgggaccgctagcccttccggcgcgcctcaggacttcgggtcccctcaccccgggcggatgcccaaagactccgccttcccaagagcccctgcggccgggcgcgaaaatggcggcggcggcgacggccgggcgctcctgaagcagcagttatggagcttccctcagggccggggccggagcggctctttgactcgcaccggcttccgggtgactgcttcctactgctcgtgctgctgctctacgcgccagtcgggttctgcctcctcgtcctgcgcctctttctcgggatccacgtcttcctggtcagctgcgcgctgccagacagcgtccttcgcagcctctactcaatagtccccccagctttgtgtgctggtctcggggcttcatggagatgaatgggcggggggagttggtggagtcactcaagagattctgtgcttccacgaggcttccccccactcctctgctgctattccctgaggaagaggccaccaatggccgggaggggctcctgcgcttcagttcctggccattttctatccaagatgtggtacaacctcttaccctgcaagttcagagacccctggtctctgtgacggtgtcagatgcctcctgggtctcagaactgctgtggtcacttttcgtccctttcacggtgtatcaagtaaggtggcttcgtcctgttcatcgccaactaggggaagcgaatgaggagtttgcactccgtgtacaacagctggtggccaaggaattgggccagacagggacacggctcactccagctgacaaagcagagcacatgaagcgacaaagacaccccagattgcgcccccagtcagcccagtcttctttccctccctcccctggtccttctcctgatgtgcaactggcaactctggctcagagagtcaaggaagttttgccccatgtgccattgggtgtcatccagagagacctggccaagactggctgtgtagacttgactatcactaatctgcttgagggggccgtagctttcatgcctgaagacatcaccaagggaactcagtccctacccacagcctctgcctccaagtttcccagctctggcccggtgacccctcagccaacagccctaacatttgccaagtcttcctgggcccggcaggagagcctgcaggagcgcaagcaagcactatatgaatacgcaagaaggagattcacagagagacgagcccaggaggctgactgagctcaaaggaacaggatggcacccagagccgcaggacggagactgggggcagccctcacccaactcacaacaggctggatgggtgggtggtaaaaagggaaggatgaggctcccccaatgtcacattaaattcatggttttcattcaa

SEQ ID NO: 424042 - DNA, 1624 bp, Homo sapiens
  misc_feature (1536)..(1536): n is a, c, g, or t
  misc_feature (1539)..(1539): n is a, c, g, or t
  misc_feature (1546)..(1546): n is a, c, g, or t
  misc_feature (1557)..(1557): n is a, c, g, or t
  misc_feature (1560)..(1560): n is a, c, g, or t
  misc_feature (1562)..(1562): n is a, c, g, or t
  misc_feature (1566)..(1566): n is a, c, g, or t
  misc_feature (1574)..(1575): n is a, c, g, or t
  misc_feature (1586)..(1586): n is a, c, g, or t
acagtaggacgcggggcacgccggtacctgaagtccttcagaagtgcacgccgggaccaggattccgggaggccgactcctccctgccccacgaatgccgggaattgtggtctccgccggacgcgagttgtgagacggcccaaggggccgcggggtatgctgggaccgctagcccttccggcgcgcctcaggacttcgggtcccctcaccccgggcggatgcccaaagactccgccttcccaagagcccctgcggccgggcgcgaaaatggcggcggcggcgacggccgggcgctcctgaagcagcagttatggagcttccctcagggccggggccggagcggctctttgactcgcaccggcttccgggtgactgcttcctactgctcgtgctgctgctctacgcgccagtcgggttctgcctcctcgtcctgcgcctctttctcgggatccacgtcttcctggtcagctgcgcgctgccagacagcgtccttcgcagattcgtagtgcggaccatgtgtgcggtgctagggctcgtggcccggcaggaggactccggactccgggatcacagtgtcagggtcctcatttccaaccatgtgacacctttcgaccacaacatagtcaatttgcttaccacctgtagcacccctctactcaatagtccccccagctttgtgtgctggtctcggggcttcatggagatgaatgggcggggggagttggtggagtcactcaagagattctgtgcttccacgaggcttccccccactcctctgctgctattccctgaggaagaggccaccaatggccgggaggggctcctgcgcttcagttcctggccattttctatccaagatgtggtacaacctcttaccctgcaagttcagagacccctggtctctgtgacggtgtcagatgcctcctgggtctcagaactgctgtggtcacttttcgtccctttcacggtgtatcaagtaaggtggcttcgtcctgttcatcgccaactaggggaagcgaatgaggagtttgcactccgtgtacaacagctggtggccaaggaattgggccagacagggacacggctcactccagctgacaaagcagagcacatgaagcgacaaagacaccccagattgcgcccccagtcagcccagtcttctttccctccctcccctggtccttctcctgatgtgcaactggcaactctggctcagagagtcaaggaagttttgccccatgtgccattgggtgtcatccagagagacctggccaagactggctgtgtagacttgactatcactaatctgcttgagggggccgtagctttcatgcctgaagacatcaccaagggaactcagtccctacccacagcctctgcctccaagtttcccagctctggcccggtgacccctcagccaacagccctaacatttgccaagtcttcctgggcccggcaggagagcctgcaggagcgcaagcaagcactatatgaatacgcaagaagggatccagagagacagcccagagtgatgantcnaggacgntgcccagacgngangnaatnggggctcnnatcacaagtgntgggggggaagggggtgggtcccgtcttattttggttc

SEQ ID NO: 424043 - DNA, 1784 bp, Homo sapiens
acagtaggacgcggggcacgccggtacctgaagtccttcagaagtgcacgccgggaccaggattccgggaggccgactcctccctgccccacgaatgccgggaattgtggtctccgccggacgcgagttgtgagacggcccaaggggccgcggggtatgctgggaccgctagcccttccggcgcgcctcaggacttcgggtcccctcaccccgggcggatgcccaaagactccgccttcccaagagcccctgcggccgggcgcgaaaatggcggcggcggcgacggccgggcgctcctgaagcagcagttatggagcttccctcagggccggggccggagcggctctttgactcgcaccggcttccgggtgactgcttcctactgctcgtgctgctgctctacgcgccagtcgggttctgcctcctcgtcctgcgcctctttctcgggatccacgtcttcctggtcagctgcgcgctgccagacagcgtccttcgcagattcgtagtgcggaccatgtgtgcggtgctagggctcgtggcccggcaggaggactccggactccgggatcacagtgtcagggtcctcatttccaaccatgtgacacctttcgaccacaacatagtcaatttgcttaccacctgtagcacccctctactcaatagtccccccagctttgtgtgctggtctcggggcttcatggagatgaatgggcggggggagttggtggagtcactcaagagattctgtgcttccacgaggcttccccccactcctctgctgctattccctgaggaagaggccaccaatggccgggaggggctcctgcgcttcagttcctggccattttctatccaagatgtggtacaacctcttaccctgcaagttcagagacccctggtctctgtgacggtgtcagatgcctcctgggtctcagaactgctgtggtcacttttcgtccctttcacggtgtatcaagtaaggtggcttcgtcctgttcatcgccaactaggggaagcgaatgaggagtttgcactccgtgtacaacagctggtggccaaggaattgggccagacagggacacggctcactccagctgacaaagcagagcacatgaagcgacaaagacaccccagattgcgcccccagtcagcccagtcttctttccctccctcccctggtccttctcctgatgtgcaactggcaactctggctcagagagtcaaggaagttttgccccatgtgccattgggtgtcatccagagagacctggccaagactggctgtgtagacttgactatcactaatctgcttgagggggccgtagctttcatgcctgaagacatcaccaagggaactcagtccctacccacagcctctgcctccaagaccctagcatagtgcctctcttgcaaagtaggcattcgatgcgtgtttaatgatgatgactccgcaagccctctgacattgtgatcacctcagtttcccagctctggcccggtgacccctcagccaacagccctaacatttgccaagtcttcctgggcccggcaggagagcctgcaggagcgcaagcaagcactatatgaatacgcaagaaggagattcacagagagacgagcccaggaggctgactgagctcaaaggaacaggatggcacccagagccgcaggacggagactgggggcagccctcacccaactcacaacaggctggatgggtgggtggtaaaaagggaaggatgaggctcccccaatgtcacattaaattcatggttttcattcaa

SEQ ID NO: 424044 - DNA, 1482 bp, Homo sapiens
acagtaggacgcggggcacgccggtacctgaagtccttcagaagtgcacgccgggaccaggattccgggaggccgactcctccctgccccacgaatgccgggaattgtggtctccgccggacgcgagttgtgagacggcccaaggggccgcggggtatgctgggaccgctagcccttccggcgcgcctcaggacttcgggtcccctcaccccgggcggatgcccaaagactccgccttcccaagagcccctgcggccgggcgcgaaaatggcggcggcggcgacggccgggcgctcctgaagcagcagttatggagcttccctcagggccggggccggagcggctctttgactcgcaccggcttccgggtgactgcttcctactgctcgtgctgctgctctacgcgccagtcgggttctgcctcctcgtcctgcgcctctttctcgggatccacgtcttcctggtcagctgcgcgctgccagacagcgtccttcgcagattcgtagtgcggaccatgtgtgcggtgctagggctcgtggcccggcaggaggactccggactccgggatcacagtgtcagggtcctcatttccaaccatgtgacacctttcgaccacaacatagtcaatttgcttaccacctgtagcacccctctactcaatagtccccccagctttgtgtgctggtctcggggcttcatggagatgaatgggcggggggagttggtggagtcactcaagagattctgtgcttccacgaggcttccccccactcctctgctgctattccctgaggaagaggccaccaatggccgggaggggctcctgcgcttcagttcctggccattttctatccaagatgtggtacaacctcttaccctgcaagttcagagacccctggtctctgtgacggtgtcagatgcctcctgggtctcagaactgctgtggtcacttttcgtccctttcacggtgtatcaagtaaggtggcttcgtcctgttcatcgccaactaggggaagcgaatgaggagtttgcactccgtgtacaacagctggtggccaaggaattgggccagacagggacacggctcactccagctgacaaagcagagcacatgaagcgacaaagacaccccagattgcgcccccagtcagcccagtcttctttccctccctcccctggtccttctcctgatgtgcaactggcaactctggctcagagagtcaaggaagttttgccccatgtgccattgggtgtcatccagagagacctggccaagactggctgtgtagacttgactatcactaatctgcttgagggggccgtagctttcatgcctgaagacatcaccaagggaactcagtccctacccacagcctctgcctccaagcctcacccaactcacaacaggctggatgggtgggtggtaaaaagggaaggatgaggctcccccaatgtcacattaaattcatggttttcattcaa

SEQ ID NO: 424045 - DNA, 1952 bp, Homo sapiens
acagtaggacgcggggcacgccggtacctgaagtccttcagaagtgcacgccgggaccaggattccgggaggccgactcctccctgccccacgaatgccgggaattgtggtctccgccggacgcgagttgtgagacggcccaaggggccgcggggtatgctgggaccgctagcccttccggcgcgcctcaggacttcgggtcccctcaccccgggcggatgcccaaagactccgccttcccaagagcccctgcggccgggcgcgaaaatggcggcggcggcgacggccgggcgctcctgaagcagcagttatggagcttccctcagggccggggccggagcggctctttgactcgcaccggcttccgggtgactgcttcctactgctcgtgctgctgctctacgcgccagtcgggttctgcctcctcgtcctgcgcctctttctcgggatccacgtcttcctggtcagctgcgcgctgccagacagcgtccttcgcagattcgtagtgcggaccatgtgtgcggtgctagggctcgtggcccggcaggaggactccggactccgggatcacagtgtcagggtcctcatttccaaccatgtgacacctttcgaccacaacatagtcaatttgcttaccacctgtagcacccctctactcaatagtccccccagctttgtgtgctggtctcggggcttcatggagatgaatgggcggggggagttggtggagtcactcaagagattctgtgcttccacgaggcttccccccactcctctgctgctattccctgaggaagaggccaccaatggccgggaggggctcctgcgcttcaggtgggtttagcacaggtatggggcgccagctgggtaggtggtcaagcttgtgggcccttgagtttttacaactttcttcggcccttagaccccatcatctccagttcatttcctttctgtccactttaagttctttctcctgaatcccttcattcttcaattatgtgcttgtagagtttgacagttgcctgttataaggcaggtgtgagctgctgactaggctggctggattcccatcctactttctccttcctcttctagttcctggccattttctatccaagatgtggtacaacctcttaccctgcaagttcagagacccctggtctctgtgacggtgtcagatgcctcctgggtctcagaactgctgtggtcacttttcgtccctttcacggtgtatcaagtaaggtggcttcgtcctgttcatcgccaactaggggaagcgaatgaggagtttgcactccgtgtacaacagctggtggccaaggaattgggccagacagggacacggctcactccagctgacaaagcagagcacatgaagcgacaaagacaccccagattgcgcccccagtcagcccagtcttctttccctccctcccctggtccttctcctgatgtgcaactggcaactctggctcagagagtcaaggaagttttgccccatgtgccattgggtgtcatccagagagacctggccaagactggctgtgtagacttgactatcactaatctgcttgagggggccgtagctttcatgcctgaagacatcaccaagggaactcagtccctacccacagcctctgcctccaagtttcccagctctggcccggtgacccctcagccaacagccctaacatttgccaagtcttcctgggcccggcaggagagcctgcaggagcgcaagcaagcactatatgaatacgcaagaaggagattcacagagagacgagcccaggaggctgactgagctcaaaggaacaggatggcacccagagccgcaggacggagactgggggcagccctcacccaactcacaacaggctggatgggtgggtggtaaaaagggaaggatgaggctcccccaatgtcacattaaattcatggttttcattcaa

SEQ ID NO: 424046 - DNA, 1637 bp, Homo sapiens
acagtaggacgcggggcacgccggtacctgaagtccttcagaagtgcacgccgggaccaggattccgggaggccgactcctccctgccccacgaatgccgggaattgtggtctccgccggacgcgagttgtgagacggcccaaggggccgcggggtatgctgggaccgctagcccttccggcgcgcctcaggacttcgggtcccctcaccccgggcggatgcccaaagactccgccttcccaagagcccctgcggccgggcgcgaaaatggcggcggcggcgacggccgggcgctcctgaagcagcagttatggagcttccctcagggccggggccggagcggctctttgactcgcaccggcttccgggtgactgcttcctactgctcgtgctgctgctctacgcgccagtcgggttctgcctcctcgtcctgcgcctctttctcgggatccacgtcttcctggtcagctgcgcgctgccagacagcgtccttcgcagattcgtagtgcggaccatgtgtgcggtgctagggctcgtggcccggcaggaggactccggactccgggatcacagtgtcagggtcctcatttccaaccatgtgacacctttcgaccacaacatagtcaatttgcttaccacctgtagcacccctctactcaatagtccccccagctttgtgtgctggtctcggggcttcatggagatgaatgggcggggggagttggtggagtcactcaagagattctgtgcttccacgaggcttccccccactcctctgctgctattccctgaggaagaggccaccaatggccgggaggggctcctgcgcttcagttcctggccattttctatccaagatgtggtacaacctcttaccctgcaagttcagagacccctggtctctgtgacggtgtcagatgcctcctgggtctcagaactgctgtggtcacttttcgtccctttcacggtgtatcaagtaaggtggcttcgtcctgttcatcgccaactaggggaagcgaatgaggagtttgcactccgtgtacaacagctggtggccaaggaattgggccagacagggacacggctcactccagctgacaaagcagagcacatgaagcgacaaagacaccccagattgcgcccccagtcagcccagtcttctttccctccctcccctggtccttctcctgatgtgcaactggcaactctggctcagagagtcaaggaagttttgccccatgtgccattgggtgtcatccagagagacctggctttcatgcctgaagacatcaccaagggaactcagtccctacccacagcctctgcctccaagtttcccagctctggcccggtgacccctcagccaacagccctaacatttgccaagtcttcctgggcccggcaggagagcctgcaggagcgcaagcaagcactatatgaatacgcaagaaggagattcacagagagacgagcccaggaggctgactgagctcaaaggaacaggatggcacccagagccgcaggacggagactgggggcagccctcacccaactcacaacaggctggatgggtgggtggtaaaaagggaaggatgaggctcccccaatgtcacattaaattcatggttttcattcaa

SEQ ID NO: 424047 - DNA, 2193 bp, Homo sapiens
acagtaggacgcggggcacgccggtacctgaagtccttcagaagtgcacgccgggaccaggattccgggaggccgactcctccctgccccacgaatgccgggaattgtggtctccgccggacgcgagttgtgagacggcccaaggggccgcggggtatgctgggaccgctagcccttccggcgcgcctcaggacttcgggtcccctcaccccgggcggatgcccaaagactccgccttcccaagagcccctgcggccgggcgcgaaaatggcggcggcggcgacggccgggcgctcctgaagcagcagttatggagcttccctcagggccggggccggagcggctctttgactcgcaccggcttccgggtgactgcttcctactgctcgtgctgctgctctacgcgccagtcgggttctgcctcctcgtcctgcgcctctttctcgggatccacgtcttcctggtcagctgcgcgctgccagacagcgtccttcgcagattcgtagtgcggaccatgtgtgcggtgctagggctcgtggcccggcaggaggactccggactccgggatcacagtgtcagggtcctcatttccaaccatgtgacacctttcgaccacaacatagtcaatttgcttaccacctgtagcacccctctactcaatagtccccccagctttgtgtgctggtctcggggcttcatggagatgaatgggcggggggagttggtggagtcactcaagagattctgtgcttccacgaggcttccccccactcctctgctgctattccctgaggaagaggccaccaatggccgggaggggctcctgcgcttcaggtgggtttagcacaggtatggggcgccagctgggtaggtggtcaagcttgtgggcccttgagtttttacaactttcttcggcccttagaccccatcatctccagttcatttcctttctgtccactttaagttctttctcctgaatcccttcattcttcaattatgtgcttgtagagtttgacagttgcctgttataaggcaggtgtgagctgctgactaggctggctggattcccatcctactttctccttcctcttctagttcctggccattttctatccaagatgtggtacaacctcttaccctgcaagttcagagacccctggtctctgtgacggtgtcagatgcctcctgggtctcagaactgctgtggtcacttttcgtccctttcacggtgtatcaagtaaggtattaactgtcctcacattttggtcgctggggagaggctcacctcaaggtcaaggaattagtggcctctgccctgtccatttgtagatctttatatcaaggttctaccacagaggcaacacaaagtatttacagtatttactattttcccacccaccatgcaaagaggtaccaaagtggggaatggtgacagcctctaccctgggtgcccacaacatagccctggattgtttctttgcaggtggcttcgtcctgttcatcgccaactaggggaagcgaatgaggagtttgcactccgtgtacaacagctggtggccaaggaattgggccagacagggacacggctcactccagctgacaaagcagagcacatgaagcgacaaagacaccccagattgcgcccccagtcagcccagtcttctttccctccctcccctggtccttctcctgatgtgcaactggcaactctggctcagagagtcaaggaagttttgccccatgtgccattgggtgtcatccagagagacctggccaagactggctgtgtagacttgactatcactaatctgcttgagggggccgtagctttcatgcctgaagacatcaccaagggaactcagtccctacccacagcctctgcctccaagtttcccagctctggcccggtgacccctcagccaacagccctaacatttgccaagtcttcctgggcccggcaggagagcctgcaggagcgcaagcaagcactatatgaatacgcaagaaggagattcacagagagacgagcccaggaggctgactgagctcaaaggaacaggatggcacccagagccgcaggacggagactgggggcagccctcacccaactcacaacaggctggatgggtgggtggtaaaaagggaaggatgaggctcccccaatgtcacattaaattcatggttttcattcaa

SEQ ID NO: 424048 - DNA, 1070 bp, Homo sapiens
acagtaggacgcggggcacgccggtacctgaagtccttcagaagtgcacgccgggaccaggattccgggaggccgactcctccctgccccacgaatgccgggaattgtggtctccgccggacgcgagttgtgagacggcccaaggggccgcggggtatgctgggaccgctagcccttccggcgcgcctcaggacttcgggtcccctcaccccgggcggatgcccaaagactccgccttcccaagagcccctgcggccgggcgcgaaaatggcggcggcggcgacggccgggcgctcctgaagcagcagttatggagcttccctcagggccggggccggagcggctctttgactcgcaccggtggcttcgtcctgttcatcgccaactaggggaagcgaatgaggagtttgcactccgtgtacaacagctggtggccaaggaattgggccagacagggacacggctcactccagctgacaaagcagagcacatgaagcgacaaagacaccccagattgcgcccccagtcagcccagtcttctttccctccctcccctggtccttctcctgatgtgcaactggcaactctggctcagagagtcaaggaagttttgccccatgtgccattgggtgtcatccagagagacctggccaagactggctgtgtagacttgactatcactaatctgcttgagggggccgtagctttcatgcctgaagacatcaccaagggaactcagtccctacccacagcctctgcctccaagtttcccagctctggcccggtgacccctcagccaacagccctaacatttgccaagtcttcctgggcccggcaggagagcctgcaggagcgcaagcaagcactatatgaatacgcaagaaggagattcacagagagacgagcccaggaggctgactgagctcaaaggaacaggatggcacccagagccgcaggacggagactgggggcagccctcacccaactcacaacaggctggatgggtgggtggtaaaaagggaaggatgaggctcccccaatgtcacattaaattcatggttttcattcaa

SEQ ID NO: 424049 - DNA, 2222 bp, Homo sapiens
acagtaggacgcggggcacgccggtacctgaagtccttcagaagtgcacgccgggaccaggattccgggaggccgactcctccctgccccacgaatgccgggaattgtggtctccgccggacgcgagttgtgagacggcccaaggggccgcggggtatgctgggaccgctagcccttccggcgcgcctcaggacttcgggtcccctcaccccgggcggatgcccaaagactccgccttcccaagagcccctgcggccgggcgcgaaaatggcggcggcggcgacggccgggcgctcctgaagcagcagttatggagcttccctcagggccggggccggagcggctctttgactcgcaccggcttccgggtgactgcttcctactgctcgtgctgctgctctacgcgccagtcgggttctgcctcctcgtcctgcgcctctttctcgggatccacgtcttcctggtcagctgcgcgctgccagacagcgtccttcgcagattcgtagtgcggaccatgtgtgcggtgctagggctcgtggcccggcaggaggactccggactccgggatcacagtgtcagggtcctcatttccaaccatgtgacacctttcgaccacaacatagtcaatttgcttaccacctgtagcacccctctactcaatagtccccccagctttgtgtgctggtctcggggcttcatggagatgaatgggcggggggagttggtggagtcactcaagagattctgtgcttccacgaggcttccccccactcctctgctgctattccctgaggaagaggccaccaatggccgggaggggctcctgcgcttcagttcctggccattttctatccaagatgtggtacaacctcttaccctgcaagttcagagacccctggtctctgtgacggtgtcagatgcctcctgggtctcagaactgctgtggtcacttttcgtccctttcacggtgtatcaagtaaggtattaactgtcctcacattttggtcgctggggagaggctcacctcaaggtcaaggaattagtggcctctgccctgtccatttgtagatctttatatcaaggttctaccacagaggcaacacaaagtatttacagtatttactattttcccacccaccatgcaaagaggtaccaaagtggggaatggtgacagcctctaccctgggtgcccacaacatagccctggattgtttctttgcaggtggcttcgtcctgttcatcgccaactaggggaagcgaatgaggagtttgcactccgtgtacaacaggtggtcgggtgcacagacagggtggaggcggggtccctgcttaggaggagagggaggaaagcttgagatcttgacacttccagtcttccaattctccctagctggtggccaaggaattgggccagacagggacacggctcactccagctgacaaagcagagcacatgaagcgacaaagacaccccagattgcgcccccagtcagcccagtcttctttccctccctcccctggtccttctcctgatgtgcaactggcaactctggctcagagagtcaaggaagttttgccccatgtgccattgggtgtcatccagagagacctggccaagactggctgtgtagacttgactatcactaatctgcttgagggggccgtagctttcatgcctgaagacatcaccaagggaactcagtccctacccacagcctctgcctccaagggtgagacccaggaaatggtcagatccaagtgttggggtgagttgggggcaggctatgtactcccttatccctgacctttcttttttgatcctgagaccctagcatagtgcctctcttgcaaagtaggcattcgatgcgtgtttaatgatgatgactccgcaagccctctgacattgtgatcacctcagtttcccagctctggcccggtgacccctcagccaacagccctaacatttgccaagtcttcctgggcccggcaggagagcctgcaggagcgcaagcaagcactatatgaatacgcaagaaggagattcacagagagacgagcccaggaggctgactgagctcaaaggaacaggatggcacccagagccgcaggacggagactgggggcagccctcacccaactcacaacaggctggatgggtgggtggtaaaaagggaaggatgaggctcccccaatgtcacattaaattcatggttttcattcaa

SEQ ID NO: 424050 - DNA, 3618 bp, Homo sapiens
  misc_feature (1907)..(1907): n is a, c, g, or t
  misc_feature (2034)..(2034): n is a, c, g, or t
  misc_feature (3054)..(3054): n is a, c, g, or t
tggcaaacatctacactctctttctttcaccccatcttgtgatgtttttgttatgtacagtggaagagattaatgatatccatcaaatgaaatgatgatagtatacctatatcttgaaaatccatacacatatcagtgtatattttgtgtacaagatatgagtacaaggtaatgaaactaggtattctaagacatacatatatacacatacacacaagcatatgtgcaaatgagtgtgggccttttcaaagtagtcactttacgaggtcataatgtttattcctgttacatggctattgttcatattggttttagaactttgataacttcagcatattcatgtctaagcaacaaaatatttagtttttgtatgtggctttgggttttggtaatatccataggctattcaaaccttagtctacaaataatttacatgatgaacaagctgaggggtataattttaaatccaagataaggtgcatactaataaaatgaaataggtattctgttaattgaaataattctaaaacaattacaaaaggagaattcagaaatgtttgagcagtgtcagtgtctttgaaataagcgcagaacttctcaagatctagaaaggcagtttcatatgcaggaaggaacactggattaagttgcaaatcttagggtcagttcctaggcttccacttattaactgtttgggagctacttcagtgggactctgggttttaatctttgaagtgggttgatgctctcttagatccattagcgttaaagtccctgatgttgcgattctgctttgaaagtaattacaaatacatgtaaatgatgtcaggactgaggattggccacattataaaattgcaaagttttgccactattttctttaaataggtttttgtatgtttgttaaattttatctttttggccaggttcaatggcttagccctgtaatcccagcactttgggaggccaagccaggcagatcacttgaggtcaggagctcaagaccagcctggccaacatggtgaaaccccatctctactaaaaatacaaaaattagctgggcatgatggtgtgcgcctgtaatcccagctaccttgggaggctgagacaagagaatcacttgaacccaggaggcagaggttgcagtgagccgagatcacgccactgcactccagtctgggtgacagagcaagactctggctcaaaaaacagtttatatctttttgctttatatcaagcctattcctggttggatcattttgtttttacaggtgaggattcaaggatcaaaattaagtgactggctcagaaacagagcagtttacaaatcaagttagattggaagctttcagacttagacctacagttctgacttcacaaccttgaaatggccatttttcccactagtgggtagaaaatggatgaaaaaactttaacaaatggatgaaaataatggcgcagttttcaatttcataataatgtccattccccacttcctactaccctccatttatacttgtaactgaaaattttgtgggttagtaacaattagatgttcccattttacaagactaaaagcaaagagtttttacatctctgtctagaagaaactgtcacacacacgtaaatgtgaataatgcccatatagctgagaatattactaagggaaaccacataaggataatgttttgttattaaaattaaaatattttatcaggggtgcaacatcgtccattgaaaatgtccattctaaatacagctcttaatgtaattacagcaataatttagtttgtacattcaaggttgtgaacttttttatatttgctggatgcagttctgaaatttagtacttgtctgtcttaaggagatctgccctgcatgcaaatctataactagacaaatattanttcctttcccagcttgctcttgggaggtttccatatcctcaggtaagattgttcattactgctgtttgccactgtgacattcattcctatgtatgaaggtgcagggagcaattgtgaacatttgagncacatacaaataaatctgtcctgttaaattgaaaagtggtatcttaaagggttcatttagaaatctctattgatttttgatttttttaaactcctgattttttcttcttgttaaaggttgagagtgatcattgtgcttttcctttgtgtgacattcgggattgttttttttcctggtccaataccatgtactcattttgaggttggaggagagagccagctttttcttgatacactttttaagctcttaaattcacttaaaattttttgagttaaaagattaagacaaagggtgaaagcatctaatctaggtcattatttttgctaggcaaatatataggcccccaattttatgagtgtaattttgaacatattatttaaaaatattttgctccctcctgtctacatttgtaaggaaacaaaacagtccattatagtagcattgctgactctaatctttattaaaatttctttaagatttttattatagaagggtaccagcactaaaatagaaagctattttgtggtttgaaaatgattccccagtttgtgggggaaataagtgaaatgtctagagggatgaaaaatgaatggtttgactgttttcctctggttgatgttcactgtttttctggcatcttggtctgtacaggccaaagtgcctagaggcatgtctgatttaaaggtggtgttggtctctgctctttaagcatctattaacttgctattattatgcaaataagtgttgtattacacatactaatttatgcatggttagattatgcagatgcatcacaaacatggttattgaataataggatggggctcattctctctaccatctttataagcagttttaagcaaattctcctggtaccaatgtggacatttaaagaccctttactcaatgaaatgtctctttcgtattcttttgctttcatagttaaagccatcagataagtggaagagaaatcgtccaagttgttaggttcaagagtgttagtctcacttttcaaattcntagacttttttgtttaaatgtaatcttttccttatagagaaaatctaaaatgcagttgcttggcatgaatgctggcatttagtgagattttagtgtatatagccttgctgcttagctctaggtaacccatcaaattaaaattacattttcaggatttatagctcattagaatatttatcttggtaagcttcttattctgtcagtaatttctaaacaattcagcttggccaatttgtgaaatcccctaaaattttgaaagtgaactcacaagccctatgcagtatatttctcaaacaaatcttagtagaaaacttataagccatccagtaaaaattccaaaggttgagaatgtagcaatattcttgagattcctaatgtctagagtagttaatcagtgagatttgatgggtgatgagtctaagaaatggattttgccatggccaggtgcagtggcttacgcctgtaatcccagcactttgggaggccgaggtgggcggatcacgaggtcaggagattgagaccatcctggctaacatggtgaaaccccgtctctactaaaaatac

SEQ ID NO: 424051 - DNA, 2339 bp, Homo sapiens
  misc_feature (36)..(36): n is a, c, g, or t
cacgggccccttggggtaccccgccttccggtttancgggatgccgccgccggtccgcgcggcctcgggtggccggagctcagcctgcgcgcgccgcgccctgtgtctccgggtggggcagaagactcgccccttgaacctcccgcggggactctccgtggtgtggcggccctggggctctttcttaatagccccggactgagtcccctccagtcgaggaccctctcctagtccactgacgagcggtggacacctgccgctgtatctcccccaaaccgagtccttgccctgctgcctcctcatacccacacggcggcagagaccttcaccatagcgttcgctcaactccagaaccttccgacctccgctagttcctgcgggcctttgcccgcttcccggtgcaccctccccgggagacacctcagacccccgacagcctgggcaggctcggtgcctgcgggtgcgttcctgatcacccctcccctcttccctccccctcatcctccattcccttgttttcaccctctgtcctctgcccgtcactccccttgtcacctcttggagccccctcctaaccagcggccagtgggtttcccataccccaggatgtgagcctctttaacctgtaatgctgtggctagcccttggcccctttcctgccatggagaaccaggtgctggtaattcgcatcaagatcccaaatagtggcgcggtggactggacagtgcactccgggccgcagttactcttcagggatgtgctggatgtgataggccaggttctgcctgaagcaacaactacagcatttgaatatgaagatgaagatggtgatcgaattacagtgagaagtgatgaggaaatgaaggcaatgctgtcatattattattccacagtaatggaacagcaagtaaatggacagttaatagagcctctgcagatatttccaagagcctgcaagcctcctggggaacggaacatacatggcctgaaggtgaatactcgggccggaccctctcaacacagcagcccagcagtctcagattcacttccaagcaatagcttaaagaagtcttctgctgaactgaaaaaaatactagccaatggccagatgaatgaacaagacatacgatatcgggacactcttggtcatggcaacggaggcacagtctacaaagcatatcatgtcccgagtgggaaaatattagctgtaaaggtcatactactagatattacactggaacttcagaagcaaattatgtctgaattggaaattctttataagtgcgattcatcatatatcattggattttatggagcattttttgtagaaaacaggatttcaatatgtacagaattcatggatgggggatctttggatgtatataggaaaatgccagaacatgtccttggaagaattgcagtagcagttgttaaaggccttacttatttgtggagtttaaagattttacatagagacgtgaagccctccaatatgctagtaaacacaagaggacaggttaagctgtgtgattttggagttagcactcagctggtgaattctatagccaagacgtatgttggaacaaatgcttatatggcgcctgaaaggatttcaggggagcagtatggaattcattctgatgtctggagcttaggaatctcttttatggagcttgctcttgggaggtttccatatcctcagattcagaaaaaccagggatctttaatgcctctccagcttctgcagtgcattgttgatgaggattcgcccgtccttccagttggagagttctcggagccatttgtacatttcatcactcagtgtatgcgaaaacagccaaaagaaaggccagcacctgaagaattgatgggccacccgttcatcgtgcagttcaatgatggaaatgccgccgtggtgtccatgtgggtgtgccgggcgctggaggagaggcggagccagcaggggcccccgtgaggctgccgcagggcactgaaagcccaggaccagtaaccaaggagaacaacccacccgtcgcccttctccgtatgctgcctgcgccagaagagctttgctgggccctggcttccctgccctcgccttcacctctgtcagcaggtggccttgcctggggagccccatgtgtggcccaccccaccaggccatccccataccttctggtttgaaggcgctgacactggcagagaggtaaagggtggggcattgagaatggaggctcccagggtccctgcccacttctgttttcctaatgtttttctctataaagggtcaggcccgtcagcatcactgatgggaataaaagtattaatgctttgtgaca

SEQ ID NO: 424052 - DNA, 2435 bp, Homo sapiens
ttccggagtaacagtgtcgccgccgccttcctcctcctcctctcgccgctaccgccgtcgccgccgccgcagccgccgccggtccgcgcggcctcgggtggccggagctcagcctgcgcgcgccgcgccctgtgtctccgggtggggcagaagactcgccccttgaacctcccgcggggactctccgtggtgtggcggccctggggctctttcttaatagccccggactgagtcccctccagtcgaggaccctctcctagtccactgacgagcggtggacacctgccgctgtatctcccccaaaccgagtccttgccctgctgcctcctcatacccacacggcggcagagaccttcaccatagcgttcgctcaactccagaaccttccgacctccgctagttcctgcgggcctttgcccgcttcccggtgcaccctccccgggagacacctcagacccccgacagcctgggcaggctcggtgcctgcgggtgcgttcctgatcacccctcccctcttccctccccctcatcctccattcccttgttttcaccctctgtcctctgcccgtcactccccttgtcacctcttggagccccctcctaaccagcggccagtgggtttcccataccccaggatgtgagcctctttaacctgtaatgctgtggctagcccttggcccctttcctgccatggagaaccaggtgctggtaattcgcatcaagatcccaaatagtggcgcggtggactggacagtgcactccgggccgcagttactcttcagggatgtgctggatgtgataggccaggttctgcctgaagcaacaactacagcatttgaatatgaagatgaagatggtgatcgaattacagtgagaagtgatgaggaaatgaaggcaatgctgtcatattattattccacagtaatggaacagcaagtaaatggacagttaatagagcctctgcagatatttccaagagcctgcaagcctcctggggaacggaacatacatggcctgaaggtgaatactcgggccggaccctctcaacacagcagcccagcagtctcagattcacttccaagcaatagcttaaagaagtcttctgctgaactgaaaaaaatactagccaatggccagatgaatgaacaagacatacgatatcgggacactcttggtcatggcaacggaggcacagtctacaaagcatatcatgtcccgagtgggaaaatattagctgtaaaggtcatactactagatattacactggaacttcagaagcaaattatgtctgaattggaaattctttataagtgcgattcatcatatatcattggattttatggagcattttttgtagaaaacaggatttcaatatgtacagaattcatggatgggggatctttggatgtatataggaaaatgccagaacatgtccttggaagaattgcagtagcagttgttaaaggccttacttatttgtggagtttaaagattttacatagagacgtgaagccctccaatatgctagtaaacacaagaggacaggttaagctgtgtgattttggagttagcactcagctggtgaattctatagccaagacgtatgttggaacaaatgcttatatggcgcctgaaaggatttcaggggagcagtatggaattcattctgatgtctggagcttaggaatctcttttatggagattcagaaaaaccagggatctttaatgcctctccagcttctgcagtgcattgttgatgaggattcgcccgtccttccagttggagagttctcggagccatttgtacatttcatcactcagtgtatgcgaaaacagccaaaagaaaggccagcacctgaagaattgatgggccacccgttcatcgtgcagttcaatgatggaaatgccgccgtggtgtccatgtgggtgtgccgggcgctggaggagaggcggagccagcaggggcccccgtgaggctgccgcagggcactgaaagcccaggaccagtaaccaaggagaacaacccacccgtcgcccttctccgtatgctgcctgcgccagaagagctttgctgggccctggcttccctgccctcgccttcacctctgtcagcaggtggccttgcctggggagccccatgtgtggcccaccccaccaggccatccccataccttctggtttgaaggcgctgacactggcagagaggtaaagggtggggcattgagaatggaggctcccagggtccctgcccacttctgttttcctaatgtttttctctataaagggtcaggcccgtcagcatcactgatgggaataaaagtattaatgctttgtgacatgaaaactggacagaaggacccagaggtgttctttcattttctctcttacctccaatctttcccctttcaagctacaggtaaaggctctaccaccat

SEQ ID NO: 424053 - DNA, 2557 bp, Homo sapiens
ttccggagtaacagtgtcgccgccgccttcctcctcctcctctcgccgctaccgccgtcgccgccgccgcagccgccgccggtccgcgcggcctcgggtggccggagctcagcctgcgcgcgccgcgccctgtgtctccgggtggggcagaagactcgccccttgaacctcccgcggggactctccgtggtgtggcggccctggggctctttcttaatagccccggactgagtcccctccagtcgaggaccctctcctagtccactgacgagcggtggacacctgccgctgtatctcccccaaaccgagtccttgccctgctgcctcctcatacccacacggcggcagagaccttcaccatagcgttcgctcaactccagaaccttccgacctccgctagttcctgcgggcctttgcccgcttcccggtgcaccctccccgggagacacctcagacccccgacagcctgggcaggctcggtgcctgcgggtgcgttcctgatcacccctcccctcttccctccccctcatcctccattcccttgttttcaccctctgtcctctgcccgtcactccccttgtcacctcttggagccccctcctaaccagcggccagtgggtttcccataccccaggatgtgagcctctttaacctgtaatgctgtggctagcccttggcccctttcctgccatggagaaccaggtgctggtaattcgcatcaagatcccaaatagtggcgcggtggactggacagtgcactccgggccgcagttactcttcagggatgtgctggatgtgataggccaggttctgcctgaagcaacaactacagcatttgaatatgaagatgaagatggtgatcgaattacagtgagaagtgatgaggaaatgaaggcaatgctgtcatattattattccacagtaatggaacagcaagtaaatggacagttaatagagcctctgcagatatttccaagagcctgcaagcctcctggggaacggaacatacatggcctgaaggtgaatactcgggccggaccctctcaacacagcagcccagcagtctcagattcacttccaagcaatagcttaaagaagtcttctgctgaactgaaaaaaatactagccaatggccagatgaatgaacaagacatacgatatcgggacactcttggtcatggcaacggaggcacagtctacaaagcatatcatgtcccgagtgggaaaatattagctgtaaagactccaagttcttcagcttttggactcttggacctacaccagtgatttgccgggggctttcaggccttcagctacagactgaaggctgcactgttggcttccctacttttgaggttttcagacttggactggcttccttgctcctcagcttgcacgatggcctattgtgggacttcaccttgtcatcctgtcatactactagatattacactggaacttcagaagcaaattatgtctgaattggaaattctttataagtgcgattcatcatatatcattggattttatggagcattttttgtagaaaacaggatttcaatatgtacagaattcatggatgggggatctttggatgtatataggaaaatgccagaacatgtccttggaagaattgcagtagcagttgttaaaggccttacttatttgtggagtttaaagattttacatagagacgtgaagccctccaatatgctagtaaacacaagaggacaggttaagctgtgtgattttggagttagcactcagctggtgaattctatagccaagacgtatgttggaacaaatgcttatatggcgcctgaaaggatttcaggggagcagtatggaattcattctgatgtctggagcttaggaatctcttttatggagcttgctcttgggaggtttccatatcctcagattcagaaaaaccagggatctttaatgcctctccagcttctgcagtgcattgttgatgaggattcgcccgtccttccagttggagagttctcggagccatttgtacatttcatcactcagtgtatgcgaaaacagccaaaagaaaggccagcacctgaagaattgatgggccacccgttcatcgtgcagttcaatgatggaaatgccgccgtggtgtccatgtgggtgtgccgggcgctggaggagaggcggagccagcaggggcccccgtgaggctgccgcagggcactgaaagcccaggaccagtaaccaaggagaacaacccacccgtcgcccttctccgtatgctgcctgcgccagaagagctttgctgggccctggcttccctgccctcgccttcacctctgtcagcaggtggccttgcctggggagccccatgtgtggcccaccccaccaggccatccccataccttctggtttgaaggcgctgacactggcagagaggtaaagggtggggcattgagaatggaggctcccagggtccctgcccacttctgttttcctaatgtttttctctataaagggtcaggcccgtcagcatcactgatgggaataaaagtattaatgctttgtgaca

SEQ ID NO: 424054 - DNA, 1659 bp, Homo sapiens
gtggcagagctcctggagagaaatgaggtttgcaggccattggagttggactggacatgatggagggtcactttccccagagcgatgtgataggccaggttctgcctgaagcaacaactacagcatttgaatatgaagatgaagatggtgatcgaattacagtgagaagtgatgaggaaatgaaggcaatgctgtcatattattattccacagtaatggaacagcaagtaaatggacagttaatagagcctctgcagatatttccaagagcctgcaagcctcctggggaacggaacatacatggcctgaaggtgaatactcgggccggaccctctcaacacagcagcccagcagtctcagattcacttccaagcaatagcttaaagaagtcttctgctgaactgaaaaaaatactagccaatggccagatgaatgaacaagacatacgatatcgggacactcttggtcatggcaacggaggcacagtctacaaagcatatcatgtcccgagtgggaaaatattagctgtaaaggtcatactactagatattacactggaacttcagaagcaaattatgtctgaattggaaattctttataagtgcgattcatcatatatcattggattttatggagcattttttgtagaaaacaggatttcaatatgtacagaattcatggatgggggatctttggatgtatataggaaaatgccagaacatgtccttggaagaattgcagtagcagttgttaaaggccttacttatttgtggagtttaaagattttacatagagacgtgaagccctccaatatgctagtaaacacaagaggacaggttaagctgtgtgattttggagttagcactcagctggtgaattctatagccaagacgtatgttggaacaaatgcttatatggcgcctgaaaggatttcaggggagcagtatggaattcattctgatgtctggagcttaggaatctcttttatggagcttgctcttgggaggtttccatatcctcagattcagaaaaaccagggatctttaatgcctctccagcttctgcagtgcattgttgatgaggattcgcccgtccttccagttggagagttctcggagccatttgtacatttcatcactcagtgtatgcgaaaacagccaaaagaaaggccagcacctgaagaattgatgggccacccgttcatcgtgcagttcaatgatggaaatgccgccgtggtgtccatgtgggtgtgccgggcgctggaggagaggcggagccagcaggggcccccgtgaggctgccgcagggcactgaaagcccaggaccagtaaccaaggagaacaacccacccgtcgcccttctccgtatgctgcctgcgccagaagagctttgctgggccctggcttccctgccctcgccttcacctctgtcagcaggtggccttgcctggggagccccatgtgtggcccaccccaccaggccatccccataccttctggtttgaaggcgctgacactggcagagaggtaaagggtggggcattgagaatggaggctcccagggtccctgcccacttctgttttcctaatgtttttctctataaagggtcaggcccgtcagcatcactgatgggaataaaagtattaatgctttgtgaca

SEQ ID NO: 424055 - DNA, 2013 bp, Homo sapiens
catggcagactcctgtgatctgttctccaggtttacttcatctcttcatcaagaaaaggcaagaaccaagagacacgtcagcatctctggcttggaaccttaaactttaaagtcacgtggaacctggaagaatcccctcatctaattcagactcatttcgaatgaagaggcatgaaccccacagggggaaaataccttgctaaagccacccagctaatttttggcagaacctgacacagatgccagaagcaggttgtagtcaccgagtcagccataactgagtgtctcggacctgaagtcagcagttgagggctccagtcactgtgcatcaaatagctgggagaccctgggcaagtcagtcggtctctctgggccttgtcttttgtctgaatcatcagggactggctgaactatggaggctgacctgaccctcaaaggatgtgataggccaggttctgcctgaagcaacaactacagcatttgaatatgaagatgaagatggtgatcgaattacagtgagaagtgatgaggaaatgaaggcaatgctgtcatattattattccacagtaatggaacagcaagtaaatggacagttaatagagcctctgcagatatttccaagagcctgcaagcctcctggggaacggaacatacatggcctgaaggtgaatactcgggccggaccctctcaacacagcagcccagcagtctcagattcacttccaagcaatagcttaaagaagtcttctgctgaactgaaaaaaatactagccaatggccagatgaatgaacaagacatacgatatcgggacactcttggtcatggcaacggaggcacagtctacaaagcatatcatgtcccgagtgggaaaatattagctgtaaaggtcatactactagatattacactggaacttcagaagcaaattatgtctgaattggaaattctttataagtgcgattcatcatatatcattggattttatggagcattttttgtagaaaacaggatttcaatatgtacagaattcatggatgggggatctttggatgtatataggaaaatgccagaacatgtccttggaagaattgcagtagcagttgttaaaggccttacttatttgtggagtttaaagattttacatagagacgtgaagccctccaatatgctagtaaacacaagaggacaggttaagctgtgtgattttggagttagcactcagctggtgaattctatagccaagacgtatgttggaacaaatgcttatatggcgcctgaaaggatttcaggggagcagtatggaattcattctgatgtctggagcttaggaatctcttttatggagcttgctcttgggaggtttccatatcctcagattcagaaaaaccagggatctttaatgcctctccagcttctgcagtgcattgttgatgaggattcgcccgtccttccagttggagagttctcggagccatttgtacatttcatcactcagtgtatgcgaaaacagccaaaagaaaggccagcacctgaagaattgatgggccacccgttcatcgtgcagttcaatgatggaaatgccgccgtggtgtccatgtgggtgtgccgggcgctggaggagaggcggagccagcaggggcccccgtgaggctgccgcagggcactgaaagcccaggaccagtaaccaaggagaacaacccacccgtcgcccttctccgtatgctgcctgcgccagaagagctttgctgggccctggcttccctgccctcgccttcacctctgtcagcaggtggccttgcctggggagccccatgtgtggcccaccccaccaggccatccccataccttctggtttgaaggcgctgacactggcagagaggtaaagggtggggcattgagaatggaggctcccagggtccctgcccacttctgttttcctaatgtttttctctataaagggtcaggcccgtcagcatcactgatgggaataaaagtattaatgctttgtgaca

SEQ ID NO: 424056 - DNA, 599 bp, Homo sapiens
cggccgcgaccgcggcagctcagcctcccgccgattgtatgttccaggcctcaatgaggagtccaaacatggagccattcaagcagcagaaggtggaggacttttatgacatcggagaggagctggggagggccacccgttcatcgtgcagttcaatgatggaaatgccgccgtggtgtccatgtgggtgtgccgggcgctggaggagaggcggagccagcaggggcccccgtgaggctgccgcagggcactgaaagcccaggaccagtaaccaaggagaacaacccacccgtcgcccttctccgtatgctgcctgcgccagaagagctttgctgggccctggcttccctgccctcgccttcacctctgtcagcaggtggccttgcctggggagccccatgtgtggcccaccccaccaggccatccccataccttctggtttgaaggcgctgacactggcagagaggtaaagggtggggcattgagaatggaggctcccagggtccctgcccacttctgttttcctaatgtttttctctataaagggtcaggcccgtcagcatcactgatgggaataaaagtattaatgctttgtgaca

SEQ ID NO: 424057 - DNA, 2047 bp, Homo sapiens
ttccggagtaacagtgtcgccgccgccttcctcctcctcctctcgccgctaccgccgtcgccgccgccgcagccgccgccggtccgcgcggcctcgggtggccggagctcagcctgcgcgcgccgcgccctgtgtctccgggtggggcagaagactcgccccttgaacctcccgcggggactctccgtggtgtggcggccctggggctctttcttaatagccccggactgagtcccctccagtcgaggaccctctcctagtccactgacgagcggtggacacctgccgctgtatctcccccaaaccgagtccttgccctgctgcctcctcatacccacacggcggcagagaccttcaccatagcgttcgctcaactccagaaccttccgacctccgctagttcctgcgggcctttgcccgcttcccggtgcaccctccccgggagacacctcagacccccgacagcctgggcaggctcggtgcctgcgggtgcgttcctgatcacccctcccctcttccctccccctcatcctccattcccttgttttcaccctctgtcctctgcccgtcactccccttgtcacctcttggagccccctcctaaccagcggccagtgggtttcccataccccaggatgtgagcctctttaacctgtaatgctgtggctagcccttggcccctttcctgccatggagaaccaggtgctggtaattcgcatcaagatcccaaatagtggcgcggtggactggacagtgcactccgggccgcagttactcttcagggatgtgctggatgtgataggccaggttctgcctgaagcaacaactacagcatttgaatatgaagatgaagatggtgatcgaattacagtgagaagtgatgaggaaatgaaggcaatgctgtcatattattattccacagtaatggaacagcaagtaaatggacagttaatagagcctctgcagatatttccaagagcctgcaagcctcctggggaacggaacatacatggcctgaaggtgaatactcgggccggaccctctcaacacagcagcccagcagtctcagattcacttccaagcaatagcttaaagaagtcttctgctgaactgaaaaaaatactagccaatggccagatgaatgaacaagacatacgatatcgggacactcttggtcatggcaacggaggcacagtctacaaagcatatcatgtcccgagtgggaaaatattagctgtaaaggtcatactactagatattacactggaacttcagaagcaaattatgtctgaattggaaattctttataagtgcgattcatcatatatcattggattttatggagcattttttgtagaaaacaggatttcaatatgtacagaattcatggatgggggatctttggatgtatataggaaaatgccagaacatgtccttggaagaattgcagtagcagttgttaaaggccttacttatttgtggagtttaaagattttacatagagacgtgaagccctccaatatgctagtaaacacaagaggacaggttaagctgtgtgattttggagttagcactcagctggtgaattctatagccaagacgtatgttggaacaaatgcttatatggcgcctgaaaggatttcaggggagcagtatggaattcattctgatgtctggagcttaggaatctcttttatggagattcagaaaaaccagggatctttaatgcctctccagcttctgcagtgcattgttgatgaggattcgcccgtccttccagttggagagttctcggagccatttgtacatttcatcactcagtgtatgcgaaaacagccaaaagaaaggccagcacctgaagaattgatgggccacccgttcatcgtgcagttcaatgatggaaatgccgccgtggtgtccatgtgggtgtgccgggcgctggaggagaggcggagccagcaggggcccccgtgaggctgccgcagggcactgaaagcccaggaccagtaaccaagcaacctctggtacacgagctcgattcactgcc

SEQ ID NO: 424058 - DNA, 3589 bp, Homo sapiens
  misc_feature (2005)..(2005): n is a, c, g, or t
  misc_feature (3025)..(3025): n is a, c, g, or t
ttccggagtaacagtgtcgccgccgccttcctcctcctcctctcgccgctaccgccgtcgccgccgccgcagccgccgccggtccgcgcggcctcgggtggccggagctcagcctgcgcgcgccgcgccctgtgtctccgggtggggcagaagactcgccccttgaacctcccgcggggactctccgtggtgtggcggccctggggctctttcttaatagccccggactgagtcccctccagtcgaggaccctctcctagtccactgacgagcggtggacacctgccgctgtatctcccccaaaccgagtccttgccctgctgcctcctcatacccacacggcggcagagaccttcaccatagcgttcgctcaactccagaaccttccgacctccgctagttcctgcgggcctttgcccgcttcccggtgcaccctccccgggagacacctcagacccccgacagcctgggcaggctcggtgcctgcgggtgcgttcctgatcacccctcccctcttccctccccctcatcctccattcccttgttttcaccctctgtcctctgcccgtcactccccttgtcacctcttggagccccctcctaaccagcggccagtgggtttcccataccccaggatgtgagcctctttaacctgtaatgctgtggctagcccttggcccctttcctgccatggagaaccaggtgctggtaattcgcatcaagatcccaaatagtggcgcggtggactggacagtgcactccgggccgcagttactcttcagggatgtgctggatgtgataggccaggttctgcctgaagcaacaactacagcatttgaatatgaagatgaagatggtgatcgaattacagtgagaagtgatgaggaaatgaaggcaatgctgtcatattattattccacagtaatggaacagcaagtaaatggacagttaatagagcctctgcagatatttccaagagcctgcaagcctcctggggaacggaacatacatggcctgaaggtgaatactcgggccggaccctctcaacacagcagcccagcagtctcagattcacttccaagcaatagcttaaagaagtcttctgctgaactgaaaaaaatactagccaatggccagatgaatgaacaagacatacgatatcgggacactcttggtcatggcaacggaggcacagtctacaaagcatatcatgtcccgagtgggaaaatattagctgtaaagactccaagttcttcagcttttggactcttggacctacaccagtgatttgccgggggctttcaggccttcagctacagactgaaggctgcactgttggcttccctacttttgaggttttcagacttggactggcttccttgctcctcagcttgcacgatggcctattgtgggacttcaccttgtcatcctgtcatactactagatattacactggaacttcagaagcaaattatgtctgaattggaaattctttataagtgcgattcatcatatatcattggattttatggagcattttttgtagaaaacaggatttcaatatgtacagaattcatggatgggggatctttggatgtatataggaaaatgccagaacatgtccttggaagaattgcagtagcagttgttaaaggccttacttatttgtggagtttaaagattttacatagagacgtgaagccctccaatatgctagtaaacacaagaggacaggttaagctgtgtgattttggagttagcactcagctggtgaattctatagccaagacgtatgttggaacaaatgcttatatggcgcctgaaaggatttcaggggagcagtatggaattcattctgatgtctggagcttaggaatctcttttatggagcttgctcttgggaggtttccatatcctcaggtaagattgttcattactgctgtttgccactgtgacattcattcctatgtatgaaggtgcagggagcaattgtgaacatttgagncacatacaaataaatctgtcctgttaaattgaaaagtggtatcttaaagggttcatttagaaatctctattgatttttgatttttttaaactcctgattttttcttcttgttaaaggttgagagtgatcattgtgcttttcctttgtgtgacattcgggattgttttttttcctggtccaataccatgtactcattttgaggttggaggagagagccagctttttcttgatacactttttaagctcttaaattcacttaaaattttttgagttaaaagattaagacaaagggtgaaagcatctaatctaggtcattatttttgctaggcaaatatataggcccccaattttatgagtgtaattttgaacatattatttaaaaatattttgctccctcctgtctacatttgtaaggaaacaaaacagtccattatagtagcattgctgactctaatctttattaaaatttctttaagatttttattatagaagggtaccagcactaaaatagaaagctattttgtggtttgaaaatgattccccagtttgtgggggaaataagtgaaatgtctagagggatgaaaaatgaatggtttgactgttttcctctggttgatgttcactgtttttctggcatcttggtctgtacaggccaaagtgcctagaggcatgtctgatttaaaggtggtgttggtctctgctctttaagcatctattaacttgctattattatgcaaataagtgttgtattacacatactaatttatgcatggttagattatgcagatgcatcacaaacatggttattgaataataggatggggctcattctctctaccatctttataagcagttttaagcaaattctcctggtaccaatgtggacatttaaagaccctttactcaatgaaatgtctctttcgtattcttttgctttcatagttaaagccatcagataagtggaagagaaatcgtccaagttgttaggttcaagagtgttagtctcacttttcaaattcntagacttttttgtttaaatgtaatcttttccttatagagaaaatctaaaatgcagttgcttggcatgaatgctggcatttagtgagattttagtgtatatagccttgctgcttagctctaggtaacccatcaaattaaaattacattttcaggatttatagctcattagaatatttatcttggtaagcttcttattctgtcagtaatttctaaacaattcagcttggccaatttgtgaaatcccctaaaattttgaaagtgaactcacaagccctatgcagtatatttctcaaacaaatcttagtagaaaacttataagccatccagtaaaaattccaaaggttgagaatgtagcaatattcttgagattcctaatgtctagagtagttaatcagtgagatttgatgggtgatgagtctaagaaatggattttgccatggccaggtgcagtggcttacgcctgtaatcccagcactttgggaggccgaggtgggcggatcacgaggtcaggagattgagaccatcctggctaacatggtgaaaccccgtctctactaaaaatac

SEQ ID NO: 424059 - DNA, 1793 bp, Homo sapiens
ttccggagtaacagtgtcgccgccgccttcctcctcctcctctcgccgctaccgccgtcgccgccgccgcagccgccgccggtccgcgcggcctcgggtggccggagctcagcctgcgcgcgccgcgccctgtgtctccgggtggggcagaagactcgccccttgaacctcccgcggggactctccgtggtgtggcggccctggggctctttcttaatagccccggactgagtcccctccagtcgaggaccctctcctagtccactgacgagcggtggacacctgccgctgtatctcccccaaaccgagtccttgccctgctgcctcctcatacccacacggcggcagagaccttcaccatagcgttcgctcaactccagaaccttccgacctccgctagttcctgcgggcctttgcccgcttcccggtgcaccctccccgggagacacctcagacccccgacagcctgggcaggctcggtgcctgcgggtgcgttcctgatcacccctcccctcttccctccccctcatcctccattcccttgttttcaccctctgtcctctgcccgtcactccccttgtcacctcttggagccccctcctaaccagcggccagtgggtttcccataccccaggatgtgagcctctttaacctgtaatgctgtggctagcccttggcccctttcctgccatggagaaccaggtgctggtaattcgcatcaagatcccaaatagtggcgcggtggactggacagtgcactccgggccgcagttactcttcagggatgtgctggatgtgataggccaggttctgcctgaagcaacaactacagcatttgaatatgaagatgaagatggtgatcgaattacagtgagaagtgatgaggaaatgaaggcaatgctgtcatattattattccacagtaatggaacagcaagtaaatggacagttaatagagcctctgcagatatttccaagagcctgcaagcctcctggggaacggaacatacatggcctgaaggtgaatactcgggccggaccctctcaacacagcagcccagcagtctcagattcacttccaagcaatagcttaaagaagtcttctgctgaactgaaaaaaatactagccaatggccagatgaatgaacaagacatacgatatcgggacactcttggtcatggcaacggaggcacagtctacaaagcatatcatgtcccgagtgggaaaatattagctgtaaaggtcatactactagatattacactggaacttcagaagcaaattatgtctgaattggaaattctttataagtgcgattcatcatatatcattggattttatggagcattttttgtagaaaacaggatttcaatatgtacagaattcatggatgggggatctttggatgtatataggaaaatgccagaacatgtccttggaagaattgcagtagcagttgttaaaggccttacttatttgtggagtttaaagattttacatagagcaaacaaagacctgtgcacctgaaaaggggtaagagagtgaccacagtgaccacaaaagcacctgcagaaactatggattatcaatttatttattagtaattagtcatggtaatgagaaatcaagttgtgttttgaggttgattttttaaaacagctttattgatatataatttgcatgccataaaattcatctactcaattcagtgatttttagtaagtttataaagttgtgcaaccataaccataatccagttttagaacattttcatcaccccaaaaaagtgtcct

SEQ ID NO: 424060 - DNA, 1297 bp, Homo sapiens
ttccggagtaacagtgtcgccgccgccttcctcctcctcctctcgccgctaccgccgtcgccgccgccgcagccgccgccggtccgcgcggcctcgggtggccggagctcagcctgcgcgcgccgcgccctgtgtctccgggtggggcagaagactcgccccttgaacctcccgcggggactctccgtggtgtggcggccctggggctctttcttaatagccccggactgagtcccctccagtcgaggaccctctcctagtccactgacgagcggtggacacctgccgctgtatctcccccaaaccgagtccttgccctgctgcctcctcatacccacacggcggcagagaccttcaccatagcgttcgctcaactccagaaccttccgacctccgctagttcctgcgggcctttgcccgcttcccggtgcaccctccccgggagacacctcagacccccgacagcctgggcaggctcggtgcctgcgggtgcgttcctgatcacccctcccctcttccctccccctcatcctccattcccttgttttcaccctctgtcctctgcccgtcactccccttgtcacctcttggagccccctcctaaccagcggccagtgggtttcccataccccaggatgtgagcctctttaacctgtaatgctgtggctagcccttggcccctttcctgccatggagaaccaggtgctggtaattcgcatcaagatcccaaatagtggcgcggtggactggacagtgcactccgggccgcagttactcttcagggatgtgctggatgtgataggccaggttctgcctgaagcaacaactacagcatttgaatatgaagatgaagatggtgatcgaattacagtgagaagtgatgaggaaatgaaggcaatgctgtcatattattattccacagtaatggaacagcaagtaaatggacagttaatagagcctctgcagatatttccaagagcctgcaagcctcctggggaacggaacatacatggcctgaaggtgaatactcgggccggaccctctcaacacagcagcccagcagtctcagattcacttccaagcaatagcttaaagaagtcttctgctgaactgaaaaaaatactagccaatggccagatgaatgaacaagacatacgatatcgggacactcttggtcatggcaacggaggcacagtctacaaagcatatcatgtcccgagtgggaaaatattagctgtaaagtgaagtgtgtgccactccagcaaataaacgaagtcatccatgacaaaaaaaaaaa

SEQ ID NO: 424061 - DNA, 1026 bp, Homo sapiens
ttccggagtaacagtgtcgccgccgccttcctcctcctcctctcgccgctaccgccgtcgccgccgccgcagccgccgccggtccgcgcggcctcgggtggccggagctcagcctgcgcgcgccgcgccctgtgtctccgggtggggcagaagactcgccccttgaacctcccgcggggactctccgtggtgtggcggccctggggctctttcttaatagccccggactgagtcccctccagtcgaggaccctctcctagtccactgacgagcggtggacacctgccgctgtatctcccccaaaccgagtccttgccctgctgcctcctcatacccacacggcggcagagaccttcaccatagcgttcgctcaactccagaaccttccgacctccgctagttcctgcgggcctttgcccgcttcccggtgcaccctccccgggagacacctcagacccccgacagcctgggcaggctcggtgcctgcgggtgcgttcctgatcacccctcccctcttccctccccctcatcctccattcccttgttttcaccctctgtcctctgcccgtcactccccttgtcacctcttggagccccctcctaaccagcggccagtgggtttcccataccccaggatgtgagcccagcaggggcccccgtgaggctgccgcagggcactgaaagcccaggaccagtaaccaaggagaacaacccacccgtcgcccttctccgtatgctgcctgcgccagaagagctttgctgggccctggcttccctgccctcgccttcacctctgtcagcaggtggccttgcctggggagccccatgtgtggcccaccccaccaggccatccccataccttctggtttgaaggcgctgacactggcagagaggtaaagggtggggcattgagaatggaggctcccagggtccctgcccacttctgttttcctaatgtttttctctataaagggtcaggcccgtcagcatcactgatgggaataaaagtattaatgctttgtgaca

SEQ ID NO: 424062 - DNA, 250 bp, Homo sapiens
tgttcccttttacataatttttagttgatttatatgaatgatgattgtaggttaaatgaggaataattgcccattttatttccacattatctttatattgttctaacagactgttttgtctcatagctggtgaattctatagccaagacgtatgttggaacaaatgcttatatggcggtaagtaaacttatgcaaaaataatgtttaaaaccaacatctttatctttatgtacttggtaatgtataattc

SEQ ID NO: 424063 - DNA, 408 bp, Homo sapiens
caaaaaaaaaaaaaaaaaaaaagctaggcatgatggtgcacacctgtggtcccagctactcaggcagctgaggtggaaggattgcttgagcccaggaggtcaaggctacagtgagcagtgattgtaccccacagcacttcagcctaggtgacagggtgacaccctgtctcaaaaaaaaaaaaatgttgaatgtatttaaatatggaaagttccttttaaaaaccataattgataattgtactgttttctttttcctaaatttaggttgttaaaggccttacttatttgtggagtttaaagattttacatagaggtatgtgctgggcttataagcttggatttaatttggggtggggttgggtctctccagataccttgatttttaaagtaagtgttctgacatttaag

SEQ ID NO: 424064 - DNA, 2368 bp, Homo sapiens
ttccggagtaacagtgtcgccgccgccttcctcctcctcctctcgccgctaccgccgtcgccgccgccgcagccgccgccggtccgcgcggcctcgggtggccggagctcagcctgcgcgcgccgcgccctgtgtctccgggtggggcagaagactcgccccttgaacctcccgcggggactctccgtggtgtggcggccctggggctctttcttaatagccccggactgagtcccctccagtcgaggaccctctcctagtccactgacgagcggtggacacctgccgctgtatctcccccaaaccgagtccttgccctgctgcctcctcatacccacacggcggcagagaccttcaccatagcgttcgctcaactccagaaccttccgacctccgctagttcctgcgggcctttgcccgcttcccggtgcaccctccccgggagacacctcagacccccgacagcctgggcaggctcggtgcctgcgggtgcgttcctgatcacccctcccctcttccctccccctcatcctccattcccttgttttcaccctctgtcctctgcccgtcactccccttgtcacctcttggagccccctcctaaccagcggccagtgggtttcccataccccaggatgtgagcctctttaacctgtaatgctgtggctagcccttggcccctttcctgccatggagaaccaggtgctggtaattcgcatcaagatcccaaatagtggcgcggtggactggacagtgcactccgggccgcagttactcttcagggatgtgctggatgtgataggccaggttctgcctgaagcaacaactacagcatttgaatatgaagatgaagatggtgatcgaattacagtgagaagtgatgaggaaatgaaggcaatgctgtcatattattattccacagtaatggaacagcaagtaaatggacagttaatagagcctctgcagatatttccaagagcctgcaagcctcctggggaacggaacatacatggcctgaaggtgaatactcgggccggaccctctcaacacagcagcccagcagtctcagattcacttccaagcaatagcttaaagaagtcttctgctgaactgaaaaaaatactagccaatggccagatgaatgaacaagacatacgatatcgggacactcttggtcatggcaacggaggcacagtctacaaagcatatcatgtcccgagtgggaaaatattagctgtaaaggtcatactactagatattacactggaacttcagaagcaaattatgtctgaattggaaattctttataagtgcgattcatcatatatcattggattttatggagcattttttgtagaaaacaggatttcaatatgtacagaattcatggatgggggatctttggatgtatataggaaaatgccagaacatgtccttggaagaattgcagtagcagttgttaaaggccttacttatttgtggagtttaaagattttacatagagacgtgaagccctccaatatgctagtaaacacaagaggacaggttaagctgtgtgattttggagttagcactcagctggtgaattctatagccaagacgtatgttggaacaaatgcttatatggcgcctgaaaggatttcaggggagcagtatggaattcattctgatgtctggagcttaggaatctcttttatggagcttgctcttgggaggtttccatatcctcagattcagaaaaaccagggatctttaatgcctctccagcttctgcagtgcattgttgatgaggattcgcccgtccttccagttggagagttctcggagccatttgtacatttcatcactcagtgtatgcgaaaacagccaaaagaaaggccagcacctgaagaattgatgggccacccgttcatcgtgcagttcaatgatggaaatgccgccgtggtgtccatgtgggtgtgccgggcgctggaggagaggcggagccagcaggggcccccgtgaggctgccgcagggcactgaaagcccaggaccagtaaccaaggagaacaacccacccgtcgcccttctccgtatgctgcctgcgccagaagagctttgctgggccctggcttccctgccctcgccttcacctctgtcagcaggtggccttgcctggggagccccatgtgtggcccaccccaccaggccatccccataccttctggtttgaaggcgctgacactggcagagaggtaaagggtggggcattgagaatggaggctcccagggtccctgcccacttctgttttcctaatgtttttctctataaagggtcaggcccgtcagcatcactgatgggaataaaagtattaatgctttgtgaca

SEQ ID NO: 424065 - DNA, 2804 bp, Homo sapiens
ttccggagtaacagtgtcgccgccgccttcctcctcctcctctcgccgctaccgccgtcgccgccgccgcagccgccgccggtccgcgcggcctcgggtggccggagctcagcctgcgcgcgccgcgccctgtgtctccgggtggggcagaagactcgccccttgaacctcccgcggggactctccgtggtgtggcggccctggggctctttcttaatagccccggactgagtcccctccagtcgaggaccctctcctagtccactgacgagcggtggacacctgccgctgtatctcccccaaaccgagtccttgccctgctgcctcctcatacccacacggcggcagagaccttcaccatagcgttcgctcaactccagaaccttccgacctccgctagttcctgcgggcctttgcccgcttcccggtgcaccctccccgggagacacctcagacccccgacagcctgggcaggctcggtgcctgcgggtgcgttcctgatcacccctcccctcttccctccccctcatcctccattcccttgttttcaccctctgtcctctgcccgtcactccccttgtcacctcttggagccccctcctaaccagcggccagtgggtttcccataccccaggatgtgagcctctttaacctgtaatgctgtggctagcccttggcccctttcctgccatggagaaccaggtgctggtaattcgcatcaagatcccaaatagtggcgcggtggactggacagtgcactccgggccgcagttactcttcagggatgtgctggatgtgataggccaggttctgcctgaagcaacaactacagcatttgaatatgaagatgaagatggtgatcgaattacagtgagaagtgatgaggaaatgaaggcaatgctgtcatattattattccacagtaatggaacagcaagtaaatggacagttaatagagcctctgcagatatttccaagagcctgcaagcctcctggggaacggaacatacatggcctgaaggtgaatactcgggccggaccctctcaacacagcagcccagcagtctcagattcacttccaagcaatagcttaaagaagtcttctgctgaactgaaaaaaatactagccaatggccagatgaatgaacaagacatacgatatcgggacactcttggtcatggcaacggaggcacagtctacaaagcatatcatgtcccgagtgggaaaatattagctgtaaaggtcatactactagatattacactggaacttcagaagcaaattatgtctgaattggaaattctttataagtgcgattcatcatatatcattggattttatggagcattttttgtagaaaacaggatttcaatatgtacagaattcatggatgggggatctttggatgtatataggaaaatgccagaacatgtccttggaagaattgcagtagcagttgttaaaggccttacttatttgtggagtttaaagattttacatagagacgtgaagccctccaatatgctagtaaacacaagaggacaggttaagctgtgtgattttggagttagcactcagctggtgaattctatagccaagacgtatgttggaacaaatgcttatatggcgcctgaaaggatttcaggggagcagtatggaattcattctgatgtctggagcttaggaatctcttttatggagcttgctcttgggaggtttccatatcctcagattcagaaaaaccagggatctttaatgcctctccagcttctgcagtgcattgttgatgaggattcgcccgtccttccagttggagagttctcggagccatttgtacatttcatcactcagtgtatgcgaaaacagccaaaagaaaggccagcacctgaagaattgatgggccacccgttcatcgtgcagttcaatgatggaaatgccgccgtggtgtccatgtgggtgtgccgggcgctggaggagaggcggagccagcaggggcccccgtgaggctgccgcagggcactgaaagcccaggaccagtaaccaaggagaacaacccacccgtcgcccttctccgtatgctgcctgcgccagaagagctttgctgggccctggcttccctgccctcgccttcacctctgtcagcaggtggccttgcctggggagccccatgtgtggcccaccccaccaggccatccccataccttctggtttgaaggcgctgacactggcagagaggtaaagggtggggcattgagaatggaggctcccagggtccctgcccacttctgttttcctaatgtttttctctataaagggtcaggcccgtcagcatcactgatgggaataaaagtattaatgctttgtgacaaaaaaaaacaaccaacccacacaaacacaacaagaaacacgcgaacgaaaaccccaacaccacaccgccaagacccaccacaagaccaacaacagacagcaaagaaacacagagacacatcaaccacacacaacccacagcaccaacacacggagggcgcgcggcccccactacaccacccgaccacccaagcaacacacgacgcgcgaccaccacaccagatgagccaacgagcgccccccagacgaggcaatagacaaacagaagacgcgggcgccgccagcaaagcacacgcaaacagaccaacaactcagacgcacgaataggaagagacgaacggcagggaggggagaagcggtaacaaccagagaaagaaggcaccgcaccacaaccagaatggacgcaaacacaacaggcgagccagccaccgaaacca

SEQ ID NO: 424066 - DNA, 2779 bp, Homo sapiens
ttccggagtaacagtgtcgccgccgccttcctcctcctcctctcgccgctaccgccgtcgccgccgccgcagccgccgccggtccgcgcggcctcgggtggccggagctcagcctgcgcgcgccgcgccctgtgtctccgggtggggcagaagactcgccccttgaacctcccgcggggactctccgtggtgtggcggccctggggctctttcttaatagccccggactgagtcccctccagtcgaggaccctctcctagtccactgacgagcggtggacacctgccgctgtatctcccccaaaccgagtccttgccctgctgcctcctcatacccacacggcggcagagaccttcaccatagcgttcgctcaactccagaaccttccgacctccgctagttcctgcgggcctttgcccgcttcccggtgcaccctccccgggagacacctcagacccccgacagcctgggcaggctcggtgcctgcgggtgcgttcctgatcacccctcccctcttccctccccctcatcctccattcccttgttttcaccctctgtcctctgcccgtcactccccttgtcacctcttggagccccctcctaaccagcggccagtgggtttcccataccccaggatgtgagcctctttaacctgtaatgctgtggctagcccttggcccctttcctgccatggagaaccaggtgctggtaattcgcatcaagatcccaaatagtggcgcggtggactggacagtgcactccgggccgcagttactcttcagggatgtgctggatgtgataggccaggttctgcctgaagcaacaactacagcatttgaatatgaagatgaagatggtgatcgaattacagtgagaagtgatgaggaaatgaaggcaatgctgtcatattattattccacagtaatggaacagcaagtaaatggacagttaatagagcctctgcagatatttccaagagcctgcaagcctcctggggaacggaacatacatggcctgaaggtgaatactcgggccggaccctctcaacacagcagcccagcagtctcagattcacttccaagcaatagcttaaagaagtcttctgctgaactgaaaaaaatactagccaatggccagatgaatgaacaagacatacgatatcgggacactcttggtcatggcaacggaggcacagtctacaaagcatatcatgtcccgagtgggaaaatattagctgtaaaggtcatactactagatattacactggaacttcagaagcaaattatgtctgaattggaaattctttataagtgcgattcatcatatatcattggattttatggagcattttttgtagaaaacaggatttcaatatgtacagaattcatggatgggggatctttggatgtatataggaaaatgccagaacatgtccttggaagaattgcagtagcagttgttaaaggccttacttatttgtggagtttaaagattttacatagagacgtgaagccctccaatatgctagtaaacacaagaggacaggttaagctgtgtgattttggagttagcactcagctggtgaattctatagccaagacgtatgttggaacaaatgcttatatggcgcctgaaaggatttcaggggagcagtatggaattcattctgatgtctggagcttaggaatctcttttatggagcttgctcttgggaggtttccatatcctcagattcagaaaaaccagggatctttaatgcctctccagcttctgcagtgcattgttgatgaggattcgcccgtccttccagttggagagttctcggagccatttgtacatttcatcactcagtgtatgcgaaaacagccaaaagaaaggccagcacctgaagaattgatgggccacccgttcatcgtgcagttcaatgatggaaatgccgccgtggtgtccatgtgggtgtgccgggcgctggaggagaggcggagccagcaggggcccccgtgaggctgccgcagggcactgaaagcccaggaccagtaaccaaggagaacaacccacccgtcgcccttctccgtatgctgcctgcgccagaagagctttgctgggccctggcttccctgccctcgccttcacctctgtcagcaggtggccttgcctggggagccccatgtgtggcccaccccaccaggccatccccataccttctggtttgaaggcgctgacactggcagagaggtaaagggtggggcattgagaatggaggctcccagggtccctgcccacttctgttttcctaatgtttttctctataaagggtcaggcccgtcagcatcactgatgggaataaaagtattaatgctttgtgacaaaaaaaaaaaaaaaaaaaaaaaaaaaaaaaaaaaaaaaaaaaaaaaaaaaaaaaaaaaaaaaaaaaaaaaaaaaaaaaaaaaaaaaaaaaaaaaaaaaagaaaagaaaaaaaagaaaaaaaaaaaaacaaaacgaaagaggcggcggcggcgcgcgggcgagagaagactcactgactgaggaggaagcgaagcaacacacacacgccccaccgcggttgtgtcagatagcgagggagccgccaagacgaaggggcggggcgaaataaacaaaagacgagcgaggggcacgcgagcacagaacaaaaccaaggaaggcggaggaggagacaccgacgacaagaggacagcaaaggagaagagaaccccccacacaggggggagagaggagagagagggagaacaaccccac

SEQ ID NO: 424067 - DNA, 1673 bp, Homo sapiens
aggaactgtactccccctgccctaccacgatctgcccatattagcacgaatgactctgcacatcgctgccagtgtggtccataaatagggacgtgcttgcgattttctgagaaagaggcctcacgctgtagagtcccgaaagcccaggagttgaatggggattcctgtgaagtctctaaggtgtctttgttcgcagatgtctgtctatattgcttccatgatgctggatcgactgtactggaacattcgatgtagctaattgttgagcctgcaagcaggatgtatctcctactgaccccgattgtgtactggatggggccatcatgtatacactctggataatgtagctacactgtgtactccaagttcttcagcttttggactcttggacctacaccagtgatttgccgggggctttcaggccttcagctacagactgaaggctgcactgttggcttccctacttttgaggttttcagacttggactggcttccttgctcctcagcttgcacgatggcctattgtgggacttcaccttgtcatcctgtcatactactagatattacactggaacttcagaagcaaattatgtctgaattggaaattctttataagtgcgattcatcatatatcattggattttatggagcattttttgtagaaaacaggatttcaatatgtacagaattcatggatgggggatctttggatgtatataggaaaatgccagaacatgtccttggaagaattgcagtagcagttgttaaaggccttacttatttgtggagtttaaagattttacatagagacgtgaagccctccaatatgctagtaaacacaagaggacaggttaagctgtgtgattttggagttagcactcagctggtgaattctatagccaagacgtatgttggaacaaatgcttatatggcgcctgaaaggatttcaggggagcagtatggaattcattctgatgtctggagcttaggaatctcttttatggagcttgctcttgggaggtttccatatcctcagattcagaaaaaccagggatctttaatgcctctccagcttctgcagtgcattgttgatgaggattcgcccgtccttccagttggagagttctcggagccatttgtacatttcatcactcagtgtatgcgaaaacagccaaaagaaaggccagcacctgaagaattgatgggccacccgttcatcgtgcagttcaatgatggaaatgccgccgtggtgtccatgtgggtgtgccgggcgctggaggagaggcggagccagcaggggcccccgtgaggctgccgcagggcactgaaagcccaggaccagtaaccaaggagaacaacccacccgtcgcccttctccgtatgctgcctgcgccagaagagctttgctgggccctggcttccctgccctcgccttcacctctgtcagcaggtggccttgcctggggagccccatgtgtggcccaccccaccaggccatccccataccttctggtttgaaggcgctgacactggcagagaggtaaagggtggggcattgagaatggaggctcccagggtccctgcccacttctgttttcctaatgtttttctctataaagggtcaggcccgtcagcatcactgatgggaataaaagtattaatgctttgtgaca

SEQ ID NO: 424068 - DNA, 2627 bp, Homo sapiens
ttccggagtaacagtgtcgccgccgccttcctcctcctcctctcgccgctaccgccgtcgccgccgccgcagccgccgccggtccgcgcggcctcgggtggccggagctcagcctgcgcgcgccgcgccctgtgtctccgggtggggcagaagactcgccccttgaacctcccgcggggactctccgtggtgtggcggccctggggctctttcttaatagccccggactgagtcccctccagtcgaggaccctctcctagtccactgacgagcggtggacacctgccgctgtatctcccccaaaccgagtccttgccctgctgcctcctcatacccacacggcggcagagaccttcaccatagcgttcgctcaactccagaaccttccgacctccgctagttcctgcgggcctttgcccgcttcccggtgcaccctccccgggagacacctcagacccccgacagcctgggcaggctcggtgcctgcgggtgcgttcctgatcacccctcccctcttccctccccctcatcctccattcccttgttttcaccctctgtcctctgcccgtcactccccttgtcacctcttggagccccctcctaaccagcggccagtgggtttcccataccccaggatgtgagcctctttaacctgtaatgctgtggctagcccttggcccctttcctgccatggagaaccaggtgctggtaattcgcatcaagatcccaaatagtggcgcggtggactggacagtgcactccgggccgcagttactcttcagggatgtgctggatgtgataggccaggttctgcctgaagcaacaactacagcatttgaatatgaagatgaagatggtgatcgaattacagtgagaagtgatgaggaaatgaaggcaatgctgtcatattattattccacagtaatggaacagcaagtaaatggacagttaatagagcctctgcagatatttccaagagcctgcaagcctcctggggaacggaacatacatggcctgaaggtgaatactcgggccggaccctctcaacacagcagcccagcagtctcagattcacttccaagcaatagcttaaagaagtcttctgctgaactgaaaaaaatactagccaatggccagatgaatgaacaagacatacgatatcgggacactcttggtcatggcaacggaggcacagtctacaaagcatatcatgtcccgagtgggaaaatattagctgtaaaggtcatactactagatattacactggaacttcagaagcaaattatgtctgaattggaaattctttataagtgcgattcatcatatatcattggattttatggagcattttttgtagaaaacaggatttcaatatgtacagaattcatggatgggggatctttggatgtatataggaaaatgccagaacatgtccttggaagaattgcagtagcagttgttaaaggccttacttatttgtggagtttaaagattttacatagagacgtgaagccctccaatatgctagtaaacacaagaggacaggttaagctgtgtgattttggagttagcactcagctggtgaattctatagccaagacgtatgttggaacaaatgcttatatggcgcctgaaaggatttcaggggagcagtatggaattcattctgatgtctggagcttaggaatctcttttatggagattcagaaaaaccagggatctttaatgcctctccagcttctgcagtgcattgttgatgaggattcgcccgtccttccagttggagagttctcggagccatttgtacatttcatcactcagtgtatgcgaaaacagccaaaagaaaggccagcacctgaagaattgatgggccacccgttcatcgtgcagttcaatgatggaaatgccgccgtggtgtccatgtgggtgtgccgggcgctggaggagaggcggagcctggcttccctgccctcgccttcacctctgtcagcaggtggccttgcctggggagccccatgtgtggcccaccccaccaggccatccccataccttctggtttgaaggcgctgacactggcagagaggtaaagggtggggcattgagaatggaggctcccagggtccctgcccacttctgttttcctaatgtttttctctataaagggtcaggcccgtcagcatcactgatgggaataaaagtattaatgctttgtgacaaaaaaaaaaaaaaaaaaaaaaaaaaaaaaaaaaaaaaaaaaaaaaaaaaaaaaaaaaaaaaaaaaaaaaaaaaaaaaaaaaaaaaaaaaaaaaaaaaaagaaaagaaaaaaaagaaaaaaaaaaaaacaaaacgaaagaggcggcggcggcgcgcgggcgagagaagactcactgactgaggaggaagcgaagcaacacacacacgccccaccgcggttgtgtcagatagcgagggagccgccaagacgaaggggcggggcgaaataaacaaaagacgagcgaggggcacgcgagcacagaacaaaaccaaggaaggcggaggaggagacaccgacgacaagaggacagcaaaggagaagagaaccccccacacaggggggagagaggagagagagggagaacaaccccac

SEQ ID NO: 424069 - DNA, 2063 bp, Homo sapiens
ttccggagtaacagtgtcgccgccgccttcctcctcctcctctcgccgctaccgccgtcgccgccgccgcagccgccgccggtccgcgcggcctcgggtggccggagctcagcctgcgcgcgccgcgccctgtgtctccgggtggggcagaagactcgccccttgaacctcccgcggggactctccgtggtgtggcggccctggggctctttcttaatagccccggactgagtcccctccagtcgaggaccctctcctagtccactgacgagcggtggacacctgccgctgtatctcccccaaaccgagtccttgccctgctgcctcctcatacccacacggcggcagagaccttcaccatagcgttcgctcaactccagaaccttccgacctccgctagttcctgcgggcctttgcccgcttcccggtgcaccctccccgggagacacctcagacccccgacagcctgggcaggctcggtgcctgcgggtgcgttcctgatcacccctcccctcttccctccccctcatcctccattcccttgttttcaccctctgtcctctgcccgtcactccccttgtcacctcttggagccccctcctaaccagcggccagtgggtttcccataccccaggatgtgagcctctttaacctgtaatgctgtggctagcccttggcccctttcctgccatggagaaccaggtgctggtaattcgcatcaagatcccaaatagtggcgcggtggactggacagtgcactccgggccgcagttactcttcagggatgtgctggatgtgataggccaggttctgcctgaagcaacaactacagcatttgaatatgaagatgaagatggtgatcgaattacagtgagaagtgatgaggaaatgaaggcaatgctgtcatattattattccacagtaatggaacagcaagtaaatggacagttaatagagcctctgcagatatttccaagagcctgcaagcctcctggggaacggaacatacatggcctgaaggtgaatactcgggccggaccctctcaacacagcagcccagcagtctcagattcacttccaagcaatagcttaaagaagtcttctgctgaactgaaaaaaatactagccaatggccagatgaatgaacaagacatacgatatcgggacactcttggtcatggcaacggaggcacagtctacaaagcatatcatgtcccgagtgggaaaatattagctgtaaaggtcatactactagatattacactggaacttcagaagcaaattatgtctgaattggaaattctttataagtgcgattcatcatatatcattggattttatggagcattttttgtagaaaacaggatttcaatatgtacagaattcatggatgggggatctttggatgtatataggaaaatgccagaacatgtccttggaagaattgcagtagcagttgttaaaggccttacttatttgtggagtttaaagattttacatagagacgtgaagccctccaatatgctagtaaacacaagaggacaggttaagctgtgtgattttggagttagcactcagctggtgaattctatagccaagacgtatgttggaacaaatgcttatatggcgcctgaaaggatttcaggggagcagtatggaattcattctgatgtctggagcttaggaatctcttttatggagcctctccagcttctgcagtgcattgttgatgaggattcgcccgtccttccagttggagagttctcggagccatttgtacatttcatcactcagtggtgagcccgtttacaaacatgccatgccctcaatgtaaatgatacatgccattaactcggcagctccgtgagaccttatggctctccctgcatccttttggagacaggagggacttcggggccttgggcagatggggcagcaaagctgaagaaattgtttaaattatgtaaacgttatttacacaaagggtcataagcatacttcagagcctttttcctgatttaataaactgctgaaagtcatgatacttctttaagcacaaatac

SEQ ID NO: 424070 - DNA, 1035 bp, Homo sapiens
cggccgcgaccgcggcagctcagcctcccgccgattgtatgttccaggcctcaatgaggagtccaaacatggagccattcaagcagcagaaggtggaggacttttatgacatcggagaggagctggggagggccacccgttcatcgtgcagttcaatgatggaaatgccgccgtggtgtccatgtgggtgtgccgggcgctggaggagaggcggagccagcaggggcccccgtgaggctgccgcagggcactgaaagcccaggaccagtaaccaaggagaacaacccacccgtcgcccttctccgtatgctgcctgcgccagaagagctttgctgggccctggcttccctgccctcgccttcacctctgtcagcaggtggccttgcctggggagccccatgtgtggcccaccccaccaggccatccccataccttctggtttgaaggcgctgacactggcagagaggtaaagggtggggcattgagaatggaggctcccagggtccctgcccacttctgttttcctaatgtttttctctataaagggtcaggcccgtcagcatcactgatgggaataaaagtattaatgctttgtgacaaaaaaaaacaaccaacccacacaaacacaacaagaaacacgcgaacgaaaaccccaacaccacaccgccaagacccaccacaagaccaacaacagacagcaaagaaacacagagacacatcaaccacacacaacccacagcaccaacacacggagggcgcgcggcccccactacaccacccgaccacccaagcaacacacgacgcgcgaccaccacaccagatgagccaacgagcgccccccagacgaggcaatagacaaacagaagacgcgggcgccgccagcaaagcacacgcaaacagaccaacaactcagacgcacgaataggaagagacgaacggcagggaggggagaagcggtaacaaccagagaaagaaggcaccgcaccacaaccagaatggacgcaaacacaacaggcgagccagccaccgaaacca

SEQ ID NO: 424071 - DNA, 1313 bp, Homo sapiens
agtttacaaagccagtgctgaagaatttagggagttgattctgatgtaagaagacaatggataaagtatttttcagaagtcagtacaaattggcagcaaatctaccaaaaacaaataataagagaaaaactatcagtgatggatttatcttcacatgtagcatgtactggtttaaatcagtgaataactacatagttattgaattcaaaaacttttatttagacctggtcatctattctcttaattaaatgaaatgaagtttatggagattcacttataagtcatgtgttgcttaatgacagggaaacattctgagaaatgcattgttaggtgatttcctcattgtgcaaacatcacagagtatacgtacacaaatctagatggtagcacctattacacacctaggctatatgctatagcttattgctcctaggctataaacctctacagcatgtttctgtactgaattctgtaggcaactgtagcagaatggaaagtatttatgtatctaaacatagaaaaatatatagtaaaaatacagcattgtaatcatatatgtgggccattaggtgatgcataactgtaatatctaatatttaatttattagatagttatctcaaacatttagtatctagtaaataaacttattttatattactatctaggggacttatttgaaaattactgcagaaatgatgacctggtaacatttggaagattttgttatggtgtcactgtcattttgacataccctatggaatgctttgtgacaagagaggtaattgccaatgtgttttttggtgggaatctttcatcggttttccacattgttgtaacagtgatggtcatcactgtagccacgcttgtgtcattgctgattgattgcctcgggatagttctagaactcaatggtgtgctctgtgcaactcccctcatttttatcattccatcagcctgttatctgaaactgtctgaagaaccaaggacacactccgataagattatgtcttgtgtcatgcttcccattggtgctgtggtgatggtttttggattcgtcatggctattacaaatactcaagactgcacccatgggcaggaaatgttctactgctttcctgacaatttctctctcacaaatacctcagagtctcatgttcagcagacaacacaactttctactttaaatattagtatctttcaatgagttgactgctttaaaaatatgtatgttttcatagactttaaaacacataacatttacgcttgctttagtctgtatttatgttatataaaattattattttggctttta

SEQ ID NO: 424072 - DNA, 2893 bp, Homo sapiens
actaaagggctcagaaaacagaaaaaactaaattccagagtcatggttttctggtggtttgtctcaatatttgaatagaaatcctaaattatctggaggagtagaagtcctgtaatcttttatattgggcttcttaaatatttctgtcaacagatcttatatcagggtgatctgcatatcattcagagttacgtactccacgggaaggttgtatgtaaaatcctccagctctgtaagccttgttatatcctcaatggagaaggggtcattccttttctaagatcactcttacacttttttattagacacacacacacccttccccaaccaaacttgtctaagtcctctgtctttcatactcttgtttagtctttaacttctccttattaaccagcttctttcccataatgtatagctttagtcggatctcaagcctcgtttccaacctatttcacccttccttgcctatcaagctctggttattctttcttccacacacatgccctgagtaactattctgtgcactgtcgccacccctttacatttccttttactccccagatactactaaatggcttccaccaccgttgcctgacttaagcacgtctcagaaaggtcccttttgaccccctcactctctttttggacctccatactgctaaatctctgacttgaaggtcctttcctggcttctgtgaattcctggcttttttcctttttagggtctgtgtctttcttccatctgtaaaacagctttacttcccagcatccatcatgatcattgctgttttctaacttgtccttcaccccatgactgagttaatttgcgctgaagacactttactctcaattatctacagtgtttccctaaatctgtgtctccaggttggatgtttctcatgtcgttaaccactggtcatccttccacaccttttctgtatttgcactcactgagcctatatgcatgtatcatgtggccatgaccttggccgtggggatgcacccataatcatcataagagaacacaaattattactgtgtatcagacattgtttcgaatgttttacatgcgtcagctcttttaacctttatgacaactccataatgttatttcccccctttaactgattagaaaactgaggtacagaaagattaaggaatttgtcaaagatttcacaattatgaaatttgggtttggggactggaagccactgcactggcttcagaatccatgtccttaaccactttattgcttctcataaggtgggtctttgtttcctggtcatcacttgtttttactaaaatgggtcaaactgtgctcatttatttataatctactattcttatttgacagtacatcttggccattccttcaagcaaatgagataaaccagactcactctttaatgcctgcataagctattgtgactgtagaaaagacggagaatgtctgggtttgaggatatgtgggaggggtggggagaaggagtagagaagggctaaggcatgcatgttgttttaggtgtgtttgagatgcctgaagaacatcagtgtatccccctaatttctgtcatgttactcaaaccagacacattgtggccatttctttttcctttatcattcccacgtccggccactgccccattcctttttgttccgtagtagaccctcaatatatatgtgtgtgttggtaaatggccatacacagcagggtattttttattattattttcagttccctcagcgcgtttaccacaaagctgtgcatataggtggcaccatatatggcgtaccttgacctcgaagagaatctacatggacttttatggacctacgtacacaattttagaaatcataataaatgaatgctggagtcctcaagaccccttccagatttgatttgctaggaagactcacaggactcagcattttgtcatactcaatggctatgatttaccacaccgaaagaatccagagcaaactcagcaaaaggctcaaacccaagtccagaggaaaccaggcacaatctttgagaatcttaatgaaatcacacaggatgtgcttcattgaagctccatctgggacttaaaacaacacacgtgagatgtgttccaggaagtcgtcttgagcacccattgctcagagtttatattggacttgctttctagcacataccacaattgtagacctccagaagaacaggaggtgttcagcgtaagacaatttaggcacacggagctacttctcattactgggaacaatgggaaacttcccaaaacctaaagtacagactccagccaaggatgaaccttgcaagatcaaagaatagcagtctctggcctgctctgttctctttttcacagtaacttaaatggaaaaatgctgagttagcttaagtttctgtaacaaacattaagcaaataaaattttctataacagaaataagccatagctttgagatgaaggcttatatacgtgtaaaccattgtaaccaagaaaaaaaaaaaaaaagtcagagtcacagtgaaaatacttaacaaactagccaggatttaattcagtgatgacagggaacagaggaagtcttgtgagaaaggatcttgcctctgcctagtatctttcacagataggcttcaagtggtttgatttgcagatacaccctttcttggcctttatttcggcaaagatgtgatgggtaggtaaatgccgtgttctttccctagcacgtatgtcagtttctcatccactctttgttcttgctattgaaagttgtagcttctggctacaacagagatagttgaagaatatggagttcgccataatttatcattaaatgtggataatttgagattaaagaatatgttgttgcaggcttagtcactttgatggatct

SEQ ID NO: 424073 - DNA, 2440 bp, Homo sapiens
actaaagggctcagaaaacagaaaaaactaaattccagagtcatggttttctggtggtttgtctcaatatttgaatagaaatcctaaattatctggaggagtagaagtcctgtaatcttttatattgggcttcttaaatatttctgtcaacagatcttatatcagggtgatctgcatatcattcagagttacgtactccacgggaaggttgtatgtaaaatcctccagctctgtaagccttgttatatcctcaatggagaaggggtcattccttttctaagatcactcttacacttttttattagacacacacacacccttccccaaccaaacttgtctaagtcctctgtctttcatactcttgtttagtctttaacttctccttattaaccagcttctttcccataatgtatagctttagtcggatctcaagcctcgtttccaacctatttcacccttccttgcctatcaagctctggttattctttcttccacacacatgccctgagtaactattctgtgcactgtcgccacccctttacatttccttttactccccagatactactaaatggcttccaccaccgttgcctgacttaagcacgtctcagaaaggtcccttttgaccccctcactctctttttggacctccatactgctaaatctctgacttgaaggtcctttcctggcttctgtgaattcctggcttttttcctttttagggtctgtgtctttcttccatctgtaaaacagctttacttcccagcatccatcatgatcattgctgttttctaacttgtccttcaccccatgactgagttaatttgcgctgaagacactttactctcaattatctacagtgtttccctaaatctgtgtctccaggttggatgtttctcatgtcgttaaccactggtcatccttccacaccttttctgtatttgcactcactgagcctatatgcatgtatcatgtggccatgaccttggccgtggggatgcacccataatcatcataagagaacacaaattattactgtgtatcagacattgtttcgaatgttttacatgcgtcagctcttttaacctttatgacaactccataatgttatttcccccctttaactgattagaaaactgaggtacagaaagattaaggaatttgtcaaagatttcacaattatgaaatttgggtttggggactggaagccactgcactggcttcagaatccatgtccttaaccactttattgcttctcataaggtgggtctttgtttcctggtcatcacttgtttttactaaaatgggtcaaactgtgctcatttatttataatctactattcttatttgacagtacatcttggccattccttcaagcaaatgagataaaccagactcactctttaatgcctgcataagctattgtgactgtagaaaagacggagaatgtctgggtttgaggatatgtgggaggggtggggagaaggagtagagaagggctaaggcatgcatgttgttttaggtgtgtttgagatgcctgaagaacatcagtgtatccccctaatttctgtcatgttactcaaaccagacacattgtggccatttctttttcctttatcattcccacgtccggccactgccccattcctttttgttccgtagtagaccctcaatatatatgtgtgtgttggtaaatggccatacacagcagggtattttttattattattttcagttccctcagcgcgtttaccacaaagctgtgcatataggtggcaccatatatggcgtaccttgacctcgaagagaatctacatggacttttatggacctacgtacacaattttagaaatcataataaatgaatgctggagtcctcaagaccccttccagatttgatttgctaggaagactcacaggactcagcattttgtcatactcaatggctatgatttaccacaccgaaagaatccagagcaaactcagcaaaaggctcaaacccaagtccagaggaaaccaggcacaatctttgagaatcttaatgaaatcacacaggatgtgcttcattgaagctccatctgggacttaaaacaacacacgtgagatgtgttccaggaagtcgtcttgagcacccattgctcagagtttatattggacttgctttctagcacataccacaattgtagacctccagaagaacaggaggtgttcagcgtaagacaatttaggcacacggagctacttctcattactgggaacaatgggaaacttcccaaaacctaaagtacagactccagccaaggatgaaccttgcaagatcaaagaatagcagtctctggcctgctctgttctctttttcacagtaacttaaatggaaaaatgctgagttagcttaagtttctgtaacaaacattaagcaaataaaattttctataacaga

SEQ ID NO: 424074 - DNA, 3578 bp, Homo sapiens
  misc_feature (1)..(1): n is a, c, g, or t
ncctgctctggggcaaggttgggggagctgccccttgtcctgcacttcagcagctacagggctgtgggtgaaggagggcctgaggattgtgagctcagtgcttttaggcttgagctgcccttggggatcccccctggaggcagagctggaccttggggagggaccctgtggcggacgtccttctatggccgcttcaggcacttcttggatatcatcgaccctcgcacactctttgtcactgagagacgtctcagagaggctgtgcagctgctggaggactataagcatgggaccctgcgcccgggggtcaccaatgaacagctctggagtgcacagaaaatcaagcaggctattctacatccggacaccaatgagaagatcttcatgccatttagaatgtcaggttatattccttttgggacgccaattgccctgctggagacggcgctgacgcgagtggtcctgcccatgcccatcctggtgctacccccgatcgtcatgtccatgctggagaaattgaaacatcccaattagagccggagatagcccaggccacgagcagccggacagtggtgtacaacaaggggttgtgagtgtggtcagcggcctggggacggagcactgtgcagccggggagctgaggggcagggccgtagactcacggctgcacctgcagggagcagcacgccaaccccagcagtcctgggccccctgggagagtgctcaacctacagtggagggagactgacccattcacattttaacataggcaagaggagttctaacacatttcgtacaaaaaaataatcaagtgcatttctgggccttatgtggggttgtcaaaactccactcagcacaattatgtgtgaagctgaaaaattgtagagtgcccatggggtagaagtagaatccttttatactttggttccttttttatttttattttttatcagaatcaaatctgagccttagtttcagctgaccagaagtggcaggaggacaggtggaggcgagccagattaggcctggagttgggctggtttggtggccaggctggtaaatttaggatattacaatggccagcccagatggctccctgggctggcatggggaggggagagaaggtggtctgcaccccacaggatgaactagccatgactagggtcctcaggcagtggcccagggaatcagggagcactggaggcctctgcaagattctgtgggcagctggctctgaatgtagccagcccacatccattccagagctgcagaaccagtccctctgagtgaagtccagtgaccctggagctagggtcccccttcgtggagctctaactgattcagggcccctgaagtgaccccagctccaggcaggaaaccccgagaaggaatggtgcttggcaggaaccatggacctgcacttggcctcttcgggaagatcctccttccaggccccaggctggatgctgggttctggggctgagagtggggctagactgggctggctgccttctgcggagcttctccagccaccaaggctgcctgccccatcccatccctttctaagcaggaaggtctcatgcctgagaatgcctaggccagctccttagacacctatcagagaagcagcatcaacctaggagcagtgggccctggctctgtcactaaatggcagtgagatgtcagacaaattcattcccttctctcagcctccactccctgtctgaaaccagaagactggatcaaggggttcccactggctcctccagcaagacctcgtctttgcttgtcctgctcagatgctggtcatcctgggcatgtccccagtgtggactctggactgggaagggggcaggcccctttggacctgcagttggcctcagcagaaggccttgccttgtgtatgtgactccatatcccgggagcagttgacctttgccaaacactttacagttctggaggaggaggtaacatagatgcctgggcctgatggtggggccatacccatgtgtcgcctctcactctggcagcctcagaggccccttgctgctggctcccatctccctcccatttgcagaccaggaaggaagagcaagctgtacaaagggaagcagagcctggggtgggtgtgagcagggtgacccctcatctgaaaggcccaaaccagggggaagcaccagcctcagtgcagccccctcctgaccccacctagaatggaagcctccacctgcagccccaggcctccctcccccggggtctccacctcaggggagacttaggccagaggtgaacattcatgtgtaggaagaggccgctgcagggtggcatcttagggtaggggaagtgtgctgaggtgggccttccatgggcatggccgttgcctctctgccagccgctggtgcccaccagctggctctgcagcacattgccctgaggggcctgccactctcctgaggagcagcccacctgctgcccgtgaggagggggagaagggttagacaagcctggaggacaaaacagcgggagtgtgggggtgccatggtgttggaggggcaggcctttttgagccaatcccaccataatgtgaatatgccagtgactgctgcgctgtgctggtctctaggcctgaactaggtgctggcatgtctgggtcgtcttttgaaaagctcacttcaagctcaccctgctcctacctatcataaggtcttattcttgtgcactttatcttgggaccaaaactgcctacccaccccttcccgccctccccctgccagaggcctggtgccctggcccagcctgtggcctcagcatctcataactcatttgctttgtctcccggatgatttccgtcatgctcccaaatgcagcttcaggtgagccaaggggtctgctcctgtggcggtgcagtggcaaaggatccagatagcctagggtgagggtgacagagggacagtgggctatgccactaggccctggtctggctttggaaagacctgtgaggggaaaccttcacccagcacccatgccccactctgctgaggccagaggaagggaggcctgaggggcagattggttcatgcctggggtggaggctaagcctggacacagtcagggcggggctggccagctgtgcgagaacacaagccacgcctgcgatggtgctgcacccctggtgtccctgcctggccctcctctggtcacttcaaacatgccctcaggcttggggatgcccttcttccattcccagacagcagtgtgagggtgcagggaccaagatgtcaagctggccgtggagtcgagctggccgacggacccctttcacctggttatgagccgacttctttggtgttctggcctctggcctgggaaaagggcaggagcctagaggaggaaaaaggctggtggacagacccagggtggtcttcaagcctggcccagtgagagtgaggcccccgcacgcaagcctcagccactcccaggggcctttgcagcgtctttttaacctcagaaaatttctcaatctatgtgatttgtgtaatactaatgagctttgggcaataaatacgggatttaaagc

SEQ ID NO: 424075 - DNA, 1813 bp, Homo sapiens
  misc_feature (676)..(676): n is a, c, g, or t
  misc_feature (1236)..(1236): n is a, c, g, or t
  misc_feature (1788)..(1788): n is a, c, g, or t
ttcgagcggctgctcagggtcgctccgggttgtgcagctgcccgcccgggacgcaaagttctagtctggccctggatgggaagttggcgtggccgggatgccttctaactttttcccccggtggggactgacgttcctttcgagctgctggcggtgccgccgggcagcgtcgcgccccgcggtcactccccagccctggcccccaagccgggctcggcgcgcgcagcaggttgagggggcgagtgccgaggcgagcggcggtccggcgtcccccgtccctgctctccatctcgggctgaggattcgctgacgcagcaagccggccgatgccctgaggggacgcagccagggcgtgcgggggaaacgctgtgtcatcccctggggccgtcgtccctccgaggggctgccgcctgggaacccccccccagcctcttcctcgctgtgttctccgcggagggtctcccgcgcccgggcccccgcgccgccggggactggctctgggcacacccgctcaggctcttcggggcacggcgacaggggtcctttccctccgggacctcctctggggcgtcgccgactcggccctagactgcggaggcgggggtggaacgcggagcccgggcgcctggttgggcccggagaccggagccggggaggggccgctcccgcgccgcanaccctcgggctcccgcgcctcccgcaccaatgagacggaatttattaggaaacaggcagagagaccgctgaagtgaaccggggcttgccaggggtgggcggcagccgaggcggccagaaaagaactttgaaggaagaaaggaaattgtgctaagagacgtctcagagaggctgtgcagctgctggaggactataagcatgggaccctgcgcccgggggtcaccaatgaacagctctggagtgcacagaaaatcaagcaggctattctacatccggacaccaatgagaagatcttcatgccatttagaatgtcaggttatattccttttgggacgccaattgtaagtgttaccttcaaaggatttccttttctaaaaaattattttaaatgtctaactttatgttattgctcacgggtatttgactgaattgttgatttaggataagtcaattcctggagggaaattaccaaataaaatgatatgtatttcttaccacatctcttgatgctgattggcaaacctcttttcataaaaagcctgatgacttaaatccagcgtngagttgaaaattgccttcttccctgcacgttttctgtccccactgttgtcattagcacctgctagtcatagggaagttttctcaaagaacttgggaagtaggagtagaagcatgccttctgaaaaatcaaagtttaaaattaattcagaaagaattttcagcattctttttgttcagttttagaatcaggattatgtttactccttatttttattggaataaaacatacagaaaggtgcattcatcataaatgtacagcttggtaaattttcaaaaagcaagcatatccagggctgggcgcggtggctcacgcctgtaatcccagcactttgggaggccaaggcaggcagatcatgaggtcagaagatcgagaccatcctggccaacacagtgaaaccccgtctctactaaaaatacaaaaaattagctgagagtggtggcgggcacctgtagtcccagctactcggaaggctgaggcaggagaatgacatgaacccgggaggcggagctttcagtgagccgagatcgcgccagtgcactccaggctgggcnacagagcgagactcggtctcaaaaa

SEQ ID NO: 424076 - DNA, 1681 bp, Homo sapiens
  misc_feature (676)..(676): n is a, c, g, or t
ttcgagcggctgctcagggtcgctccgggttgtgcagctgcccgcccgggacgcaaagttctagtctggccctggatgggaagttggcgtggccgggatgccttctaactttttcccccggtggggactgacgttcctttcgagctgctggcggtgccgccgggcagcgtcgcgccccgcggtcactccccagccctggcccccaagccgggctcggcgcgcgcagcaggttgagggggcgagtgccgaggcgagcggcggtccggcgtcccccgtccctgctctccatctcgggctgaggattcgctgacgcagcaagccggccgatgccctgaggggacgcagccagggcgtgcgggggaaacgctgtgtcatcccctggggccgtcgtccctccgaggggctgccgcctgggaacccccccccagcctcttcctcgctgtgttctccgcggagggtctcccgcgcccgggcccccgcgccgccggggactggctctgggcacacccgctcaggctcttcggggcacggcgacaggggtcctttccctccgggacctcctctggggcgtcgccgactcggccctagactgcggaggcgggggtggaacgcggagcccgggcgcctggttgggcccggagaccggagccggggaggggccgctcccgcgccgcanaccctcgggctcccgcgcctcccgcaccaatgagacggaatttattaggaaacaggcagagagaccgctgaagtgaaccggggcttgccaggggtgggcggcagccgaggcggccagaaaagaactttgaaggaagaaaggaaattgtgctaagacgtccttctatggccgcttcaggcacttcttggatatcatcgaccctcgcacactctttgtcactgaggctcacagctggaggaaaatttgcctcaggatgaatcacacctttgggtctcatccatacctaatttagaggattctggatgagactctgacttcagacttttgagttgctgctggaatgactgacttttggggctactgagatggaatgaatatttgtgagaaggacataaattttggggggccagggtgagatgctatggctgaaatgtgtcccatacaaaattcaggtgttgaaacttaatggcaaatgtgatagtattaagaggtgggatctttaagaggcaattaggccatgagggtccctccctcatgaatggaattaaggcccttgtaaaagaggcctggccgggtatggtggctcacggctgtaatcccagcactttgggaggctaaggctcaagaatcacttgagcccaggagtttgagaccagcctgggcaacatggccagaccccaactcttaaaaaaatttttcaaaaattagctgggtgtcgtggcatgcacctatagtcccagctactcgaatcggttgagcctgggaggtcgaggttgcagtgaactgtgatcacgccactgcactccagtctgggtgacagagcaagacactatctcaaaaaataaaagaggtttcacacagggtttggccctcttgccgttctgttctgttgagtacacagccttccttccctcagaaagatgccctcaccagataccaaatgctggttcttgatcttggacttccagcttccagaactgtgagaaataaatttctgttctttat

SEQ ID NO: 424077 - DNA, 450 bp, Homo sapiens
agtggccatggcggatacagcgactacagcatcggcggcggcggctagtgccgctagcgcctcgagcgatgcacctcctttccaactgggcaaaccccgcttccagcagacgtccttctatggccgcttcaggcacttcttggatatcatcgaccctcgcacactctttgtcactgaggaagaaggctgtctttgttctaagaatgccttgaacaaagcttcagaggaggaggttgccctgcttgacagaggagaagaatggtgcattttgatcctaaatggagaaaggagagggaaggaagaggaggaaaaaaacagcgggaaggagagcatgatactgagatgagctgaaagaccaataaagaaatgccacaatgaggtgtggctgggggctcttttgagatcagtgttgctgactgtttttgtgagagctgtgaatttgcgctgtta

SEQ ID NO: 424078 - DNA, 515 bp, Homo sapiens
  misc_feature (1)..(1): n is a, c, g, or t
ncctgctctggggcaaggttgggggagctgccccttgtcctgcacttcagcagctacagggctgtgggtgaaggagggcctgaggattgtgagctcagtgcttttaggcttgagctgcccttggggatcccccctggaggcagagctggaccttggggagggaccctgtggcggacgtccttctatggccgcttcaggcacttcttggatatcatcgaccctcgcacactctttgtcactgaggaagaaggctgtctttgttctaagaatgccttgaacaaagcttcagaggaggaggttgccctgcttgacagaggagaagaatggtgcattttgatcctaaatggagaaaggagagggaaggaagaggaggaaaaaaacagcgggaaggagagcatgatactgagatgagctgaaagaccaataaagaaatgccacaatgaggtgtggctgggggctcttttgagatcagtgttgctgactgtttttgtgagagctgtgaatttgcgctgtta

SEQ ID NO: 424079 - DNA, 4015 bp, Homo sapiens
agtggccatggcggatacagcgactacagcatcggcggcggcggctagtgccgctagcgcctcgagcgatgcacctcctttccaactgggcaaaccccgcttccagcagacgtccttctatggccgcttcaggcacttcttggatatcatcgaccctcgcacactctttgtcactgagagacgtctcagagaggctgtgcagctgctggaggactataagcatgggaccctgcgcccgggggtcaccaatgaacagctctggagtgcacagaaaatcaagcaggctattctacatccggacaccaatgagaagatcttcatgccatttagaatgtcaggttatattccttttgggacgccaattgtagtcggtcttctcttgcccaaccagacactggcatccactgtcttctggcagtggctgaaccagagccacaatgcctgtgtcaactatgcaaaccgcaatgcgaccaagccttcacctgcatccaagttcatccagggatacctgggagctgtcatcagcgccgtctccattgctgtgggccttaatgtcctggttcagaaagccaacaagttcaccccagccacccgccttctcatccagaggtttgtgccgttccctgctgtagccagtgccaatatctgcaatgtggtcctgatgcggtacggggagctggaggaagggattgatgtcctggacagcgatggcaacctcgtgggctcctccaagatcgcagcccgacacgccctgctggagacggcgctgacgcgagtggtcctgcccatgcccatcctggtgctacccccgatcgtcatgtccatgctggagaagacggctctcctgcaggcacgcccccggctgctcctccctgtgcaaagcctcgtgtgcctggcagccttcggcctggccctgccgctggccatcagcctcttcccgcaaatgtcagagattgaaacatcccaattagagccggagatagcccaggccacgagcagccggacagtggtgtacaacaaggggttgtgagtgtggtcagcggcctggggacggagcactgtgcagccggggagctgaggggcagggccgtagactcacggctgcacctgcagggagcagcacgccaaccccagcagtcctgggccccctgggagagtgctcaacctacagtggagggagactgacccattcacattttaacataggcaagaggagttctaacacatttcgtacaaaaaaataatcaagtgcatttctgggccttatgtggggttgtcaaaactccactcagcacaattatgtgtgaagctgaaaaattgtagagtgcccatggggtagaagtagaatccttttatactttggttccttttttatttttattttttatcagaatcaaatctgagccttagtttcagctgaccagaagtggcaggaggacaggtggaggcgagccagattaggcctggagttgggctggtttggtggccaggctggtaaatttaggatattacaatggccagcccagatggctccctgggctggcatggggaggggagagaaggtggtctgcaccccacaggatgaactagccatgactagggtcctcaggcagtggcccagggaatcagggagcactggaggcctctgcaagattctgtgggcagctggctctgaatgtagccagcccacatccattccagagctgcagaaccagtccctctgagtgaagtccagtgaccctggagctagggtcccccttcgtggagctctaactgattcagggcccctgaagtgaccccagctccaggcaggaaaccccgagaaggaatggtgcttggcaggaaccatggacctgcacttggcctcttcgggaagatcctccttccaggccccaggctggatgctgggttctggggctgagagtggggctagactgggctggctgccttctgcggagcttctccagccaccaaggctgcctgccccatcccatccctttctaagcaggaaggtctcatgcctgagaatgcctaggccagctccttagacacctatcagagaagcagcatcaacctaggagcagtgggccctggctctgtcactaaatggcagtgagatgtcagacaaattcattcccttctctcagcctccactccctgtctgaaaccagaagactggatcaaggggttcccactggctcctccagcaagacctcgtctttgcttgtcctgctcagatgctggtcatcctgggcatgtccccagtgtggactctggactgggaagggggcaggcccctttggacctgcagttggcctcagcagaaggccttgccttgtgtatgtgactccatatcccgggagcagttgacctttgccaaacactttacagttctggaggaggaggtaacatagatgcctgggcctgatggtggggccatacccatgtgtcgcctctcactctggcagcctcagaggccccttgctgctggctcccatctccctcccatttgcagaccaggaaggaagagcaagctgtacaaagggaagcagagcctggggtgggtgtgagcagggtgacccctcatctgaaaggcccaaaccagggggaagcaccagcctcagtgcagccccctcctgaccccacctagaatggaagcctccacctgcagccccaggcctccctcccccggggtctccacctcaggggagacttaggccagaggtgaacattcatgtgtaggaagaggccgctgcagggtggcatcttagggtaggggaagtgtgctgaggtgggccttccatgggcatggccgttgcctctctgccagccgctggtgcccaccagctggctctgcagcacattgccctgaggggcctgccactctcctgaggagcagcccacctgctgcccgtgaggagggggagaagggttagacaagcctggaggacaaaacagcgggagtgtgggggtgccatggtgttggaggggcaggcctttttgagccaatcccaccataatgtgaatatgccagtgactgctgcgctgtgctggtctctaggcctgaactaggtgctggcatgtctgggtcgtcttttgaaaagctcacttcaagctcaccctgctcctacctatcataaggtcttattcttgtgcactttatcttgggaccaaaactgcctacccaccccttcccgccctccccctgccagaggcctggtgccctggcccagcctgtggcctcagcatctcataactcatttgctttgtctcccggatgatttccgtcatgctcccaaatgcagcttcaggtgagccaaggggtctgctcctgtggcggtgcagtggcaaaggatccagatagcctagggtgagggtgacagagggacagtgggctatgccactaggccctggtctggctttggaaagacctgtgaggggaaaccttcacccagcacccatgccccactctgctgaggccagaggaagggaggcctgaggggcagattggttcatgcctggggtggaggctaagcctggacacagtcagggcggggctggccagctgtgcgagaacacaagccacgcctgcgatggtgctgcacccctggtgtccctgcctggccctcctctggtcacttcaaacatgccctcaggcttggggatgcccttcttccattcccagacagcagtgtgagggtgcagggaccaagatgtcaagctggccgtggagtcgagctggccgacggacccctttcacctggttatgagccgacttctttggtgttctggcctctggcctgggaaaagggcaggagcctagaggaggaaaaaggctggtggacagacccagggtggtcttcaagcctggcccagtgagagtgaggcccccgcacgcaagcctcagccactcccaggggcctttgcagcgtctttttaacctcagaaaatttctcaatctatgtgatttgtgtaatactaatgagctttgggcaataaatacgggatttaaagc

SEQ ID NO: 424080 - DNA, 4620 bp, Homo sapiens
  misc_feature (676)..(676): n is a, c, g, or t
ttcgagcggctgctcagggtcgctccgggttgtgcagctgcccgcccgggacgcaaagttctagtctggccctggatgggaagttggcgtggccgggatgccttctaactttttcccccggtggggactgacgttcctttcgagctgctggcggtgccgccgggcagcgtcgcgccccgcggtcactccccagccctggcccccaagccgggctcggcgcgcgcagcaggttgagggggcgagtgccgaggcgagcggcggtccggcgtcccccgtccctgctctccatctcgggctgaggattcgctgacgcagcaagccggccgatgccctgaggggacgcagccagggcgtgcgggggaaacgctgtgtcatcccctggggccgtcgtccctccgaggggctgccgcctgggaacccccccccagcctcttcctcgctgtgttctccgcggagggtctcccgcgcccgggcccccgcgccgccggggactggctctgggcacacccgctcaggctcttcggggcacggcgacaggggtcctttccctccgggacctcctctggggcgtcgccgactcggccctagactgcggaggcgggggtggaacgcggagcccgggcgcctggttgggcccggagaccggagccggggaggggccgctcccgcgccgcanaccctcgggctcccgcgcctcccgcaccaatgagacggaatttattaggaaacaggcagagagaccgctgaagtgaaccggggcttgccaggggtgggcggcagccgaggcggccagaaaagaactttgaaggaagaaaggaaattgtgctaagacgtccttctatggccgcttcaggcacttcttggatatcatcgaccctcgcacactctttgtcactgagagacgtctcagagaggctgtgcagctgctggaggactataagcatgggaccctgcgcccgggggtcaccaatgaacagctctggagtgcacagaaaatcaagcaggctattctacatccggacaccaatgagaagatcttcatgccatttagaatgtcaggttatattccttttgggacgccaattgtagtcggtcttctcttgcccaaccagacactggcatccactgtcttctggcagtggctgaaccagagccacaatgcctgtgtcaactatgcaaaccgcaatgcgaccaagccttcacctgcatccaagttcatccagggatacctgggagctgtcatcagcgccgtctccattgctgtgggccttaatgtcctggttcagaaagccaacaagttcaccccagccacccgccttctcatccagaggtttgtgccgttccctgctgtaggccctgctggagacggcgctgacgcgagtggtcctgcccatgcccatcctggtgctacccccgatcgtcatgtccatgctggagaagacggctctcctgcaggcacgcccccggctgctcctccctgtgcaaagcctcgtgtgcctggcagccttcggcctggccctgccgctggccatcagcctcttcccgcaaatgtcagagattgaaacatcccaattagagccggagatagcccaggccacgagcagccggacagtggtgtacaacaaggggttgtgagtgtggtcagcggcctggggacggagcactgtgcagccggggagctgaggggcagggccgtagactcacggctgcacctgcagggagcagcacgccaaccccagcagtcctgggccccctgggagagtgctcaacctacagtggagggagactgacccattcacattttaacataggcaagaggagttctaacacatttcgtacaaaaaaataatcaagtgcatttctgggccttatgtggggttgtcaaaactccactcagcacaattatgtgtgaagctgaaaaattgtagagtgcccatggggtagaagtagaatccttttatactttggttccttttttatttttattttttatcagaatcaaatctgagccttagtttcagctgaccagaagtggcaggaggacaggtggaggcgagccagattaggcctggagttgggctggtttggtggccaggctggtaaatttaggatattacaatggccagcccagatggctccctgggctggcatggggaggggagagaaggtggtctgcaccccacaggatgaactagccatgactagggtcctcaggcagtggcccagggaatcagggagcactggaggcctctgcaagattctgtgggcagctggctctgaatgtagccagcccacatccattccagagctgcagaaccagtccctctgagtgaagtccagtgaccctggagctagggtcccccttcgtggagctctaactgattcagggcccctgaagtgaccccagctccaggcaggaaaccccgagaaggaatggtgcttggcaggaaccatggacctgcacttggcctcttcgggaagatcctccttccaggccccaggctggatgctgggttctggggctgagagtggggctagactgggctggctgccttctgcggagcttctccagccaccaaggctgcctgccccatcccatccctttctaagcaggaaggtctcatgcctgagaatgcctaggccagctccttagacacctatcagagaagcagcatcaacctaggagcagtgggccctggctctgtcactaaatggcagtgagatgtcagacaaattcattcccttctctcagcctccactccctgtctgaaaccagaagactggatcaaggggttcccactggctcctccagcaagacctcgtctttgcttgtcctgctcagatgctggtcatcctgggcatgtccccagtgtggactctggactgggaagggggcaggcccctttggacctgcagttggcctcagcagaaggccttgccttgtgtatgtgactccatatcccgggagcagttgacctttgccaaacactttacagttctggaggaggaggtaacatagatgcctgggcctgatggtggggccatacccatgtgtcgcctctcactctggcagcctcagaggccccttgctgctggctcccatctccctcccatttgcagaccaggaaggaagagcaagctgtacaaagggaagcagagcctggggtgggtgtgagcagggtgacccctcatctgaaaggcccaaaccagggggaagcaccagcctcagtgcagccccctcctgaccccacctagaatggaagcctccacctgcagccccaggcctccctcccccggggtctccacctcaggggagacttaggccagaggtgaacattcatgtgtaggaagaggccgctgcagggtggcatcttagggtaggggaagtgtgctgaggtgggccttccatgggcatggccgttgcctctctgccagccgctggtgcccaccagctggctctgcagcacattgccctgaggggcctgccactctcctgaggagcagcccacctgctgcccgtgaggagggggagaagggttagacaagcctggaggacaaaacagcgggagtgtgggggtgccatggtgttggaggggcaggcctttttgagccaatcccaccataatgtgaatatgccagtgactgctgcgctgtgctggtctctaggcctgaactaggtgctggcatgtctgggtcgtcttttgaaaagctcacttcaagctcaccctgctcctacctatcataaggtcttattcttgtgcactttatcttgggaccaaaactgcctacccaccccttcccgccctccccctgccagaggcctggtgccctggcccagcctgtggcctcagcatctcataactcatttgctttgtctcccggatgatttccgtcatgctcccaaatgcagcttcaggtgagccaaggggtctgctcctgtggcggtgcagtggcaaaggatccagatagcctagggtgagggtgacagagggacagtgggctatgccactaggccctggtctggctttggaaagacctgtgaggggaaaccttcacccagcacccatgccccactctgctgaggccagaggaagggaggcctgaggggcagattggttcatgcctggggtggaggctaagcctggacacagtcagggcggggctggccagctgtgcgagaacacaagccacgcctgcgatggtgctgcacccctggtgtccctgcctggccctcctctggtcacttcaaacatgccctcaggcttggggatgcccttcttccattcccagacagcagtgtgagggtgcagggaccaagatgtcaagctggccgtggagtcgagctggccgacggacccctttcacctggttatgagccgacttctttggtgttctggcctctggcctgggaaaagggcaggagcctagaggaggaaaaaggctggtggacagacccagggtggtcttcaagcctggcccagtgagagtgaggcccccgcacgcaagcctcagccactcccaggggcctttgcagcgtctttttaacctcagaaaatttctcaatctatgtgatttgtgtaatactaatgagctttgggcaataaatacgggatttaaagc

SEQ ID NO: 424081 - DNA, 4618 bp, Homo sapiens
  misc_feature (676)..(676): n is a, c, g, or t
ttcgagcggctgctcagggtcgctccgggttgtgcagctgcccgcccgggacgcaaagttctagtctggccctggatgggaagttggcgtggccgggatgccttctaactttttcccccggtggggactgacgttcctttcgagctgctggcggtgccgccgggcagcgtcgcgccccgcggtcactccccagccctggcccccaagccgggctcggcgcgcgcagcaggttgagggggcgagtgccgaggcgagcggcggtccggcgtcccccgtccctgctctccatctcgggctgaggattcgctgacgcagcaagccggccgatgccctgaggggacgcagccagggcgtgcgggggaaacgctgtgtcatcccctggggccgtcgtccctccgaggggctgccgcctgggaacccccccccagcctcttcctcgctgtgttctccgcggagggtctcccgcgcccgggcccccgcgccgccggggactggctctgggcacacccgctcaggctcttcggggcacggcgacaggggtcctttccctccgggacctcctctggggcgtcgccgactcggccctagactgcggaggcgggggtggaacgcggagcccgggcgcctggttgggcccggagaccggagccggggaggggccgctcccgcgccgcanaccctcgggctcccgcgcctcccgcaccaatgagacggaatttattaggaaacaggcagagagaccgctgaagtgaaccggggcttgccaggggtgggcggcagccgaggcggccagaaaagaactttgaaggaagaaaggaaattgtgctaagacgtccttctatggccgcttcaggcacttcttggatatcatcgaccctcgcacactctttgtcactgagagacgtctcagagaggctgtgcagctgctggaggactataagcatgggaccctgcgcccgggggtcaccaatgaacagctctggagtgcacagaaaatcaagcaggctattctacatccggacaccaatgagaagatcttcatgccatttagaatgtcaggttatattccttttgggacgccaattgtagtcggtcttctcttgcccaaccagacactggcatccactgtcttctggcagtggctgaaccagagccacaatgcctgtgtcaactatgcaaaccgcaatgcgaccaagccttcacctgcatccaagttcatccagggatacctgggagctgtcatcagcgccgtctccattgctgtgggccttaatgtcctggttcagaaagccaacaagttcaccccagccacccgccttctcatccagaggtttgtgccgttccctgctgtagccagtgccaatatctgcaatgtggtcctgatgcggtacggggagctggaggaagggattgatgtcctggacagcgatggcaacctcgtgggctcctccaagatcgcagcccgacacgccctgctggagacggcgctgacgcgagtggtcctgcccatgcccatcctggtgctacccccgatcgtcatgtccatgctggagaaattgaaacatcccaattagagccggagatagcccaggccacgagcagccggacagtggtgtacaacaaggggttgtgagtgtggtcagcggcctggggacggagcactgtgcagccggggagctgaggggcagggccgtagactcacggctgcacctgcagggagcagcacgccaaccccagcagtcctgggccccctgggagagtgctcaacctacagtggagggagactgacccattcacattttaacataggcaagaggagttctaacacatttcgtacaaaaaaataatcaagtgcatttctgggccttatgtggggttgtcaaaactccactcagcacaattatgtgtgaagctgaaaaattgtagagtgcccatggggtagaagtagaatccttttatactttggttccttttttatttttattttttatcagaatcaaatctgagccttagtttcagctgaccagaagtggcaggaggacaggtggaggcgagccagattaggcctggagttgggctggtttggtggccaggctggtaaatttaggatattacaatggccagcccagatggctccctgggctggcatggggaggggagagaaggtggtctgcaccccacaggatgaactagccatgactagggtcctcaggcagtggcccagggaatcagggagcactggaggcctctgcaagattctgtgggcagctggctctgaatgtagccagcccacatccattccagagctgcagaaccagtccctctgagtgaagtccagtgaccctggagctagggtcccccttcgtggagctctaactgattcagggcccctgaagtgaccccagctccaggcaggaaaccccgagaaggaatggtgcttggcaggaaccatggacctgcacttggcctcttcgggaagatcctccttccaggccccaggctggatgctgggttctggggctgagagtggggctagactgggctggctgccttctgcggagcttctccagccaccaaggctgcctgccccatcccatccctttctaagcaggaaggtctcatgcctgagaatgcctaggccagctccttagacacctatcagagaagcagcatcaacctaggagcagtgggccctggctctgtcactaaatggcagtgagatgtcagacaaattcattcccttctctcagcctccactccctgtctgaaaccagaagactggatcaaggggttcccactggctcctccagcaagacctcgtctttgcttgtcctgctcagatgctggtcatcctgggcatgtccccagtgtggactctggactgggaagggggcaggcccctttggacctgcagttggcctcagcagaaggccttgccttgtgtatgtgactccatatcccgggagcagttgacctttgccaaacactttacagttctggaggaggaggtaacatagatgcctgggcctgatggtggggccatacccatgtgtcgcctctcactctggcagcctcagaggccccttgctgctggctcccatctccctcccatttgcagaccaggaaggaagagcaagctgtacaaagggaagcagagcctggggtgggtgtgagcagggtgacccctcatctgaaaggcccaaaccagggggaagcaccagcctcagtgcagccccctcctgaccccacctagaatggaagcctccacctgcagccccaggcctccctcccccggggtctccacctcaggggagacttaggccagaggtgaacattcatgtgtaggaagaggccgctgcagggtggcatcttagggtaggggaagtgtgctgaggtgggccttccatgggcatggccgttgcctctctgccagccgctggtgcccaccagctggctctgcagcacattgccctgaggggcctgccactctcctgaggagcagcccacctgctgcccgtgaggagggggagaagggttagacaagcctggaggacaaaacagcgggagtgtgggggtgccatggtgttggaggggcaggcctttttgagccaatcccaccataatgtgaatatgccagtgactgctgcgctgtgctggtctctaggcctgaactaggtgctggcatgtctgggtcgtcttttgaaaagctcacttcaagctcaccctgctcctacctatcataaggtcttattcttgtgcactttatcttgggaccaaaactgcctacccaccccttcccgccctccccctgccagaggcctggtgccctggcccagcctgtggcctcagcatctcataactcatttgctttgtctcccggatgatttccgtcatgctcccaaatgcagcttcaggtgagccaaggggtctgctcctgtggcggtgcagtggcaaaggatccagatagcctagggtgagggtgacagagggacagtgggctatgccactaggccctggtctggctttggaaagacctgtgaggggaaaccttcacccagcacccatgccccactctgctgaggccagaggaagggaggcctgaggggcagattggttcatgcctggggtggaggctaagcctggacacagtcagggcggggctggccagctgtgcgagaacacaagccacgcctgcgatggtgctgcacccctggtgtccctgcctggccctcctctggtcacttcaaacatgccctcaggcttggggatgcccttcttccattcccagacagcagtgtgagggtgcagggaccaagatgtcaagctggccgtggagtcgagctggccgacggacccctttcacctggttatgagccgacttctttggtgttctggcctctggcctgggaaaagggcaggagcctagaggaggaaaaaggctggtggacagacccagggtggtcttcaagcctggcccagtgagagtgaggcccccgcacgcaagcctcagccactcccaggggcctttgcagcgtctttttaacctcagaaaatttctcaatctatgtgatttgtgtaatactaatgagctttgggcaataaatacgggatttaaagc

SEQ ID NO: 424082 - DNA, 3196 bp, Homo sapiens
ccactataggaggaagaaaaaccatcaagaaggggaagaagcagccaagggcacagggagaacccagatggagtaacttcatggaagctgaggacttgggcgattcaaagaggaggggctgtctccagagtggattgaaacatcccaattagagccggagatagcccaggccacgagcagccggacagtggtgtacaacaaggggttgtgagtgtggtcagcggcctggggacggagcactgtgcagccggggagctgaggggcagggccgtagactcacggctgcacctgcagggagcagcacgccaaccccagcagtcctgggccccctgggagagtgctcaacctacagtggagggagactgacccattcacattttaacataggcaagaggagttctaacacatttcgtacaaaaaaataatcaagtgcatttctgggccttatgtggggttgtcaaaactccactcagcacaattatgtgtgaagctgaaaaattgtagagtgcccatggggtagaagtagaatccttttatactttggttccttttttatttttattttttatcagaatcaaatctgagccttagtttcagctgaccagaagtggcaggaggacaggtggaggcgagccagattaggcctggagttgggctggtttggtggccaggctggtaaatttaggatattacaatggccagcccagatggctccctgggctggcatggggaggggagagaaggtggtctgcaccccacaggatgaactagccatgactagggtcctcaggcagtggcccagggaatcagggagcactggaggcctctgcaagattctgtgggcagctggctctgaatgtagccagcccacatccattccagagctgcagaaccagtccctctgagtgaagtccagtgaccctggagctagggtcccccttcgtggagctctaactgattcagggcccctgaagtgaccccagctccaggcaggaaaccccgagaaggaatggtgcttggcaggaaccatggacctgcacttggcctcttcgggaagatcctccttccaggccccaggctggatgctgggttctggggctgagagtggggctagactgggctggctgccttctgcggagcttctccagccaccaaggctgcctgccccatcccatccctttctaagcaggaaggtctcatgcctgagaatgcctaggccagctccttagacacctatcagagaagcagcatcaacctaggagcagtgggccctggctctgtcactaaatggcagtgagatgtcagacaaattcattcccttctctcagcctccactccctgtctgaaaccagaagactggatcaaggggttcccactggctcctccagcaagacctcgtctttgcttgtcctgctcagatgctggtcatcctgggcatgtccccagtgtggactctggactgggaagggggcaggcccctttggacctgcagttggcctcagcagaaggccttgccttgtgtatgtgactccatatcccgggagcagttgacctttgccaaacactttacagttctggaggaggaggtaacatagatgcctgggcctgatggtggggccatacccatgtgtcgcctctcactctggcagcctcagaggccccttgctgctggctcccatctccctcccatttgcagaccaggaaggaagagcaagctgtacaaagggaagcagagcctggggtgggtgtgagcagggtgacccctcatctgaaaggcccaaaccagggggaagcaccagcctcagtgcagccccctcctgaccccacctagaatggaagcctccacctgcagccccaggcctccctcccccggggtctccacctcaggggagacttaggccagaggtgaacattcatgtgtaggaagaggccgctgcagggtggcatcttagggtaggggaagtgtgctgaggtgggccttccatgggcatggccgttgcctctctgccagccgctggtgcccaccagctggctctgcagcacattgccctgaggggcctgccactctcctgaggagcagcccacctgctgcccgtgaggagggggagaagggttagacaagcctggaggacaaaacagcgggagtgtgggggtgccatggtgttggaggggcaggcctttttgagccaatcccaccataatgtgaatatgccagtgactgctgcgctgtgctggtctctaggcctgaactaggtgctggcatgtctgggtcgtcttttgaaaagctcacttcaagctcaccctgctcctacctatcataaggtcttattcttgtgcactttatcttgggaccaaaactgcctacccaccccttcccgccctccccctgccagaggcctggtgccctggcccagcctgtggcctcagcatctcataactcatttgctttgtctcccggatgatttccgtcatgctcccaaatgcagcttcaggtgagccaaggggtctgctcctgtggcggtgcagtggcaaaggatccagatagcctagggtgagggtgacagagggacagtgggctatgccactaggccctggtctggctttggaaagacctgtgaggggaaaccttcacccagcacccatgccccactctgctgaggccagaggaagggaggcctgaggggcagattggttcatgcctggggtggaggctaagcctggacacagtcagggcggggctggccagctgtgcgagaacacaagccacgcctgcgatggtgctgcacccctggtgtccctgcctggccctcctctggtcacttcaaacatgccctcaggcttggggatgcccttcttccattcccagacagcagtgtgagggtgcagggaccaagatgtcaagctggccgtggagtcgagctggccgacggacccctttcacctggttatgagccgacttctttggtgttctggcctctggcctgggaaaagggcaggagcctagaggaggaaaaaggctggtggacagacccagggtggtcttcaagcctggcccagtgagagtgaggcccccgcacgcaagcctcagccactcccaggggcctttgcagcgtctttttaacctcagaaaatttctcaatctatgtgatttgtgtaatactaatgagctttgggcaataaatacgggatttaaagc

SEQ ID NO: 424083 - DNA, 1603 bp, Homo sapiens
tgggtgtgagcaggtgacccctcatctgaaaggcccaaaccaggcggaagcaccagcctcagaggccccttgctgctggctcccatctccctcccatttgcagaccaggaaggaagagcaagctgtacaaagggaagcagagcctggggtgggtgtgagcagggtgacccctcatctgaaaggcccaaaccagggggaagcaccagcctcagtgcagccccctcctgaccccacctagaatggaagcctccacctgcagccccaggcctccctcccccggggtctccacctcaggggagacttaggccagaggtgaacattcatgtgtaggaagaggccgctgcagggtggcatcttagggtaggggaagtgtgctgaggtgggccttccatgggcatggccgttgcctctctgccagccgctggtgcccaccagctggctctgcagcacattgccctgaggggcctgccactctcctgaggagcagcccacctgctgcccgtgaggagggggagaagggttagacaagcctggaggacaaaacagcgggagtgtgggggtgccatggtgttggaggggcaggcctttttgagccaatcccaccataatgtgaatatgccagtgactgctgcgctgtgctggtctctaggcctgaactaggtgctggcatgtctgggtcgtcttttgaaaagctcacttcaagctcaccctgctcctacctatcataaggtcttattcttgtgcactttatcttgggaccaaaactgcctacccaccccttcccgccctccccctgccagaggcctggtgccctggcccagcctgtggcctcagcatctcataactcatttgctttgtctcccggatgatttccgtcatgctcccaaatgcagcttcaggtgagccaaggggtctgctcctgtggcggtgcagtggcaaaggatccagatagcctagggtgagggtgacagagggacagtgggctatgccactaggccctggtctggctttggaaagacctgtgaggggaaaccttcacccagcacccatgccccactctgctgaggccagaggaagggaggcctgaggggcagattggttcatgcctggggtggaggctaagcctggacacagtcagggcggggctggccagctgtgcgagaacacaagccacgcctgcgatggtgctgcacccctggtgtccctgcctggccctcctctggtcacttcaaacatgccctcaggcttggggatgcccttcttccattcccagacagcagtgtgagggtgcagggaccaagatgtcaagctggccgtggagtcgagctggccgacggacccctttcacctggttatgagccgacttctttggtgttctggcctctggcctgggaaaagggcaggagcctagaggaggaaaaaggctggtggacagacccagggtggtcttcaagcctggcccagtgagagtgaggcccccgcacgcaagcctcagccactcccaggggcctttgcagcgtctttttaacctcagaaaatttctcaatctatgtgatttgtgtaatactaatgagctttgggcaataaatacgggatttaaagc

SEQ ID NO: 424084 - DNA, 4142 bp, Homo sapiens
  misc_feature (676)..(676): n is a, c, g, or t
ttcgagcggctgctcagggtcgctccgggttgtgcagctgcccgcccgggacgcaaagttctagtctggccctggatgggaagttggcgtggccgggatgccttctaactttttcccccggtggggactgacgttcctttcgagctgctggcggtgccgccgggcagcgtcgcgccccgcggtcactccccagccctggcccccaagccgggctcggcgcgcgcagcaggttgagggggcgagtgccgaggcgagcggcggtccggcgtcccccgtccctgctctccatctcgggctgaggattcgctgacgcagcaagccggccgatgccctgaggggacgcagccagggcgtgcgggggaaacgctgtgtcatcccctggggccgtcgtccctccgaggggctgccgcctgggaacccccccccagcctcttcctcgctgtgttctccgcggagggtctcccgcgcccgggcccccgcgccgccggggactggctctgggcacacccgctcaggctcttcggggcacggcgacaggggtcctttccctccgggacctcctctggggcgtcgccgactcggccctagactgcggaggcgggggtggaacgcggagcccgggcgcctggttgggcccggagaccggagccggggaggggccgctcccgcgccgcanaccctcgggctcccgcgcctcccgcaccaatgagacggaatttattaggaaacaggcagagagaccgctgaagtgaaccggggcttgccaggggtgggcggcagccgaggcggccagaaaagaactttgaaggaagaaaggaaattgtgctaagacgtccttctatggccgcttcaggcacttcttggatatcatcgaccctcgcacactctttgtcactgagagacgtctcagagaggctgtgcagctgctggaggactataagcatgggaccctgcgcccgggggtcaccaatgaacagctctggagtgcacagaaaatcaagcaggctattctacatccggacaccaatgagaagatcttcatgccatttagaatgtcaggttatattccttttgggacgccaattgtagtcggtcttctcttgcccaaccagacactggcatccactgtcttctggcagtggctgaaccagagccacaatgcctgtgtcaactatgcaaaccgcaatgcgaccaagccttcacctgcatccaagttcatccagggatacctgggagctgtcatcagcgccgtctccattgctgtgggccttaatgtcctggttcagaaagccaacaagttcaccccagccacccgccttctcatccagaggtttgtgccgttccctgctgtagccagtgccaatatctgcaatgtggtcctgatgcggtacggggagctggaggaagggattgatgtcctggacagcgatggcaacctcgtgggctcctccaagatcgcagcccgacacgccctgctggagacggcgctgacgcgagtggtcctgcccatgcccatcctggtgctacccccgatcgtcatgtccatgctggagaagacggctctcctgcaggcacgcccccggctgctcctccctgtgcaaagcctcgtgtgcctggcagccttcggcctggccctgccgctggccatcagcctcttcccgcaaatgtcagagattgaaacatcccaattagagccggagatagcccaggccacgagcagccggacagtggtgtacaacaaggggttgtgagtgtggtcagcggcctggggacggagcactgtgcagccggggagctgaggggcagggccgtagactcacggctgcacctgcagggagcagcacgccaaccccagcagtcctgggccccctgggagagtgctcaacctacagtggagggagactgacccattcacattttaacataggcaagaggagttctaacacatttcgtacaaaaaaataatcaagtgcatttctgggccttatgtggggttgtcaaaactccactcagcacaattatgtgtgaagctgaaaaattgtagagtgcccatggggtagaagtagaatccttttatactttggttccttttttatttttattttttatcagaatcaaatctgagccttagtttcagctgaccagaagtggcaggaggacaggtggaggcgagccagattaggcctggagttgggctggtttggtggccaggctggtaaatttaggatattacaatggccagcccagatggctccctgggctggcatggggaggggagagaaggtggtctgcaccccacaggatgaactagccatgactagggtcctcaggcagtggcccagggaatcagggagcactggaggcctctgcaagattctgtgggcagctggctctgaatgtagccagcccacatccattccagagctgcagaaccagtccctctgagtgaagtccagtgaccctggagctagggtcccccttcgtggagctctaactgattcagggcccctgaagtgaccccagctccaggcaggaaaccccgagaaggaatggtgcttggcaggaaccatggacctgcacttggcctcttcgggaagatcctccttccaggccccaggctggatgctgggttctggggctgagagtggggctagactgggctggctgccttctgcggagcttctccagccaccaaggctgcctgccccatcccatccctttctaagcaggaaggtctcatgcctgagaatgcctaggccagctccttagacacctatcagagaagcagcatcaacctaggagcagtgggccctggctctgtcactaaatggcagtgagatgtcagacaaattcattcccttctctcagcctccactccctgtctgaaaccagaagactggatcaaggggttcccactggctcctccagcaagacctcgtctttgcttgtcctgctcagatgctggtcatcctgggcatgtccccagtgtggactctggactgggaagggggcaggcccctttggacctgcagttggcctcagcagaaggccttgccttgtgtatgtgactccatatcccgggagcagttgacctttgccaaacactttacagttctggaggaggaggtaacatagatgcctgggcctgatggtggggccatacccatgtgtcgcctctcactctggcagcctcagaggccccttgctgctggctcccatctccctcccatttgcagaccaggaaggaagagcaagctgtacaaagggaagcagagcctggggtgggtgtgagcagggtgacccctcatctgaaaggcccaaaccagggggaagcaccagcctcagtgcagccccctcctgaccccacctagaatggaagcctccacctgcagccccaggcctccctcccccggggtctccacctcaggggagacttaggccagaggtgaacattcatgtgtaggaagaggccgctgcagggtggcatcttagggtaggggaagtgtgctgaggtgggccttccatgggcatggccgttgcctctctgccagccgctggtgcccaccagctggctctgcagcacattgccctgaggggcctgccactctcctgaggagcagcccacctgctgcccgtgaggagggggagaagggttagacaagcctggaggacaaaacagcgggagtgtgggggtgccatggtgttggaggggcaggcctttttgagccaatcccaccataatgtgaatatgccagtgactgctgcgctgtgctggtctctaggcctgaactaggtgctggcatgtctgggtcgtcttttgaaaagctcacttcaagctcaccctgctcctacctatcataaggtcttattcttgtgcactttatcttgggaccaaaactgcctacccaccccttcccgccctctggcctgggaaaagggcaggagcctagaggaggaaaaaggctggtggacagacccagggtggtcttcaagcctggcccagtgagagtgaggcccccgcacgcaagcctcagccactcccaggggcctttgcagcgtctttttaacctcagaaaatttctcaatctatgtgatttgtgtaatactaatgagctttgggcaataaatacgggatttaaagc

SEQ ID NO: 424085 - DNA, 1171 bp, Homo sapiens
  misc_feature (676)..(676): n is a, c, g, or t
ttcgagcggctgctcagggtcgctccgggttgtgcagctgcccgcccgggacgcaaagttctagtctggccctggatgggaagttggcgtggccgggatgccttctaactttttcccccggtggggactgacgttcctttcgagctgctggcggtgccgccgggcagcgtcgcgccccgcggtcactccccagccctggcccccaagccgggctcggcgcgcgcagcaggttgagggggcgagtgccgaggcgagcggcggtccggcgtcccccgtccctgctctccatctcgggctgaggattcgctgacgcagcaagccggccgatgccctgaggggacgcagccagggcgtgcgggggaaacgctgtgtcatcccctggggccgtcgtccctccgaggggctgccgcctgggaacccccccccagcctcttcctcgctgtgttctccgcggagggtctcccgcgcccgggcccccgcgccgccggggactggctctgggcacacccgctcaggctcttcggggcacggcgacaggggtcctttccctccgggacctcctctggggcgtcgccgactcggccctagactgcggaggcgggggtggaacgcggagcccgggcgcctggttgggcccggagaccggagccggggaggggccgctcccgcgccgcanaccctcgggctcccgcgcctcccgcaccaatgagacggaatttattaggaaacaggcagagagaccgctgaagtgaaccggggcttgccaggggtgggcggcagccgaggcggccagaaaagaactttgaaggaagaaaggaaattgtgctaagacgtccttctatggccgcttcaggcacttcttggatatcatcgaccctcgcacactctttgtcactgaggaagaaggctgtctttgttctaagaatgccttgaacaaagcttcagaggaggaggttgccctgcttgacagaggagaagaatggtgcattttgatcctaaatggagaaaggagagggaaggaagaggaggaaaaaaacagcgggaaggagagcatgatactgagatgagctgaaagaccaataaagaaatgccacaatgaggtgtggctgggggctcttttgagatcagtgttgctgactgtttttgtgagagctgtgaatttgcgctgtta

SEQ ID NO: 424086 - DNA, 695 bp, Homo sapiens
  misc_feature (1)..(1): n is a, c, g, or t
ncctgctctggggcaaggttgggggagctgccccttgtcctgcacttcagcagctacagggctgtgggtgaaggagggcctgaggattgtgagctcagtgcttttaggcttgagctgcccttggggatcccccctggaggcagagctggaccttggggagggaccctgtggcggacgtccttctatggccgcttcaggcacttcttggatatcatcgaccctcgcacactctttgtcactgaggtaagtcatggctgtcacctcagtggcccttgggcctttgtaccttgtcatttcagaatatgtgggtcattaagggagggtgaggatgggggagtgaagagaataggggaggtgagaggtgagaggaaggtaacaaattctctctacctgtagctgtctgtttatgtatctgtgtgtctgtctgtatctgagttgatacattgtgctgtatgctttttacattatatcatttggatctcacaacaaccctttaagatagatattattgttattctttaaaactttcaagaaattattatcaagtacataagttatttgctcattagaaaagttcaaacagtacaaatatgtttaagtagaaaaaagtatcctttaatcgtcctccctacttagttccctcctcttataggtaacagctgttaatggcttttaacatcaggttattaaggtat

SEQ ID NO: 424087 - DNA, 4736 bp, Homo sapiens
  misc_feature (676)..(676): n is a, c, g, or t
ttcgagcggctgctcagggtcgctccgggttgtgcagctgcccgcccgggacgcaaagttctagtctggccctggatgggaagttggcgtggccgggatgccttctaactttttcccccggtggggactgacgttcctttcgagctgctggcggtgccgccgggcagcgtcgcgccccgcggtcactccccagccctggcccccaagccgggctcggcgcgcgcagcaggttgagggggcgagtgccgaggcgagcggcggtccggcgtcccccgtccctgctctccatctcgggctgaggattcgctgacgcagcaagccggccgatgccctgaggggacgcagccagggcgtgcgggggaaacgctgtgtcatcccctggggccgtcgtccctccgaggggctgccgcctgggaacccccccccagcctcttcctcgctgtgttctccgcggagggtctcccgcgcccgggcccccgcgccgccggggactggctctgggcacacccgctcaggctcttcggggcacggcgacaggggtcctttccctccgggacctcctctggggcgtcgccgactcggccctagactgcggaggcgggggtggaacgcggagcccgggcgcctggttgggcccggagaccggagccggggaggggccgctcccgcgccgcanaccctcgggctcccgcgcctcccgcaccaatgagacggaatttattaggaaacaggcagagagaccgctgaagtgaaccggggcttgccaggggtgggcggcagccgaggcggccagaaaagaactttgaaggaagaaaggaaattgtgctaagacgtccttctatggccgcttcaggcacttcttggatatcatcgaccctcgcacactctttgtcactgagagacgtctcagagaggctgtgcagctgctggaggactataagcatgggaccctgcgcccgggggtcaccaatgaacagctctggagtgcacagaaaatcaagcaggctattctacatccggacaccaatgagaagatcttcatgccatttagaatgtcaggttatattccttttgggacgccaattgtagtcggtcttctcttgcccaaccagacactggcatccactgtcttctggcagtggctgaaccagagccacaatgcctgtgtcaactatgcaaaccgcaatgcgaccaagccttcacctgcatccaagttcatccagggatacctgggagctgtcatcagcgccgtctccattgctgtgggccttaatgtcctggttcagaaagccaacaagttcaccccagccacccgccttctcatccagaggtttgtgccgttccctgctgtagccagtgccaatatctgcaatgtggtcctgatgcggtacggggagctggaggaagggattgatgtcctggacagcgatggcaacctcgtgggctcctccaagatcgcagcccgacacgccctgctggagacggcgctgacgcgagtggtcctgcccatgcccatcctggtgctacccccgatcgtcatgtccatgctggagaagacggctctcctgcaggcacgcccccggctgctcctccctgtgcaaagcctcgtgtgcctggcagccttcggcctggccctgccgctggccatcagcctcttcccgcaaatgtcagagattgaaacatcccaattagagccggagatagcccaggccacgagcagccggacagtggtgtacaacaaggggttgtgagtgtggtcagcggcctggggacggagcactgtgcagccggggagctgaggggcagggccgtagactcacggctgcacctgcagggagcagcacgccaaccccagcagtcctgggccccctgggagagtgctcaacctacagtggagggagactgacccattcacattttaacataggcaagaggagttctaacacatttcgtacaaaaaaataatcaagtgcatttctgggccttatgtggggttgtcaaaactccactcagcacaattatgtgtgaagctgaaaaattgtagagtgcccatggggtagaagtagaatccttttatactttggttccttttttatttttattttttatcagaatcaaatctgagccttagtttcagctgaccagaagtggcaggaggacaggtggaggcgagccagattaggcctggagttgggctggtttggtggccaggctggtaaatttaggatattacaatggccagcccagatggctccctgggctggcatggggaggggagagaaggtggtctgcaccccacaggatgaactagccatgactagggtcctcaggcagtggcccagggaatcagggagcactggaggcctctgcaagattctgtgggcagctggctctgaatgtagccagcccacatccattccagagctgcagaaccagtccctctgagtgaagtccagtgaccctggagctagggtcccccttcgtggagctctaactgattcagggcccctgaagtgaccccagctccaggcaggaaaccccgagaaggaatggtgcttggcaggaaccatggacctgcacttggcctcttcgggaagatcctccttccaggccccaggctggatgctgggttctggggctgagagtggggctagactgggctggctgccttctgcggagcttctccagccaccaaggctgcctgccccatcccatccctttctaagcaggaaggtctcatgcctgagaatgcctaggccagctccttagacacctatcagagaagcagcatcaacctaggagcagtgggccctggctctgtcactaaatggcagtgagatgtcagacaaattcattcccttctctcagcctccactccctgtctgaaaccagaagactggatcaaggggttcccactggctcctccagcaagacctcgtctttgcttgtcctgctcagatgctggtcatcctgggcatgtccccagtgtggactctggactgggaagggggcaggcccctttggacctgcagttggcctcagcagaaggccttgccttgtgtatgtgactccatatcccgggagcagttgacctttgccaaacactttacagttctggaggaggaggtaacatagatgcctgggcctgatggtggggccatacccatgtgtcgcctctcactctggcagcctcagaggccccttgctgctggctcccatctccctcccatttgcagaccaggaaggaagagcaagctgtacaaagggaagcagagcctggggtgggtgtgagcagggtgacccctcatctgaaaggcccaaaccagggggaagcaccagcctcagtgcagccccctcctgaccccacctagaatggaagcctccacctgcagccccaggcctccctcccccggggtctccacctcaggggagacttaggccagaggtgaacattcatgtgtaggaagaggccgctgcagggtggcatcttagggtaggggaagtgtgctgaggtgggccttccatgggcatggccgttgcctctctgccagccgctggtgcccaccagctggctctgcagcacattgccctgaggggcctgccactctcctgaggagcagcccacctgctgcccgtgaggagggggagaagggttagacaagcctggaggacaaaacagcgggagtgtgggggtgccatggtgttggaggggcaggcctttttgagccaatcccaccataatgtgaatatgccagtgactgctgcgctgtgctggtctctaggcctgaactaggtgctggcatgtctgggtcgtcttttgaaaagctcacttcaagctcaccctgctcctacctatcataaggtcttattcttgtgcactttatcttgggaccaaaactgcctacccaccccttcccgccctccccctgccagaggcctggtgccctggcccagcctgtggcctcagcatctcataactcatttgctttgtctcccggatgatttccgtcatgctcccaaatgcagcttcaggtgagccaaggggtctgctcctgtggcggtgcagtggcaaaggatccagatagcctagggtgagggtgacagagggacagtgggctatgccactaggccctggtctggctttggaaagacctgtgaggggaaaccttcacccagcacccatgccccactctgctgaggccagaggaagggaggcctgaggggcagattggttcatgcctggggtggaggctaagcctggacacagtcagggcggggctggccagctgtgcgagaacacaagccacgcctgcgatggtgctgcacccctggtgtccctgcctggccctcctctggtcacttcaaacatgccctcaggcttggggatgcccttcttccattcccagacagcagtgtgagggtgcagggaccaagatgtcaagctggccgtggagtcgagctggccgacggacccctttcacctggttatgagccgacttctttggtgttctggcctctggcctgggaaaagggcaggagcctagaggaggaaaaaggctggtggacagacccagggtggtcttcaagcctggcccagtgagagtgaggcccccgcacgcaagcctcagccactcccaggggcctttgcagcgtctttttaacctcagaaaatttctcaatctatgtgatttgtgtaatactaatgagctttgggcaataaatacgggatttaaagc

SEQ ID NO: 424088 - DNA, 4080 bp, Homo sapiens
  misc_feature (1)..(1): n is a, c, g, or t
ncctgctctggggcaaggttgggggagctgccccttgtcctgcacttcagcagctacagggctgtgggtgaaggagggcctgaggattgtgagctcagtgcttttaggcttgagctgcccttggggatcccccctggaggcagagctggaccttggggagggaccctgtggcggacgtccttctatggccgcttcaggcacttcttggatatcatcgaccctcgcacactctttgtcactgagagacgtctcagagaggctgtgcagctgctggaggactataagcatgggaccctgcgcccgggggtcaccaatgaacagctctggagtgcacagaaaatcaagcaggctattctacatccggacaccaatgagaagatcttcatgccatttagaatgtcaggttatattccttttgggacgccaattgtagtcggtcttctcttgcccaaccagacactggcatccactgtcttctggcagtggctgaaccagagccacaatgcctgtgtcaactatgcaaaccgcaatgcgaccaagccttcacctgcatccaagttcatccagggatacctgggagctgtcatcagcgccgtctccattgctgtgggccttaatgtcctggttcagaaagccaacaagttcaccccagccacccgccttctcatccagaggtttgtgccgttccctgctgtagccagtgccaatatctgcaatgtggtcctgatgcggtacggggagctggaggaagggattgatgtcctggacagcgatggcaacctcgtgggctcctccaagatcgcagcccgacacgccctgctggagacggcgctgacgcgagtggtcctgcccatgcccatcctggtgctacccccgatcgtcatgtccatgctggagaagacggctctcctgcaggcacgcccccggctgctcctccctgtgcaaagcctcgtgtgcctggcagccttcggcctggccctgccgctggccatcagcctcttcccgcaaatgtcagagattgaaacatcccaattagagccggagatagcccaggccacgagcagccggacagtggtgtacaacaaggggttgtgagtgtggtcagcggcctggggacggagcactgtgcagccggggagctgaggggcagggccgtagactcacggctgcacctgcagggagcagcacgccaaccccagcagtcctgggccccctgggagagtgctcaacctacagtggagggagactgacccattcacattttaacataggcaagaggagttctaacacatttcgtacaaaaaaataatcaagtgcatttctgggccttatgtggggttgtcaaaactccactcagcacaattatgtgtgaagctgaaaaattgtagagtgcccatggggtagaagtagaatccttttatactttggttccttttttatttttattttttatcagaatcaaatctgagccttagtttcagctgaccagaagtggcaggaggacaggtggaggcgagccagattaggcctggagttgggctggtttggtggccaggctggtaaatttaggatattacaatggccagcccagatggctccctgggctggcatggggaggggagagaaggtggtctgcaccccacaggatgaactagccatgactagggtcctcaggcagtggcccagggaatcagggagcactggaggcctctgcaagattctgtgggcagctggctctgaatgtagccagcccacatccattccagagctgcagaaccagtccctctgagtgaagtccagtgaccctggagctagggtcccccttcgtggagctctaactgattcagggcccctgaagtgaccccagctccaggcaggaaaccccgagaaggaatggtgcttggcaggaaccatggacctgcacttggcctcttcgggaagatcctccttccaggccccaggctggatgctgggttctggggctgagagtggggctagactgggctggctgccttctgcggagcttctccagccaccaaggctgcctgccccatcccatccctttctaagcaggaaggtctcatgcctgagaatgcctaggccagctccttagacacctatcagagaagcagcatcaacctaggagcagtgggccctggctctgtcactaaatggcagtgagatgtcagacaaattcattcccttctctcagcctccactccctgtctgaaaccagaagactggatcaaggggttcccactggctcctccagcaagacctcgtctttgcttgtcctgctcagatgctggtcatcctgggcatgtccccagtgtggactctggactgggaagggggcaggcccctttggacctgcagttggcctcagcagaaggccttgccttgtgtatgtgactccatatcccgggagcagttgacctttgccaaacactttacagttctggaggaggaggtaacatagatgcctgggcctgatggtggggccatacccatgtgtcgcctctcactctggcagcctcagaggccccttgctgctggctcccatctccctcccatttgcagaccaggaaggaagagcaagctgtacaaagggaagcagagcctggggtgggtgtgagcagggtgacccctcatctgaaaggcccaaaccagggggaagcaccagcctcagtgcagccccctcctgaccccacctagaatggaagcctccacctgcagccccaggcctccctcccccggggtctccacctcaggggagacttaggccagaggtgaacattcatgtgtaggaagaggccgctgcagggtggcatcttagggtaggggaagtgtgctgaggtgggccttccatgggcatggccgttgcctctctgccagccgctggtgcccaccagctggctctgcagcacattgccctgaggggcctgccactctcctgaggagcagcccacctgctgcccgtgaggagggggagaagggttagacaagcctggaggacaaaacagcgggagtgtgggggtgccatggtgttggaggggcaggcctttttgagccaatcccaccataatgtgaatatgccagtgactgctgcgctgtgctggtctctaggcctgaactaggtgctggcatgtctgggtcgtcttttgaaaagctcacttcaagctcaccctgctcctacctatcataaggtcttattcttgtgcactttatcttgggaccaaaactgcctacccaccccttcccgccctccccctgccagaggcctggtgccctggcccagcctgtggcctcagcatctcataactcatttgctttgtctcccggatgatttccgtcatgctcccaaatgcagcttcaggtgagccaaggggtctgctcctgtggcggtgcagtggcaaaggatccagatagcctagggtgagggtgacagagggacagtgggctatgccactaggccctggtctggctttggaaagacctgtgaggggaaaccttcacccagcacccatgccccactctgctgaggccagaggaagggaggcctgaggggcagattggttcatgcctggggtggaggctaagcctggacacagtcagggcggggctggccagctgtgcgagaacacaagccacgcctgcgatggtgctgcacccctggtgtccctgcctggccctcctctggtcacttcaaacatgccctcaggcttggggatgcccttcttccattcccagacagcagtgtgagggtgcagggaccaagatgtcaagctggccgtggagtcgagctggccgacggacccctttcacctggttatgagccgacttctttggtgttctggcctctggcctgggaaaagggcaggagcctagaggaggaaaaaggctggtggacagacccagggtggtcttcaagcctggcccagtgagagtgaggcccccgcacgcaagcctcagccactcccaggggcctttgcagcgtctttttaacctcagaaaatttctcaatctatgtgatttgtgtaatactaatgagctttgggcaataaatacgggatttaaagc

SEQ ID NO: 424089 - DNA, 3102 bp, Homo sapiens
cagccggacagtggtgtacaacaaggggttgtgagtgtggtcagcggcctggggacggagcactgtgcagccggggagctgaggggcaggcccgtagactcacggctgctgtagccagtgccaatatctgcaatgtggtcctgatgcggtacggggagctggaggaagggattgatgtcctggacagcgatggcaacctcgtgggctcctccaagatcgcagcccgacacgccctgctggagacggcgctgacgcgagtggtcctgcccatgcccattcacattttaacataggcaagaggagttctaacacatttcgtacaaaaaaataatcaagtgcatttctgggccttatgtggggttgtcaaaactccactcagcacaattatgtgtgaagctgaaaaattgtagagtgcccatggggtagaagtagaatccttttatactttggttccttttttatttttattttttatcagaatcaaatctgagccttagtttcagctgaccagaagtggcaggaggacaggtggaggcgagccagattaggcctggagttgggctggtttggtggccaggctggtaaatttaggatattacaatggccagcccagatggctccctgggctggcatggggaggggagagaaggtggtctgcaccccacaggatgaactagccatgactagggtcctcaggcagtggcccagggaatcagggagcactggaggcctctgcaagattctgtgggcagctggctctgaatgtagccagcccacatccattccagagctgcagaaccagtccctctgagtgaagtccagtgaccctggagctagggtcccccttcgtggagctctaactgattcagggcccctgaagtgaccccagctccaggcaggaaaccccgagaaggaatggtgcttggcaggaaccatggacctgcacttggcctcttcgggaagatcctccttccaggccccaggctggatgctgggttctggggctgagagtggggctagactgggctggctgccttctgcggagcttctccagccaccaaggctgcctgccccatcccatccctttctaagcaggaaggtctcatgcctgagaatgcctaggccagctccttagacacctatcagagaagcagcatcaacctaggagcagtgggccctggctctgtcactaaatggcagtgagatgtcagacaaattcattcccttctctcagcctccactccctgtctgaaaccagaagactggatcaaggggttcccactggctcctccagcaagacctcgtctttgcttgtcctgctcagatgctggtcatcctgggcatgtccccagtgtggactctggactgggaagggggcaggcccctttggacctgcagttggcctcagcagaaggccttgccttgtgtatgtgactccatatcccgggagcagttgacctttgccaaacactttacagttctggaggaggaggtaacatagatgcctgggcctgatggtggggccatacccatgtgtcgcctctcactctggcagcctcagaggccccttgctgctggctcccatctccctcccatttgcagaccaggaaggaagagcaagctgtacaaagggaagcagagcctggggtgggtgtgagcagggtgacccctcatctgaaaggcccaaaccagggggaagcaccagcctcagtgcagccccctcctgaccccacctagaatggaagcctccacctgcagccccaggcctccctcccccggggtctccacctcaggggagacttaggccagaggtgaacattcatgtgtaggaagaggccgctgcagggtggcatcttagggtaggggaagtgtgctgaggtgggccttccatgggcatggccgttgcctctctgccagccgctggtgcccaccagctggctctgcagcacattgccctgaggggcctgccactctcctgaggagcagcccacctgctgcccgtgaggagggggagaagggttagacaagcctggaggacaaaacagcgggagtgtgggggtgccatggtgttggaggggcaggcctttttgagccaatcccaccataatgtgaatatgccagtgactgctgcgctgtgctggtctctaggcctgaactaggtgctggcatgtctgggtcgtcttttgaaaagctcacttcaagctcaccctgctcctacctatcataaggtcttattcttgtgcactttatcttgggaccaaaactgcctacccaccccttcccgccctccccctgccagaggcctggtgccctggcccagcctgtggcctcagcatctcataactcatttgctttgtctcccggatgatttccgtcatgctcccaaatgcagcttcaggtgagccaaggggtctgctcctgtggcggtgcagtggcaaaggatccagatagcctagggtgagggtgacagagggacagtgggctatgccactaggccctggtctggctttggaaagacctgtgaggggaaaccttcacccagcacccatgccccactctgctgaggccagaggaagggaggcctgaggggcagattggttcatgcctggggtggaggctaagcctggacacagtcagggcggggctggccagctgtgcgagaacacaagccacgcctgcgatggtgctgcacccctggtgtccctgcctggccctcctctggtcacttcaaacatgccctcaggcttggggatgcccttcttccattcccagacagcagtgtgagggtgcagggaccaagatgtcaagctggccgtggagtcgagctggccgacggacccctttcacctggttatgagccgacttctttggtgttctggcctctggcctgggaaaagggcaggagcctagaggaggaaaaaggctggtggacagacccagggtggtcttcaagcctggcccagtgagagtgaggcccccgcacgcaagcctcagccactcccaggggcctttgcagcgtctttttaacctcagaaaatttctcaatctatgtgatttgtgtaatactaatgagctttgggcaataaatacgggatttaaagc

SEQ ID NO: 424090 - DNA, 862 bp, Homo sapiens
gctgaggtgggaggatcgcttagctcaggagttcaagacccacctgggcaacatagaaagatctcatctctactagaaatttaaaaaaaaaaaaatagccagacatggtggcatgcacttgtagtcccagcaactcaggaggctgaggtgggagaattgcttgagcccaggaagttgagactgcagtgagctgtgatcatgcactgcactccagcttaggcaacagagcgagaccctgtccagagaaagagagagagggagaaatctccaatgaaaagtttttaagtcgtcaaacgtggggtgcttatcaaggaccaaagtctttcaacatgaaaaggtttatatataggtattttctggtgatggggatttatcataagaatgtttgggaaagtgagggggataaaaaaccttggcagcatagttgctaattactcttcatctcacttttttttgccatcctaacactacagtatcctcacatttctacacacgtaaggtagtctgaaatgtacttcctcaagggttacaggaaaggaaacttaattgataggaattatactttcttgctttgaaattactcattcctgaatggatgtactggtgaataatgaaattcccagagaacaagaataggaaagcactacgagatccaagtgacctgatagtacaccaactcatcagtccttaattagccaaaatttggccttggagactttttcctcaaacatacaaaaatttgcccccacttgactaatctgtcaatactcaagagttcttgtctaaaaacattgcacaaaacagagattgtgcaaaggctttcattttgatcctccacggtgcctcaaatataacaaatgtt

SEQ ID NO: 424091 - DNA, 362 bp, Homo sapiens
caggcttttgaccttggatttgccagcctccagaattgctttctccaccaccacaacagcatgtggtctgacagaattggcttcaaagaagaaactaaaagccacctcttgcaggaaactgcactgccctcaacatccagcccctactccttggtcctccaaacccccaaactctgcaggagaaaggcagcatggtacatggggaggaagaccagactgagcgatttggaatccacatcctaatgctgccacaagctgcatgcacaaagaccttaggcacatctcttcatttctctgtacactggtttctctactatgtgtgtattaaaatatataatgtggatgatagtaaactgaacaaa

SEQ ID NO: 424092 - DNA, 2264 bp, Homo sapiens
caggcaacagcagttgaatgagttcagggagaaaggcataatctacaacatgatactttctcacttgcttcacctctgtgcccacacctgtgaaggcctcggcccagcttcgacaactgctttgcctcaaactcagctttctaccagcagacaggccctactctagtgtccatagctccaaccattgagagtacctggctgaaatcaactttgctttctgtgggtatgacctctttcttcagaagctgtagaagaaacttgttgagataaactgcagcaagatatattgaggtcagctacgagggaggatgtacacacttgagtgaggacggcattactgttacgggaggccctgaagtctgagccagggccatggaggcctctgtgctgagccccacatcctgggagaaacggcgggcctggctccgtcagagccgtaactggcagacccaggtcctagaagaggaggctgctgccgccctgcaggatgtcccagatcctgagccttccagcctggatgacgttttccaagaagggaatccaatcaataaaattgaagactggctgcaggattgcggatactctgaagaaggattttctgaggaagcaggacagtttatctacaatggcttctgcagccatgggaccagctttgaagatgacttgaccctgggagcggaggccacactactggccgccaatggcaaactcttctccaggagtttcctcgagacagccaggccttgccagctacttgatcttggctgtagtttggcttccagcagcatgactggggggaccaacaagactagttcaagcatctcagaaattctggacaaagtgcaagaagatgcagaagatgtcctcttcagtctgggctttggccaagaggatcacaaagacacttctcggatacccgcccgatttttcaccaccccctctcaggccaagggcattgatttccagctcttcctgaagtcccaggtgcggaggattgaaatggaagacccctgcctcatgctggccagcaggtttaagcaggtgcaaacactggctgtcactgctgatgccttcttctgtctctactcctatgtgtctaagacacctgtccaaaagttcacaccatcccacatgttctggaattgcaaccatccaactgatgtgccatccatcaggattctgtcccgagagcctgaaccccagtcacccagagaccgccttcggaaagccatctccaagatgtgtctgtacacatgcccccgagaccggccaccaccaccccacaacacccccaaaaggaacagtttggaccaagttgtgttggaagtgatggacaaagtgaaagaagagaagcagttcctccagcaagactctgatttggggcaattctcacaggaagatcctgtgccccctgctgagggtaagaagttgcccacttctccctatccatgtgtcttctgctgtgaagaggaaacacagcagaggatgtccacagtgctagcaccatcccaaactctggattcgaaccccaaggtaccctgttgcacacattctctgcccatagaagatccacagtggagcacagacccagctcagataaggagagagctgtgtagtctaccagccaccaatacggaaacccatccagccaaggatgagactttctggaaaagaaagagcagagcaagaaagagcctcttccagaagaatctcatgggcaggaaggttaagtccttggacctgtccatcacccagcagaaatggaagcagagtgtagacagaccagaactgcgtcggtctttaagccagcagccacaggacacttttgacttggaggaggtgcaaagcaacagtgaggaggagcagagtcagagtcgctggcccagcagacccaggcacccccaccaccaccagacttttgctggcaaagactcgtgaagctttctccaccaccacaacagcatgtggtctgacagaattggcttcaaagaagaaactaaaagccacctcttgcaggaaactgcactgccctcaacatccagcccctactccttggtcctccaaacccccaaactctgcaggagaaaggcagcatggtacatggggaggaagaccagactgagcgatttggaatccacatcctaatgctgccacaagctgcatgcacaaagaccttaggcacatctcttcatttctctgtacactggtttctctactatgtgtgtattaaaatatataatgtggatgatagtaaactgaacaaa

SEQ ID NO: 424093 - DNA, 1875 bp, Homo sapiens
caggcaacagcagttgaatgagttcagggagaaaggcataatctacaacatgatactttctcacttgcttcacctctgtgcccacacctgtgaaggcctcggcccagcttcgacaactgctttgcctcaaactcagctttctaccagcagacaggacggcattactgttacgggaggccctgaagtctgagccagggccatggaggcctctgtgctgagccccacatcctgggagaaacggcgggcctggctccgtcagagccgtaactggcagacccaggtcctagaagaggaggctgctgccgccctgcaggatgtcccagatcctgagccttccagcctggatgacgttttccaagaagggaatccaatcaataaaattgaagactggctgcaggattgcggatactctgaagaaggattttctgaggaagcaggacagtttatctacaatggcttctgcagccatgggaccagctttgaagatgacttgaccctgggagcggaggccacactactggccgccaatggcaaactcttctccaggagtttcctcgagacagccaggccttgccagctacttgatcttggctgtagtttggcttccagcagcatgactggggggaccaacaagactagttcaagcatctcagaaattctggacaaagtgcaagaagatgccttcttctgtctctactcctatgtgtctaagacacctgtccaaaagttcacaccatcccacatgttctggaattgcaaccatccaactgatgtgccatccatcaggattctgtcccgagagcctgaaccccagtcacccagagaccgccttcggaaagccatctccaagatgtgtctgtacacatgcccccgagaccggccaccaccaccccacaacacccccaaaaggaacagtttggaccaagttgtgttggaagtgatggacaaagtgaaagaagagaagcagttcctccagcaagactctgatttggggcaattctcacaggaagatcctgtgccccctgctgagggtaagaagttgcccacttctccctatccatgtgtcttctgctgtgaagaggaaacacagcagaggatgtccacagtgctagcaccatcccaaactctggattcgaaccccaaggtaccctgttgcacacattctctgcccatagaagatccacagtggagcacagacccagctcagataaggagagagctgtgtagtctaccagccaccaatacggaaacccatccagccaaggatgagactttctggaaaagaaagagcagagcaagaaagagcctcttccagaagaatctcatgggcaggaaggttaagtccttggacctgtccatcacccagcagaaatggaagcagagtgtagacagaccagaactgcgtcggtctttaagccagcagccacaggacacttttgacttggaggaggtgcaaagcaacagtgaggaggagcagagtcagagtcgctggcccagcagacccaggcacccccaccaccaccagacttttgctggcaaagactcgtgaagctttctccaccaccacaacagcatgtggtctgacagaattggcttcaaagaagaaactaaaagccacctcttgcaggaaactgcactgccctcaacatccagcccctactccttggtcctccaaacccccaaactctgcaggagaaaggcagcatggtacatggggaggaagaccagactgagcgatttggaatccacatcctaatgctgccacaagctgcatgcacaaagaccttaggcacatctcttcatttctctgtacactggtttctctactatgtgtgtattaaaatatataatgtggatgatagtaaactgaacaaa

SEQ ID NO: 424094 - DNA, 3930 bp, Homo sapiens
atgagaccacagtcataagagtaaaacaaaaattctgatggaaataaatgcttatttggtaggaagcaaaaagcacaaaaacaagattgtctttctttttctttttctttttaaatgagaaggatccacccttgtgggaaaggaactctcaaaagacagcagtgggcctgacatcttgggcactttccaggttcttgggaggaagggagaaaagaagcagagagagagaagaaatatctactatttttatatacggtgtattcctctcatatcttaaagaaaagctttatgtagaaaaaaagattcatgacgcagcttatgtaagaataaacttgtggaatggaattagttgcagggaggaggtctgatttcgttcagttctcacagtgatctagtgtctgacttttctagggaatccaatcaataaaattgaagactggctgcaggattgcggatactctgaagaaggattttctgaggaagcaggacagtttatctacaatggcttctgcagccatgggaccagctttgaagatgacttgaccctgggagcggaggccacactactggccgccaatggcaaactcttctccaggagtttcctcgagacagccaggccttgccagctacttgatcttggctgtagtttggcttccagcagcatgactggggggaccaacaagactagttcaagcatctcagaaattctggacaaagtgcaagaagatgcagaagatgtcctcttcagtctgggctttggccaagaggatcacaaagacacttctcggatacccgcccgatttttcaccaccccctctcaggccaagggcattgatttccagctcttcctgaagtcccaggtgcggaggattgaaatggaagacccctgcctcatgctggccagcaggtttaagcaggtgcaaacactggctgtcactgctgatgccttcttctgtctctactcctatgtgtctaagacacctgtccaaaagttcacaccatcccacatgttctggaattgcaaccatccaactgatgtgccatccatcaggattctgtcccgagagcctgaaccccagtcacccagagaccgccttcggaaagccatctccaagatgtgtctgtacacatgcccccgagaccggccaccaccaccccacaacacccccaaaaggaacagtttggaccaagttgtgttggaagtgatggacaaagtgaaagaagagaagcagttcctccagcaagactctgatttggggcaattctcacaggaagatcctgtgccccctgctgagggtaagaagttgcccacttctccctatccatgtgtcttctgctgtgaagaggaaacacagcagaggatgtccacagtgctagcaccatcccaaactctggattcgaaccccaaggtaccctgttgcacacattctctgcccatagaagatccacagtggagcacagacccagctcagataaggagagagctgtgtagtctaccagccaccaatacggaaacccatccagccaaggatgagactttctggaaaagaaagagcagagcaagaaagagcctcttccagaagaatctcatgggcaggaaggttaagtccttggacctgtccatcacccagcagaaatggaagcagagtgtagacagaccagaactgcgtcggtctttaagccagcagccacaggacacttttgacttggaggaggtgcaaagcaacagtgaggaggagcagagtcagagtcgctggcccagcagacccaggcacccccaccaccaccagacttttgctggcaaagactcgtgaagctttctccaccaccacaacagcatgtggtctgacagaattggcttcaaagaagaaactaaaagccacctcttgcaggaaactgcactgccctcaacatccagcccctactccttggtcctccaaacccccaaactctgcaggagaaaggcagcatggtacatggggaggaagaccagactgagcgatttggaatccacatcctaatgctgccacaagctgcatgcacaaagaccttaggcacatctcttcatttctctgtacactggtttctctactatgtgtgtattaaaatatataatgtggatgatagtaaactgaacaaagccttaattttctcccaagctttgacattgccaagggcagttaggagacttcaggatcaagtttaggggacaagtttttttctaatactttcaaaaggcccaagtgaagagaggaaggacacctcactttctggctctaaaagcatggtacatctcacactaggattccctctgcacctctgttcatccctgtattcctaactaaattccagaaaatcttccacaacactggagtcctatttttcttcttgagacctcctttgaagaaatcaacttggagactcctccttaaatccagtttctttctctacccaaaattttgcatctttatagaaaaagagataagtaggattcagagtctcttctcctagccattgtggggggaaaaaatgctatttctgttggcagaaaacaatacaaatattttttttaaatcatggcatgtttttaaagttaactaacagctgtagtttgctttggaagttaaatgttttgtcaataaacagggcttgagcacatgcagtgctctcttaagcagtatgtggtttcagagcatcttggacacatttctcccctgagaaaatattagtattaatagaatgggagaagtaagatgcacgcatttccagaagtatattatttggctgcctaataaattgtgagacaaaagaaaaaaaaaaaacaggaagagagggacttgagggaatttgagggaaatcataaccaaaagtttaaaggaaaaaattacaccagacatgataaacagaagttgattttgttctggtgctattgccagcattaggggagaaggcacaaactgagtctgatacgtagtgaggcagagacaaaagggctagggtggaaaaatttttaaaccatctgtgtttactaattccccataccaaaagaacaaaatgaactttctcctatttcatgataaaagatagtttcacaatttggaaaaagcccccccactccaagtttcctacccttcccacccacagaaaccaggagacaggggaactatcttccttgatgttaacatttcaaagaggtggttctcaggtcctagagaaagatattcctgagttgtaaaactgggaagaggctggaagaagatttagatctcaagaaatagaaagaactacagcaaattttctaaagcaaatattcttaagggaggtcaagggcctgaagtcaggaagaaacctatttggtcaagctgaggggaaagttaaggctatcttgtcacaagagaacagaaatatctgacaatatttcatttaaagaacttcactcattatacagtaccaaggggagatggtgctaaacgattaatgaaaactctacccagtaatccaatcaccacccaccaggccccacctccaacaatggggattacagtttgacatgagatttgggtgaggacacagatccaaactgtcaggcctctgagcccaagctaagccatcatatcccctgtgacctgcatgtatacatccagatggcctgaagcaagtggagaatcacaaaagaagtgaaaatggcctgttgctgccttaacagatgacattactttgtgaaattccttcttctggctcagaagctcccccactgagcaccttgtgacccccacccctgcctgccagagaataatcccctttgactgtaattttccactacctacctaaatcctataaaacagccccacccctatctccctttgctgactctctttttggactcagcctgcctgcacccaggtgattaaaaagctttattgctcacac

SEQ ID NO: 424095 - DNA, 2040 bp, Homo sapiens
atgagaccacagtcataagagtaaaacaaaaattctgatggaaataaatgcttatttggtaggaagcaaaaagcacaaaaacaagattgtctttctttttctttttctttttaaatgagaaggatccacccttgtgggaaaggaactctcaaaagacagcagtgggcctgacatcttgggcactttccaggttcttgggaggaagggagaaaagaagcagagagagagaagaaatatctactatttttatatacggtgtattcctctcatatcttaaagaaaagctttatgtagaaaaaaagattcatgacgcagcttatgtaagaataaacttgtggaatggaattagttgcagggaggaggtctgatttcgttcagttctcacagtgatctagtgtctgacttttctagggaatccaatcaataaaattgaagactggctgcaggattgcggatactctgaagaaggattttctgaggaagcaggacagtttatctacaatggcttctgcagccatgggaccagctttgaagatgacttgaccctgggagcggaggccacactactggccgccaatggcaaactcttctccaggagtttcctcgagacagccaggccttgccagctacttgatcttggctgtagtttggcttccagcagcatgactggggggaccaacaagactagttcaagcatctcagaaattctggacaaagtgcaagaagatgcagaagatgtcctcttcagtctgggctttggccaagaggatcacaaagacacttctcggatacccgcccgatttttcaccaccccctctcaggccaagggcattgatttccagctcttcctgaagtcccaggtgcggaggattgaaatggaagacccctgcctcatgctggccagcaggtttaagcaggtgcaaacactggctgtcactgctgatgccttcttctgtctctactcctatgtgtctaagacacctgtccaaaagttcacaccatcccacatgttctggaattgcaaccatccaactgatgtgccatccatcaggattctgtcccgagagcctgaaccccagtcacccagagaccgccttcggaaagccatctccaagatgtgtctgtacacatgcccccgagaccggccaccaccaccccacaacacccccaaaaggaacagtttggaccaagttgtgttggaagtgatggacaaagtgaaagaagagaagcagttcctccagcaagactctgatttggggcaattctcacaggaagatcctgtgccccctgctgagggtaagaagttgcccacttctccctatccatgtgtcttctgctgtgaagaggaaacacagcagaggatgtccacagtgctagcaccatcccaaactctggattcgaaccccaaggtaccctgttgcacacattctctgcccatagaagatccacagtggagcacagacccagctcagataaggagagagctgtgtagtctaccagccaccaatacggaaacccatccagccaaggatgagactttctggaaaagaaagagcagagcaagaaagagcctcttccagaagaatctcatgggcaggaaggttaagtccttggacctgtccatcacccagcagaaatggaagcagagtgtagacagaccagaactgcgtcggtctttaagccagcagccacaggacacttttgacttggaggaggctttctccaccaccacaacagcatgtggtctgacagaattggcttcaaagaagaaactaaaagccacctcttgcaggaaactgcactgccctcaacatccagcccctactccttggtcctccaaacccccaaactctgcaggagaaaggcagcatggtacatggggaggaagaccagactgagcgatttggaatccacatcctaatgctgccacaagctgcatgcacaaagaccttaggcacatctcttcatttctctgtacactggtttctctactatgtgtgtattaaaatatataatgtggatgatagtaaactgaacaaa

SEQ ID NO: 424096 - DNA, 4184 bp, Homo sapiens
atgagaccacagtcataagagtaaaacaaaaattctgatggaaataaatgcttatttggtaggaagcaaaaagcacaaaaacaagattgtctttctttttctttttctttttaaatgagaaggatccacccttgtgggaaaggaactctcaaaagacagcagtgggcctgacatcttgggcactttccaggttcttgggaggaagggagaaaagaagcagagagagagaagaaatatctactatttttatatacggtgtattcctctcatatcttaaagaaaagctttatgtagaaaaaaagattcatgacgcagcttatgtaagaataaacttgtggaatggaattagttgcagggaggaggtctgatttcgttcagttctcacagtgatctagtgtctgacttttctagggaatccaatcaataaaattgaagactggctgcaggattgcggatactctgaagaaggattttctgaggaagcaggacagtttatctacaatggcttctgcagccatgggaccagctttgaagatgacttgaccctgggagcggaggccacactactggccgccaatggcaaactcttctccaggagtttcctcgagacagccaggccttgccagctacttgatcttggctgtagtttggcttccagcagcatgactggggggaccaacaagactagttcaagcatctcagaaattctggacaaagtgcaagaagatgcagaagatgtcctcttcagtctgggctttggccaagaggatcacaaagacacttctcggatacccgcccgatttttcaccaccccctctcaggccaagggcattgatttccagctcttcctgaagtcccaggtgcggaggattgaaatggaagacccctgcctcatgctggccagcaggtttaagcaggtgcaaacactggctgtcactgctgatgccttcttctgtctctactcctatgtgtctaagacacctgtccaaaagttcacaccatcccacatgttctggaattgcaaccatccaactgatgtgccatccatcaggattctgtcccgagagcctgaaccccagtcacccagagaccgccttcggaaagccatctccaagatgtgtctgtacacatgcccccgagaccggccaccaccaccccacaacacccccaaaaggaacagtttggaccaagttgtgttggaagtgatggacaaagtgaaagaagagaagcagttcctccagcaagactctgatttggggcaattctcacaggaagatcctgtgccccctgctgagggtaagaagttgcccacttctccctatccatgtgtcttctgctgtgaagaggaaacacagcagaggatgtccacagtgctagcaccatcccaaactctggattcgaaccccaaggtaccctgttgcacacattctctgcccatagaagatccacagtggagcacagacccagctcagataaggagagagctgtgtagtctaccagccaccaatacggaaacccatccagccaaggatgagactttctggaaaagaaagagcagagcaagaaagagcctcttccagaagaatctcatgggcaggaaggttaagtccttggacctgtccatcacccagcagaaatggaagcagagtgtagacagaccagaactgcgtcggtctttaagccagcagccacaggacacttttgacttggaggaggtgcaaagcaacagtgaggaggagcagagtcagagtcgctggcccagcagacccaggcacccccaccaccaccagacttttgctggcaaagactcgtgaagctttctccaccaccacaacagcatgtggtctgacagaattggcttcaaagaagaaactaaaagccacctcttgcaggaaactgcactgccctcaacatccagcccctactccttggtcctccaaacccccaaactctgcaggagaaaggcagcatggtacatggggaggaagaccagactgagcgatttggaatccacatcctaatgctgccacaagctgcatgcacaaagaccttaggcacatctcttcatttctctgtacactggtttctctactatgtgtgtattaaaatatataatgtggatgatagtaaactgaacaaagccttaattttctcccaagctttgacattgccaagggcagttaggagacttcaggatcaagtttaggggacaagtttttttctaatactttcaaaaggcccaagtgaagagaggaaggacacctcactttctggctctaaaagcatggtacatctcacactaggattccctctgcacctctgttcatccctgtattcctaactaaattccagaaaatcttccacaacactggagtcctatttttcttcttgagacctcctttgaagaaatcaacttggagactcctccttaaatccagtttctttctctacccaaaattttgcatctttatagaaaaagagataagtaggattcagagtctcttctcctagccattgtggggggaaaaaatgctatttctgttggcagaaaacaatacaaatattttttttaaatcatggcatgtttttaaagttaactaacagctgtagtttgctttggaagttaaatgttttgtcaataaacagggcttgagcacatgcagtgctctcttaagcagtatgtggtttcagagcatcttggacacatttctcccctgagaaaatattagtattaatagaatgggagaagtaagatgcacgcatttccagaagtatattatttggctgcctaataaattgtgagacaaaagaaaaaaaaaaaacaggaagagagggacttgagggaatttgagggaaatcataaccaaaagtttaaaggaaaaaattacaccagacatgataaacagaagttgattttgttctggtgctattgccagcattaggggagaaggcacaaactgagtctgatacgtagtgaggcagagacaaaagggctagggtggaaaaatttttaaaccatctgtgtttactaattccccataccaaaagaacaaaatgaactttctcctatttcatgataaaagatagtttcacaatttggaaaaagcccccccactccaagtttcctacccttcccacccacagaaaccaggagacaggggaactatcttccttgatgttaacatttcaaagaggtggttctcaggtcctagagaaagatattcctgagttgtaaaactgggaagaggctggaagaagatttagatctcaagaaatagaaagaactacagcaaattttctaaagcaaatattcttaagggaggtcaagggcctgaagtcaggaagaaacctatttggtcaagctgaggggaaagttaaggctatcttgtcacaagagaacagaaatatctgacaatatttcatttaaagaactgtattagtccattctcacactgctataaataaatacctgagactgggtaatttatacagaaaagaggtttaattggctcacagttccgcaggctgtacaggaagcatggcaacatcagtttctggggaggcctcagggagctttaactcatggtggaaagcaaagtgggagcaggcatcttacatggtatgagcaggaggaacaaaggaaaggggaggtgctaacacttttaaatgaccagatcttgtaagaactcactcattatacagtaccaaggggagatggtgctaaacgattaatgaaaactctacccagtaatccaatcaccacccaccaggccccacctccaacaatggggattacagtttgacatgagatttgggtgaggacacagatccaaactgtcaggcctctgagcccaagctaagccatcatatcccctgtgacctgcatgtatacatccagatggcctgaagcaagtggagaatcacaaaagaagtgaaaatggcctgttgctgccttaacagatgacattactttgtgaaattccttcttctggctcagaagctcccccactgagcaccttgtgacccccacccctgcctgccagagaataatcccctttgactgtaattttccactacctacctaaatcctataaaacagccccacccctatctccctttgctgactctctttttggactcagcctgcctgcacccaggtgattaaaaagctttattgctcacac

SEQ ID NO: 424097 - DNA, 2140 bp, Homo sapiens
atgagaccacagtcataagagtaaaacaaaaattctgatggaaataaatgcttatttggtaggaagcaaaaagcacaaaaacaagattgtctttctttttctttttctttttaaatgagaaggatccacccttgtgggaaaggaactctcaaaagacagcagtgggcctgacatcttgggcactttccaggttcttgggaggaagggagaaaagaagcagagagagagaagaaatatctactatttttatatacggtgtattcctctcatatcttaaagaaaagctttatgtagaaaaaaagattcatgacgcagcttatgtaagaataaacttgtggaatggaattagttgcagggaggaggtctgatttcgttcagttctcacagtgatctagtgtctgacttttctagggaatccaatcaataaaattgaagactggctgcaggattgcggatactctgaagaaggattttctgaggaagcaggacagtttatctacaatggcttctgcagccatgggaccagctttgaagatgacttgaccctgggagcggaggccacactactggccgccaatggcaaactcttctccaggagtttcctcgagacagccaggccttgccagctacttgatcttggctgtagtttggcttccagcagcatgactggggggaccaacaagactagttcaagcatctcagaaattctggacaaagtgcaagaagatgcagaagatgtcctcttcagtctgggctttggccaagaggatcacaaagacacttctcggatacccgcccgatttttcaccaccccctctcaggccaagggcattgatttccagctcttcctgaagtcccaggtgcggaggattgaaatggaagacccctgcctcatgctggccagcaggtttaagcaggtgcaaacactggctgtcactgctgatgccttcttctgtctctactcctatgtgtctaagacacctgtccaaaagttcacaccatcccacatgttctggaattgcaaccatccaactgatgtgccatccatcaggattctgtcccgagagcctgaaccccagtcacccagagaccgccttcggaaagccatctccaagatgtgtctgtacacatgcccccgagaccggccaccaccaccccacaacacccccaaaaggaacagtttggaccaagttgtgttggaagtgatggacaaagtgaaagaagagaagcagttcctccagcaagactctgatttggggcaattctcacaggaagatcctgtgccccctgctgagggtaagaagttgcccacttctccctatccatgtgtcttctgctgtgaagaggaaacacagcagaggatgtccacagtgctagcaccatcccaaactctggattcgaaccccaaggtaccctgttgcacacattctctgcccatagaagatccacagtggagcacagacccagctcagataaggagagagctgtgtagtctaccagccaccaatacggaaacccatccagccaaggatgagactttctggaaaagaaagagcagagcaagaaagagcctcttccagaagaatctcatgggcaggaaggttaagtccttggacctgtccatcacccagcagaaatggaagcagagtgtagacagaccagaactgcgtcggtctttaagccagcagccacaggacacttttgacttggaggaggtgcaaagcaacagtgaggaggagcagagtcagagtcgctggcccagcagacccaggcacccccaccaccaccagacttttgctggcaaagactcgtgaagctttctccaccaccacaacagcatgtggtctgacagaattggcttcaaagaagaaactaaaagccacctcttgcaggaaactgcactgccctcaacatccagcccctactccttggtcctccaaacccccaaactctgcaggagaaaggcagcatggtacatggggaggaagaccagactgagcgatttggaatccacatcctaatgctgccacaagctgcatgcacaaagaccttaggcacatctcttcatttctctgtacactggtttctctactatgtgtgtattaaaatatataatgtggatgatagtaaactgaacaaa

SEQ ID NO: 424098 - DNA, 2261 bp, Homo sapiens
atgagaccacagtcataagagtaaaacaaaaattctgatggaaataaatgcttatttggtaggaagcaaaaagcacaaaaacaagattgtctttctttttctttttctttttaaatgagaaggatccacccttgtgggaaaggaactctcaaaagacagcagtgggcctgacatcttgggcactttccaggttcttgggaggaagggagaaaagaagcagagagagagaagaaatatctactatttttatatacggtgtattcctctcatatcttaaagaaaagctttatgtagaaaaaaagattcatgacgcagcttatgtaagaataaacttgtggaatggaattagttgcagggaggaggtctgatttcgttcagttctcacagtgatctagtgtctgacttttctagggaatccaatcaataaaattgaagactggctgcaggattgcggcaaattaaatactactgactctcactggaaaagaatatgaatatgtgtgagtttttccatgaaaaagctccttggaaaatgtagtaagtgacttcaacctataagactgtttttggtttagatactctgaagaaggattttctgaggaagcaggacagtttatctacaatggcttctgcagccatgggaccagctttgaagatgacttgaccctgggagcggaggccacactactggccgccaatggcaaactcttctccaggagtttcctcgagacagccaggccttgccagctacttgatcttggctgtagtttggcttccagcagcatgactggggggaccaacaagactagttcaagcatctcagaaattctggacaaagtgcaagaagatgcagaagatgtcctcttcagtctgggctttggccaagaggatcacaaagacacttctcggatacccgcccgatttttcaccaccccctctcaggccaagggcattgatttccagctcttcctgaagtcccaggtgcggaggattgaaatggaagacccctgcctcatgctggccagcaggtttaagcaggtgcaaacactggctgtcactgctgatgccttcttctgtctctactcctatgtgtctaagacacctgtccaaaagttcacaccatcccacatgttctggaattgcaaccatccaactgatgtgccatccatcaggattctgtcccgagagcctgaaccccagtcacccagagaccgccttcggaaagccatctccaagatgtgtctgtacacatgcccccgagaccggccaccaccaccccacaacacccccaaaaggaacagtttggaccaagttgtgttggaagtgatggacaaagtgaaagaagagaagcagttcctccagcaagactctgatttggggcaattctcacaggaagatcctgtgccccctgctgagggtaagaagttgcccacttctccctatccatgtgtcttctgctgtgaagaggaaacacagcagaggatgtccacagtgctagcaccatcccaaactctggattcgaaccccaaggtaccctgttgcacacattctctgcccatagaagatccacagtggagcacagacccagctcagataaggagagagctgtgtagtctaccagccaccaatacggaaacccatccagccaaggatgagactttctggaaaagaaagagcagagcaagaaagagcctcttccagaagaatctcatgggcaggaaggttaagtccttggacctgtccatcacccagcagaaatggaagcagagtgtagacagaccagaactgcgtcggtctttaagccagcagccacaggacacttttgacttggaggaggtgcaaagcaacagtgaggaggagcagagtcagagtcgctggcccagcagacccaggcacccccaccaccaccagacttttgctggcaaagactcgtgaagctttctccaccaccacaacagcatgtggtctgacagaattggcttcaaagaagaaactaaaagccacctcttgcaggaaactgcactgccctcaacatccagcccctactccttggtcctccaaacccccaaactctgcaggagaaaggcagcatggtacatggggaggaagaccagactgagcgatttggaatccacatcctaatgctgccacaagctgcatgcacaaagaccttaggcacatctcttcatttctctgtacactggtttctctactatgtgtgtattaaaatatataatgtggatgatagtaaactgaacaaa

SEQ ID NO: 424099 - DNA, 2676 bp, Homo sapiens
atgagaccacagtcataagagtaaaacaaaaattctgatggaaataaatgcttatttggtaggaagcaaaaagcacaaaaacaagattgtctttctttttctttttctttttaaatgagaaggatccacccttgtgggaaaggaactctcaaaagacagcagtgggcctgacatcttgggcactttccaggttcttgggaggaagggagaaaagaagcagagagagagaagaaatatctactatttttatatacggtgtattcctctcatatcttaaagaaaagctttatgtagaaaaaaagattcatgacgcagcttatgtaagaataaacttgtggaatggaattagttgcagggaggaggtctgatttcgttcagttctcacagtgatctagtgtctgacttttctagggaatccaatcaataaaattgaagactggctgcaggattgcggatactctgaagaaggattttctgaggaagcaggacagtttatctacaatggcttctgcagccatgggaccagctttgaagatgacttgaccctgggagcggaggccacactactggccgccaatggcaaactcttctccaggagtttcctcgagacagccaggccttgccagctacttgatcttggctgtagtttggcttccagcagcatgactggggggaccaacaagactagttcaagcatctcagaaattctggacaaagtgcaagaagatgcagaagatgtcctcttcagtctgggctttggccaagaggatcacaaagacacttctcggatacccgcccgatttttcaccaccccctctcaggccaagggcattgatttccagctcttcctgaagtcccaggtgcggaggattgaaatggaagacccctgcctcatgctggccagcaggtttaagcaggtgcaaacactggctgtcactgctgatgccttcttctgtctctactcctatgtgtctaagacacctgtccaaaagttcacaccatcccacatgttctggaattgcaaccatccaactgatgtgccatccatcaggattctgtcccgagagcctgaaccccagtcacccagagaccgccttcggaaagccatctccaagatgtgtctgtacacatgcccccgagaccggccaccaccaccccacaacacccccaaaaggaacagtttggaccaagttgtgttggaagtgatggacaaagtgaaagaagagaagcagttcctccagcaagactctgatttggggcaattctcacaggaagatcctgtgccccctgctgagggtaagaagttgcccacttctccctatccatgtgtcttctgctgtgaagaggaaacacagcagaggatgtccacagtgctagcaccatcccaaactctggattcgaaccccaaggtaccctgttgcacacattctctgcccatagaagatccacagtggagcacagacccagctcagataaggagagagctgtgtagtctaccagccaccaatacggaaacccatccagccaaggatgagactttctggaaaagaaagagcagagcaagaaagagcctcttccagaagaatctcatgggcaggaaggttaagtccttggacctgtccatcacccagcagaaatggaagcagagtgtagacagaccagaactgcgtcggtctttaagccagcagccacaggacacttttgacttggaggaggtgcaaagcaacagtgaggaggagcagagtcagagtcgctggcccagcagacccaggcacccccaccaccaccagacttttgctggcaaagactcgtgaagctttctccaccaccacaacagcatgtggtctgacagaattggcttcaaagaagaaactaaaagccacctcttgcaggaaactgcactgccctcaacatccagcccctactccttggtcctccaaacccccaaactctgcaggagaaaggcagcatggtacatggggaggaagaccagactgagcgatttggaatccacatcctaatgctgccacaagctgcatgcacaaagaccttaggcacatctcttcatttctctgtacactggtttctctactatgtgtgtattaaaatatataatgtggatgatagtaaactgaacaaaaaaacaacaaaaaaaaaaaaaaaaaaaacaaacaaaaaaaacaaacaaacaaaaaaaaaaaaaaaaaaaaacaaaacaaaacacaaatacaaacaaaacaagggggcggggcgcccgggccggctaatgatactcgggggagcgaggtgatcaaacaagcaaacaccagtaaagttttccgtatctatgcagatcagaacattaccacaacacacacacaactccacgagaagaatatataatagtatctatcagaacccgaccagaaccaacggacagacaacatcaagcaacaaaagccgatgcatagatagaataagaaaaaagaggacagcgacaacccactaagcgagatcgcagcagcacgagcagaaacacacagaaagcggagagaataacgacgtgagacggcaagggaaagatagaaacaaactgagtgagcgacccgaaaacgaagccaatacaaccacacacaaagaacgaggagatagataagaaaatcaatgaagcagcgatgcaggctacaagtaacaaaa

SEQ ID NO: 424100 - DNA, 2000 bp, Homo sapiens
tgggcccttagcaacggcctggcgacggtttccctgctgctgcagcccccgtcggctcctcttttccagtcctccactgccggggctgggcccggccgcgggaaggaccgaaggggatacagcgtgtccctgcggcggctgcaagaggactaagcatggatggcagccggagagtcagagcaacctctgtccttcccagatatggtccaccgtgcctatttaaaggacacttgagcaccaaaagtaatgctttttgcactgactcctcttctctcagactaagcactctccagctggtcaagaatcacatggctgttcactataataaaatcctttcagccaaagctgcagtagactgctcggttccagtaagcgtgagtaccagcataaagtatgcagaccaacaacgaagagagaaactcaaaaaggaattagcacaatgtgaaaaagagttcaaattaactaaaactgcaatgcgagccaattataaaaataattccaagtcactttttaataccttacaaaagccctcaggcgaaccgcaaattgaggatgacatgttaaaagaagaaatgaatggattttcatcctttgcaaggtcactagtaccctcttcagagagactacacctaagtctacataaatccagtaaagtcatcacaaatggtcctgagaagaactccagttcctccccgtccagtgtggattatgcagcctccgggccccggaaactgagctctggagccctgtatggcagaaggcccagaagcacattcccaaattcccaccggtttcagttagtcatttcgaaagcacccagtggggatcttttggataaacattctgaactcttttctaacaaacaattgccattcactcctcgcactttaaaaacagaagcaaaatctttcctgtcacagtatcgctattatacacctgccaaaagaaaaaaggattttacagatcaacggatagaagctgaaacccagactgaattaagctttaaatctgagttggggacagctgagactaaaaacatgacagattcagaaatgaacataaagcaggcatctaattgtgtgacatatgatgccaaagaaaaaatagctcctttacctttagaagggcatgactcaacatgggatgagattaaggatgatgctcttcagcattcctcaccaagggcaatgtgtcagtattccctgaagcccccttcaactcgtaaaatctactctgatgaagaagaactgttgtatctgagtttcattgaagatgtaacagatgaaattttgaaacttggtttattttcaaacaggtttttagaacgactgttcgagcgacatataaaacaaaataaacatttggaggaggaaaaaatgcgccacctgctgcatgtcctgaaagtagacttaggctgcacatcggaggaaaactcggtaaagcaaaatgatgttgatatgttgaatgtatttgattttgaaaaggctgggaattcagaaccaaatgaattaaaaaatgaaagtgaagtaacaattcagcaggaacgtcaacaataccaaaaggctttggatatgttattgtcggcaccaaaggatgagaacgagatattcccttcaccaactgaatttttcatgcctatttataaatcaaagcattcagaaggggttataattcaacaggtgaatgatgaaacaaatcttgaaacttcaactttggatgaaaatcatccaagtatttcagacagtttaacagatcgggaaacttctgtgaatgtcattgaaggtgatagtgaccctgaaaaggttgagatttcaaatggattatgtggtcttaacacatcaccctcccaatctgttcagttctccagtgtcaaaggcgacaataatcatgacatggagttatcaactcttaaaatcatggaaatgagcattgaggactgccctttggatgtttaatcttcattaataaatacctcaaatggccagtaactcaaaattact

SEQ ID NO: 424101 - DNA, 1904 bp, Homo sapiens
tgggcccttagcaacggcctggcgacggtttccctgctgctgcagcccccgtcggctcctcttttccagtcctccactgccggggctgggcccggccgcgggaaggaccgaaggggatacagcgtgtccctgcggcggctgcaagaggactaagcatggatggcagccggagagtcagagcaacctctgtccttcccagatatggtccaccgtgcctatttaaaggacacttgagcaccaaaagtaatgctgcagtagactgctcggttccagtaagcgtgagtaccagcataaagtatgcagaccaacaacgaagagagaaactcaaaaaggaattagcacaatgtgaaaaagagttcaaattaactaaaactgcaatgcgagccaattataaaaataattccaagtcactttttaataccttacaaaagccctcaggcgaaccgcaaattgaggatgacatgttaaaagaagaaatgaatggattttcatcctttgcaaggtcactagtaccctcttcagagagactacacctaagtctacataaatccagtaaagtcatcacaaatggtcctgagaagaactccagttcctccccgtccagtgtggattatgcagcctccgggccccggaaactgagctctggagccctgtatggcagaaggcccagaagcacattcccaaattcccaccggtttcagttagtcatttcgaaagcacccagtggggatcttttggataaacattctgaactcttttctaacaaacaattgccattcactcctcgcactttaaaaacagaagcaaaatctttcctgtcacagtatcgctattatacacctgccaaaagaaaaaaggattttacagatcaacggatagaagctgaaacccagactgaattaagctttaaatctgagttggggacagctgagactaaaaacatgacagattcagaaatgaacataaagcaggcatctaattgtgtgacatatgatgccaaagaaaaaatagctcctttacctttagaagggcatgactcaacatgggatgagattaaggatgatgctcttcagcattcctcaccaagggcaatgtgtcagtattccctgaagcccccttcaactcgtaaaatctactctgatgaagaagaactgttgtatctgagtttcattgaagatgtaacagatgaaattttgaaacttggtttattttcaaacaggtttttagaacgactgttcgagcgacatataaaacaaaataaacatttggaggaggaaaaaatgcgccacctgctgcatgtcctgaaagtagacttaggctgcacatcggaggaaaactcggtaaagcaaaatgatgttgatatgttgaatgtatttgattttgaaaaggctgggaattcagaaccaaatgaattaaaaaatgaaagtgaagtaacaattcagcaggaacgtcaacaataccaaaaggctttggatatgttattgtcggcaccaaaggatgagaacgagatattcccttcaccaactgaatttttcatgcctatttataaatcaaagcattcagaaggggttataattcaacaggtgaatgatgaaacaaatcttgaaacttcaactttggatgaaaatcatccaagtatttcagacagtttaacagatcgggaaacttctgtgaatgtcattgaaggtgatagtgaccctgaaaaggttgagatttcaaatggattatgtggtcttaacacatcaccctcccaatctgttcagttctccagtgtcaaaggcgacaataatcatgacatggagttatcaactcttaaaatcatggaaatgagcattgaggactgccctttggatgtttaatcttcattaataaatacctcaaatggccagtaactcaaaattact

SEQ ID NO: 424102 - DNA, 1981 bp, Homo sapiens
tgggcccttagcaacggcctggcgacggtttccctgctgctgcagcccccgtcggctcctcttttccagtcctccactgccggggctgggcccggccgcgggaaggaccgaaggggatacagcgtgtccctgcggcggctgcaagaggactaagcatggatggcagccggagagtcagagcaacctctgtccttcccagatatggtccaccgtgcctatttaaaggacacttgagcaccaaaagtaatgctttttgcactgactcctcttctctcagactaagcactctccagctggtcaagaatcacatggctgttcactataataaaatcctttcagccaaagctgcagtagactgctcggttccagtaagcatgcagaccaacaacgaagagagaaactcaaaaaggaattagcacaatgtgaaaaagagttcaaattaactaaaactgcaatgcgagccaattataaaaataattccaagtcactttttaataccttacaaaagccctcaggcgaaccgcaaattgaggatgacatgttaaaagaagaaatgaatggattttcatcctttgcaaggtcactagtaccctcttcagagagactacacctaagtctacataaatccagtaaagtcatcacaaatggtcctgagaagaactccagttcctccccgtccagtgtggattatgcagcctccgggccccggaaactgagctctggagccctgtatggcagaaggcccagaagcacattcccaaattcccaccggtttcagttagtcatttcgaaagcacccagtggggatcttttggataaacattctgaactcttttctaacaaacaattgccattcactcctcgcactttaaaaacagaagcaaaatctttcctgtcacagtatcgctattatacacctgccaaaagaaaaaaggattttacagatcaacggatagaagctgaaacccagactgaattaagctttaaatctgagttggggacagctgagactaaaaacatgacagattcagaaatgaacataaagcaggcatctaattgtgtgacatatgatgccaaagaaaaaatagctcctttacctttagaagggcatgactcaacatgggatgagattaaggatgatgctcttcagcattcctcaccaagggcaatgtgtcagtattccctgaagcccccttcaactcgtaaaatctactctgatgaagaagaactgttgtatctgagtttcattgaagatgtaacagatgaaattttgaaacttggtttattttcaaacaggtttttagaacgactgttcgagcgacatataaaacaaaataaacatttggaggaggaaaaaatgcgccacctgctgcatgtcctgaaagtagacttaggctgcacatcggaggaaaactcggtaaagcaaaatgatgttgatatgttgaatgtatttgattttgaaaaggctgggaattcagaaccaaatgaattaaaaaatgaaagtgaagtaacaattcagcaggaacgtcaacaataccaaaaggctttggatatgttattgtcggcaccaaaggatgagaacgagatattcccttcaccaactgaatttttcatgcctatttataaatcaaagcattcagaaggggttataattcaacaggtgaatgatgaaacaaatcttgaaacttcaactttggatgaaaatcatccaagtatttcagacagtttaacagatcgggaaacttctgtgaatgtcattgaaggtgatagtgaccctgaaaaggttgagatttcaaatggattatgtggtcttaacacatcaccctcccaatctgttcagttctccagtgtcaaaggcgacaataatcatgacatggagttatcaactcttaaaatcatggaaatgagcattgaggactgccctttggatgtttaatcttcattaataaatacctcaaatggccagtaactcaaaattact

SEQ ID NO: 424103 - DNA, 1958 bp, Homo sapiens
tgggcccttagcaacggcctggcgacggtttccctgctgctgcagcccccgtcggctcctcttttccagtcctccactgccggggctgggcccggccgcgggaaggaccgaaggggatacagcgtgtccctgcggcggctgcaagaggactaagcatggatggcagccggagagtcagagcaacctctgtccttcccagatatggtccaccgtgcctatttaaaggacacttgagcaccaaaagtaatgctgcagtagactgctcggttccagtaagcgtgagtaccagcataaagtgtatacatgtgccatggtggtttgctgcacccatcaacctgtcatctacattagatgcagaccaacaacgaagagagaaactcaaaaaggaattagcacaatgtgaaaaagagttcaaattaactaaaactgcaatgcgagccaattataaaaataattccaagtcactttttaataccttacaaaagccctcaggcgaaccgcaaattgaggatgacatgttaaaagaagaaatgaatggattttcatcctttgcaaggtcactagtaccctcttcagagagactacacctaagtctacataaatccagtaaagtcatcacaaatggtcctgagaagaactccagttcctccccgtccagtgtggattatgcagcctccgggccccggaaactgagctctggagccctgtatggcagaaggcccagaagcacattcccaaattcccaccggtttcagttagtcatttcgaaagcacccagtggggatcttttggataaacattctgaactcttttctaacaaacaattgccattcactcctcgcactttaaaaacagaagcaaaatctttcctgtcacagtatcgctattatacacctgccaaaagaaaaaaggattttacagatcaacggatagaagctgaaacccagactgaattaagctttaaatctgagttggggacagctgagactaaaaacatgacagattcagaaatgaacataaagcaggcatctaattgtgtgacatatgatgccaaagaaaaaatagctcctttacctttagaagggcatgactcaacatgggatgagattaaggatgatgctcttcagcattcctcaccaagggcaatgtgtcagtattccctgaagcccccttcaactcgtaaaatctactctgatgaagaagaactgttgtatctgagtttcattgaagatgtaacagatgaaattttgaaacttggtttattttcaaacaggtttttagaacgactgttcgagcgacatataaaacaaaataaacatttggaggaggaaaaaatgcgccacctgctgcatgtcctgaaagtagacttaggctgcacatcggaggaaaactcggtaaagcaaaatgatgttgatatgttgaatgtatttgattttgaaaaggctgggaattcagaaccaaatgaattaaaaaatgaaagtgaagtaacaattcagcaggaacgtcaacaataccaaaaggctttggatatgttattgtcggcaccaaaggatgagaacgagatattcccttcaccaactgaatttttcatgcctatttataaatcaaagcattcagaaggggttataattcaacaggtgaatgatgaaacaaatcttgaaacttcaactttggatgaaaatcatccaagtatttcagacagtttaacagatcgggaaacttctgtgaatgtcattgaaggtgatagtgaccctgaaaaggttgagatttcaaatggattatgtggtcttaacacatcaccctcccaatctgttcagttctccagtgtcaaaggcgacaataatcatgacatggagttatcaactcttaaaatcatggaaatgagcattgaggactgccctttggatgtttaatcttcattaataaatacctcaaatggccagtaactcaaaattact

SEQ ID NO: 424104 - DNA, 2025 bp, Homo sapiens
tgggcccttagcaacggcctggcgacggtttccctgctgctgcagcccccgtcggctcctcttttccagtcctccactgccggggctgggcccggccgcgggaaggaccgaaggggatacagcgtgtccctgcggcggctgcaagaggactaagcatggatggcagccggagagtcagagcaacctctgtccttcccagatatggtccaccgtgcctatttaaaggacacttgagcaccaaaagtaatgctgcagtagactgctcggttccagtaagcgtgagtaccagcataaagtgtatttagcactgtaaacttgcctcttaacactgcttttgctgcatcccagaaattttggtctagaagtacttgtatgaatctgggtgctccagtgttgggtgcaaatatacctaggatagatgcagaccaacaacgaagagagaaactcaaaaaggaattagcacaatgtgaaaaagagttcaaattaactaaaactgcaatgcgagccaattataaaaataattccaagtcactttttaataccttacaaaagccctcaggcgaaccgcaaattgaggatgacatgttaaaagaagaaatgaatggattttcatcctttgcaaggtcactagtaccctcttcagagagactacacctaagtctacataaatccagtaaagtcatcacaaatggtcctgagaagaactccagttcctccccgtccagtgtggattatgcagcctccgggccccggaaactgagctctggagccctgtatggcagaaggcccagaagcacattcccaaattcccaccggtttcagttagtcatttcgaaagcacccagtggggatcttttggataaacattctgaactcttttctaacaaacaattgccattcactcctcgcactttaaaaacagaagcaaaatctttcctgtcacagtatcgctattatacacctgccaaaagaaaaaaggattttacagatcaacggatagaagctgaaacccagactgaattaagctttaaatctgagttggggacagctgagactaaaaacatgacagattcagaaatgaacataaagcaggcatctaattgtgtgacatatgatgccaaagaaaaaatagctcctttacctttagaagggcatgactcaacatgggatgagattaaggatgatgctcttcagcattcctcaccaagggcaatgtgtcagtattccctgaagcccccttcaactcgtaaaatctactctgatgaagaagaactgttgtatctgagtttcattgaagatgtaacagatgaaattttgaaacttggtttattttcaaacaggtttttagaacgactgttcgagcgacatataaaacaaaataaacatttggaggaggaaaaaatgcgccacctgctgcatgtcctgaaagtagacttaggctgcacatcggaggaaaactcggtaaagcaaaatgatgttgatatgttgaatgtatttgattttgaaaaggctgggaattcagaaccaaatgaattaaaaaatgaaagtgaagtaacaattcagcaggaacgtcaacaataccaaaaggctttggatatgttattgtcggcaccaaaggatgagaacgagatattcccttcaccaactgaatttttcatgcctatttataaatcaaagcattcagaaggggttataattcaacaggtgaatgatgaaacaaatcttgaaacttcaactttggatgaaaatcatccaagtatttcagacagtttaacagatcgggaaacttctgtgaatgtcattgaaggtgatagtgaccctgaaaaggttgagatttcaaatggattatgtggtcttaacacatcaccctcccaatctgttcagttctccagtgtcaaaggcgacaataatcatgacatggagttatcaactcttaaaatcatggaaatgagcattgaggactgccctttggatgtttaatcttcattaataaatacctcaaatggccagtaactcaaaattact

SEQ ID NO: 424105 - DNA, 1739 bp, Homo sapiens
  misc_feature (11)..(11): n is a, c, g, or t
  misc_feature (13)..(14): n is a, c, g, or t
  misc_feature (22)..(22): n is a, c, g, or t
  misc_feature (34)..(34): n is a, c, g, or t
  misc_feature (36)..(36): n is a, c, g, or t
  misc_feature (44)..(44): n is a, c, g, or t
aataggggggntnnattttatntagtgaggggangnatggcttntccctggctgttcactataataaaatcctttcagccaaagctgcagtagactgctcggttccagtaagcgtgagtaccagcataaagtatgcagaccaacaacgaagagagaaactcaaaaaggaattagcacaatgtgaaaaagagttcaaattaactaaaactgcaatgcgagccaattataaaaataattccaagtcactttttaataccttacaaaagccctcaggcgaaccgcaaattgaggatgacatgttaaaagaagaaatgaatggattttcatcctttgcaaggtcactagtaccctcttcagagagactacacctaagtctacataaatccagtaaagtcatcacaaatggtcctgagaagaactccagttcctccccgtccagtgtggattatgcagcctccgggccccggaaactgagctctggagccctgtatggcagaaggcccagaagcacattcccaaattcccaccggtttcagttagtcatttcgaaagcacccagtggggatcttttggataaacattctgaactcttttctaacaaacaattgccattcactcctcgcactttaaaaacagaagcaaaatctttcctgtcacagtatcgctattatacacctgccaaaagaaaaaaggattttacagatcaacggatagaagctgaaacccagactgaattaagctttaaatctgagttggggacagctgagactaaaaacatgacagattcagaaatgaacataaagcaggcatctaattgtgtgacatatgatgccaaagaaaaaatagctcctttacctttagaagggcatgactcaacatgggatgagattaaggatgatgctcttcagcattcctcaccaagggcaatgtgtcagtattccctgaagcccccttcaactcgtaaaatctactctgatgaagaagaactgttgtatctgagtttcattgaagatgtaacagatgaaattttgaaacttggtttattttcaaacaggtttttagaacgactgttcgagcgacatataaaacaaaataaacatttggaggaggaaaaaatgcgccacctgctgcatgtcctgaaagtagacttaggctgcacatcggaggaaaactcggtaaagcaaaatgatgttgatatgttgaatgtatttgattttgaaaaggctgggaattcagaaccaaatgaattaaaaaatgaaagtgaagtaacaattcagcaggaacgtcaacaataccaaaaggctttggatatgttattgtcggcaccaaaggatgagaacgagatattcccttcaccaactgaatttttcatgcctatttataaatcaaagcattcagaaggggttataattcaacaggtgaatgatgaaacaaatcttgaaacttcaactttggatgaaaatcatccaagtatttcagacagtttaacagatcgggaaacttctgtgaatgtcattgaaggtgatagtgaccctgaaaaggttgagatttcaaatggattatgtggtcttaacacatcaccctcccaatctgttcagttctccagtgtcaaaggcgacaataatcatgacatggagttatcaactcttaaaatcatggaaatgagcattgaggactgccctttggatgtttaatcttcattaataaatacctcaaatggccagtaactcaaaattact

SEQ ID NO: 424106 - DNA, 1577 bp, Homo sapiens
tgggcccttagcaacggcctggcgacggtttccctgctgctgcagcccccgtcggctcctcttttccagtcctccactgccggggctgggcccggccgcgggaaggaccgaaggggatacagcgtgtccctgcggcggctgcaagaggactaagcatggatggcagccggagagtcagagcaacctctgtccttcccagatatggtccaccgtgcctatttaaaggacacttgagcaccaaaagtaatgctttttgcactgactcctcttctctcagactaagcactctccagctggtcaagaatcacatggctgttcactataataaaatcctttcagccaaagctgcagtagactgctcggttccagtaagcgtgagtaccagcataaagtatgcagaccaacaacgaagagagaaactcaaaaaggaattagcacaatgtgaaaaagagttcaaattaactaaaactgcaatgcgagccaattataaaaataattccaagtcactttttaataccttacaaaagccctcaggcgaaccgcaaattgaggatgacatgttaaaagaagaaatgaatggattttcatcctttgcaaggtcactagtaccctcttcagagagactacacctaagtctacataaatccagtaaagtcatcacaaatggtcctgagaagaactccagttcctccccgtccagtgtggattatgcagcctccgggccccggaaactgagctctggagccctgtatggcagaaggcccagaagcacattcccaaattcccaccggtttcagttagtcatttcgaaagcacccagtggggatcttttggataaacattctgaactcttttctaacaaacaattgccattcactcctcgcactttaaaaacagaagcaaaatctttcctgtcacagtatcgctattatacacctgccaaaagaaaaaaggattttacagatcaacggatagaagctgaaacccagactgaattaagctttaaatctgagttggggacagctgagactaaaaacatgacagattcagaaatgaacataaagcaggcatctaattgtgtgacatatgatgccaaagaaaaaatagctcctttacctttagaagggcatgactcaacatgggatgagattaaggatgatgctcttcagcattcctcaccaagggcaatgtgtcagtattccctgaagcccccttcaactcgtaaaatctactctgatgaagaagaactgttgtatctgagtttcattgaagatgtaacagatgaaattttgaaacttggtttattttcaaacaggtttttagaacgactgttcgagcgacatataaaacaaaataaacatttggaggaggaaaaaatgcgccacctgctgcatgtcctgaaagtagacttaggctgcacatcggaggaaaactcgttctccagtgtcaaaggcgacaataatcatgacatggagttatcaactcttaaaatcatggaaatgagcattgaggactgccctttggatgtttaatcttcattaataaatacctcaaatggccagtaactcaaaattact

SEQ ID NO: 424107 - DNA, 1854 bp, Homo sapiens
tgggcccttagcaacggcctggcgacggtttccctgctgctgcagcccccgtcggctcctcttttccagtcctccactgccggggctgggcccggccgcgggaaggaccgaaggggatacagcgtgtccctgcggcggctgcaagaggactaagcatggatggcagccggagagtcagagcaacctctgtccttcccagatatggtccaccgtgcctatttaaaggacacttgagcaccaaaagtaatgctttttgcactgactcctcttctctcagactaagcactctccagctggtcaagaatcacatggctgttcactataataaaatcctttcagccaaagctgcagtagactgctcggttccagtaagcgtgagtaccagcataaagtatgcagaccaacaacgaagagagaaactcaaaaaggaattagcacaatgtgaaaaagagttcaaattaactaaaactgcaatgcgagccaattataaaaataattccaagtcactttttaataccttacaaaagccctcaggcgaaccgcaaattgaggatgacatgttaaaagaagaaatgaatggattttcatcctttgcaaggtcactagtaccctcttcagagagactacacctaagtctacataaatccagtaaagtcatcacaaatggtcctgagaagaactccagttcctccccgtccagtgtggattatgcagcctccgggccccggaaactgagctctggagccctgtatggcagaaggcccagaagcacattcccaaattcccaccggtttcagttagtcatttcgaaagcacccagtggggatcttttggataaacattctgaactcttttctaacaaacaattgccattcactcctcgcactttaaaaacagaagcaaaatctttcctgtcacagtatcgctattatacacctgccaaaagaaaaaaggattttacagatcaacggatagaagctgaaacccagactgaattaagctttaaatctgagttggggacagctgagactaaaaacatgacagattcagaaatgaacataaagcaggcatctaattgtgtgacatatgatgccaaagaaaaaatagctcctttacctttagaagggcatgactcaacatgggatgagattaaggatgatgctcttcagcattcctcaccaagggcaatgtgtcagtattccctgaagcccccttcaactcgtaaaatctactctgatgaagaagaactgttgtatctgagtttcattgaagatgtaacagatgaaattttgaaacttggtttattttcaaacaggtttttagaacgactgttcgagcgacatataaaacaaaataaacatttggaggaggaaaaaatgcgccacctgctgcatgtcctgaaagtagacttaggctgcacatcggaggaaaactcggtaaagcaaaatgatgttgatatgttgaatgtatttgattttgaaaaggctgggaattcagaaccaaatgaattaaaaaatgaaagtgaagtaacaattcagcaggaacgtcaacaataccaaaaggctttggatatgttattgtcggcaccaaaggatgagaacgagatattcccttcaccaactgaatttttcatgcctatttataaatcaaagcattcagaaggggttataattcaacaggtgaatgatgaaacaaatcttgaaacttcaactttggatgaaaatcatccaagtatttcagacagtttaacagatcgggaaacttctgtgaatgtcattgaaggtgatagactgccctttggatgtttaatcttcattaataaatacctcaaatggccagtaactcaaaattact

SEQ ID NO: 424108 - DNA, 1658 bp, Homo sapiens
tgggcccttagcaacggcctggcgacggtttccctgctgctgcagcccccgtcggctcctcttttccagtcctccactgccggggctgggcccggccgcgggaaggaccgaaggggatacagcgtgtccctgcggcggctgcaagaggactaagcatggatggcagccggagagtcagagcaacctctgtccttcccagatatggtccaccgtgcctatttaaaggacacttgagcaccaaaagtaatgctttttgcactgactcctcttctctcagactaagcactctccagctggtcaagaatcacatggctgttcactataataaaatcctttcagccaaagctgcagtagactgctcggttccagtaagcgtgagtaccagcataaagtatgcagaccaacaacgaagagagaaactcaaaaaggaattagcacaatgtgaaaaagagttcaaattaactaaaactgcaatgcgagccaattataaaaataattccaagtcactttttaataccttacaaaagccctcaggcgaaccgcaaattgaggatgacatgttaaaagaagaaatgaatggattttcatcctttgcaaggtcactagtaccctcttcagagagactacacctaagtctacataaatccagtaaagtcatcacaaatggtcctgagaagaactccagttcctccccgtccagtgtggattatgcagcctccgggccccggaaactgagctctggagccctgtatggcagaaggcccagaagcacattcccaaattcccaccggtttcagttagtcatttcgaaagcacccagtggggatcttttggataaacattctgaactcttttctaacaaacaattgccattcactcctcgcactttaaaaacagaagcaaaatctttcctgtcacagtatcgctattatacacctgccaaaagaaaaaaggattttacagatcaacggatagaagctgaaacccagactgaattaagctttaaatctgagttggggacagctgagactaaaaacatgacagattcagaaatgaacataaagcaggcatctaattgtgtgacatatgatgccaaagaaaaaatagctcctttacctttagaagggcatgactcaacatgggatgagattaaggatgatgctcttcagcattcctcaccaagggcaatgtgtcagtattccctgaagcccccttcaactcgtaaaatctactctgatgaagaagaactgttgtatctgagtttcattgaagatgtaacagatgaaattttgaaacttggtttattttcaaacaggtttttagaacgactgttcgagcgacatataaaacaaaataaacatttggaggaggaaaaaatgcgccacctgctgcatgtcctgaaagtagacttaggctgcacatcggaggaaaactcgattccagatgctgctactactggtccgaaaacaaccccactggaagatgaataaagtggacacaacaaatagcatatgttctactatagaggtggccacatgaagagctctgcaagcccactgtgaaattgatagcaaatctttattcaagtgtattaattgacccacaaatatcctgattaatgaagctggctagtttggcaagatgcattctaactctta

SEQ ID NO: 424109 - DNA, 1531 bp, Homo sapiens
ttcccttatatttgcttattcagtaatttagttacttgctacttacatttggtattaattcactaatttcagctaattaaaatcaaacgtacaataatatcctaattttcttgtaatagctactaaaatatagttataatagagaagtgtgttcaagtagttaaaaattaccacaagatttatgttcacaaattttcctatgagaatttttcgtctccaaacgttttgagagaaaaaataaatttttctgcttagtaaatttctcaaccttaaaacaagatgctggcctagggctaggagaggacttcttagttgaagctcctgcttctctggacaactttcctcttccttcttgcaaatgctttgcagagggacttgcacctctgctgctggacctggtcaggagcaagaggaaatttaaaacattcctcgggagtgcttgctcccagtggattgcatttgattgcgccttgtccttcgttgctttctttttgtgttgtttaattctgcttgttttttactgctatggatgttgcagatatctgtgaaattttactctattaggtcatcacctttagtaaatatttatccttgcataatttgagaaggtagacatgtttgttttgtaatattccccttagtaatatgagatagaagtacattggtaatggtagagatagatatttctaattaggtactaatgtttcttacagttttcagaataagtaaggaataatttttatgctatatattgccttccttttacagtgaagaagaactgttgtatctgagtttcattgaagatgtaacagatgaaattttgaaacttggtttattttcaaacaggtttttagaacgactgttcgagcgacatataaaacaaaataaacatttggaggaggaaaaaatgcgccacctgctgcatgtcctgaaagtagacttaggctgcacatcggaggaaaactcggtaaagcaaaatgatgttgatatgttgaatgtatttgattttgaaaaggctgggaattcagaaccaaatgaattaaaaaatgaaagtgaagtaacaattcagcaggaacgtcaacaataccaaaaggctttggatatgttattgtcggcaccaaaggatgagaacgagatattcccttcaccaactgaatttttcatgcctatttataaatcaaagcattcagaaggggttataattcaacaggtgaatgatgaaacaaatcttgaaacttcaactttggatgaaaatcatccaagtatttcagacagtttaacagatcgggaaacttctgtgaatgtcattgaaggtgatagtgaccctgaaaaggttgagatttcaaatggattatgtggtcttaacacatcaccctcccaatctgttcagttctccagtgtcaaaggcgacaataatcatgacatggagttatcaactcttaaaatcatggaaatgagcattgaggactgccctttggatgtttaatcttcattaataaatacctcaaatggccagtaactcaaaattact

SEQ ID NO: 424110 - DNA, 1305 bp, Homo sapiens
tgaattcgtgagagacttgagggaggcgctgcgactgacaagcggctctgcccgggaccttctcgctttcatctagcgctgcactcaatggaggggcgggcaccgcagtgcttaatgctgtcttaactagtgtaggaaaacggctcaacccaccgctgccgaaatgaagtataagaatcttatggcaagggccttatatgacaatgtcccagagtgtgccgaggaactggcctttcgcaagggagacatcctgaccgtcatagagcagaacacagggggactggaaggatggtggctgtgctcgttacacggtcggcaaggcattgtcccaggcaaccgggtgaagcttctgattggtcccatgcaggagactgcctccagtcacgagcagcctgcctctggactgatgcagcagacctttggccaacagaagctctatcaagtgccaaacccacaggctgctccccgagacaccatctaccaagtgccaccttcctaccaaaatcagggaatttaccaagtccccactggccacggcacccaagaacaagaggtatatcaggtgccaccatcagtgcagagaagcattgggggaaccagtgggccccacgtgggtaaaaaggtgttccagagagatgggcaagtgtcctatttcttagtgagagcctctaaacaaaccagcttgtgaacctccactgaaaagatctcatctgatgagcattttaataaagtgtcctgagtttggaggcttgccgtctttctcttggataaatatcttcatctcctagacttggaaaaacacattttctcctggggtttcccattggcgtgtcttgagctgctctggtgataaccgtaataatgccaatactgatacgaacagcagaaaacagtaaccccaagaactctacagatgatcatcaaggaccactgtctcttaccatttgctgctttggtttgaaattctcactgcctcgtagatctcattttgagcactatacattcctaaagattgatttctttctatctgacttaaatttaggaatgattaaatcttcatttctcccatgatttgatcctaaaacattttgaaaggaaacagccttgagatctgtgattactaagacatacataacattcttatcacattagaaagcaagaattgactgttgcttgtcttgttcctgttgtcttgtcccctgaattcctgtttatctttgattgtatgtgggacattgtattttcagtacatttgtagaaataatgtgaagcctataaagatgttctctgcctccaaaaaaaatt

SEQ ID NO: 424111 - DNA, 1024 bp, Homo sapiens
ttcatgggtaaactccactggtcaataatcaagtcactatctctatattggaggcaaaggattgcacaattcaggctatttgtaatgttgctttggattgtagagacttagactcagaggaatcacgggacatagaatctagaacaggtctgtgtcccatcattctcttaaaagaaaacctttcaagtaatatttcttattatcttttaaaatcttgttaaaatgacaaaatatatatatatttgtaatttttaaaattttgatgcatacaaagatagacatagatagatagataatgtagaagtataaataataataagtcactagagcatgactaactagtgaagttacccagtctcctctccatcccatctctctgtctcccatccactctacccaactcttcctttcaaagagtaggatttttctgcttcgtttttttactgctttgttcttacttagggttgctggaagcacatggaaggagggaagtagtcaaaacaagacagtgttgtgaggggagagatgagaagtcatgataagtaggtgggtgggtgacccacagggctggcatcagaaggaaacatagcaaaacatgatggatatgaggcttgctgtggggagggggattggcctttgtgagtggcagccgcctgctcccttcccgcttcccttagtgctccattgagctagcagcatgcagctgagaagttgaagttctgaccacatggcctctgctgccactgctctgccccatcccaggcacctagccagctctgcattaaggaggtgaagtggatgcccaaggaaagaagtgcccccaaggagacttgctgagaccttgaacaagtgacacaatgtgagcagaacttgtcttgacagaaaatgctttgtctctaggtgttccagagagatgggcaagtgtcctatttcttagtgagagcctctaaacaaaccagcttgtgaacctccactgaaaagatctcatctgatgagcattttaataaagtgtcctgagtttgga

SEQ ID NO: 424112 - DNA, 762 bp, Homo sapiens
atgccactcacatccgacgtgtgtggttgctcagtagggaaatgcttacagctgcctctagaagcaagtccgctcgctgcatggagagggaaacatgagcatgcagcaggactagctgtcacctcccgcccgcctgcccagagagggccagagcgtcggggaggcaagatgatccaccagcggttccatcctacacttggagagaatgaataatggggaaagaaactgaagagaaagtaacaggcaaggagatatttgcaggaggtatctcatggagagggcgtcttggcctgctcccctctggggccactaactcacaccagagctgactcaaccattccaggggaagattggtaagaagtttattcaccagacatgtctagctgaaatgaatgaaatcaaactcagcagaagtcaacacttagcacggaaggcaaagtagagacaaagggtcacccggctgctgcacaccggcctttagctttagctcaagttgttctgctttaaaggacaatgccaatcatctcataagtaaatgaagacaatgattcaacagtgctgtcaagtttgagagaaaagagaagccatccctacacccaacacttaatatattgttaggcttggggtgggttgcccagtgccttctgggatgacctgtgctcttttcttttatccaggagcaattagaatcaatctgcttcatctggaagttctgcccaagggtctggcaccataggaagttgtccaggattattttaaccc

SEQ ID NO: 424113 - DNA, 809 bp, Homo sapiens
atgccactcacatccgacgtgtgtggttgctcagtagggaaatgcttacagctgcctctagaagcaagtccgctcgctgcatggagagggaaacatgagcatgcagcaggactagctgtcacctcccgcccgcctgcccagagagggccagagcgtcggggaggcaagatgatccaccagcggttccatcctacacttggattcagtaagctgtgaggtccgtaatgtcagacactggcaaacatcatatgttcttcaagtagagttatgaaaacgaagaaactggtcagaagagtaaaacgccggaattgtcctttccaacatccagagctgcatcattccttggggcaaaatgtggacaaggctctgattctaaatccctgaagtggttgaacactgtgtctgaggccagaagctttcgtgggtcactagaaaagagcctagtgagggggaggaactggactggaacgtggaaagctggaatcgggtctgacctgccctgccgccttggcaaatcactcctacaggccttcaactgattggatgaggcccaccaacattatgaagggcaatctgctttactcaaagtccattggtttaaatgtaagtctcctcccaaaaaaccctcgcagaaacatccaaaataatgtctgaccaaatacgtgggcattgcagcccagtcacgttgacatatgaaattacccatcatggggatgaaaactggtgagtcactggcatatgaatagctggcatgactgtggactctggggagagagaagagaaggagaaggcagggcctaaggaacatc

SEQ ID NO: 424114 - DNA, 638 bp, Homo sapiens
atgccactcacatccgacgtgtgtggttgctcagtagggaaatgcttacagctgcctctagaagcaagtccgctcgctgcatggagagggaaacatgagcatgcagcaggactagctgtcacctcccgcccgcctgcccagagagggccagagcgtcggggaggcaagatgatccaccagcggttccatcctacacttggattcagtaagctgtgaggtccgtaatgtcagacactggcaaacatcatatgttcttcaagtagagttatgaaaacgaagaaactggtcagaagagtaaaacgccggaattgtcctttccaacatccagagctgcatcattccttggggcaaaatgtggacaaggtagtagagttgacctggagccagtgacctgacccttttgaatctctgtttctgtgtttataaaatggtgacaggaagattgttcagaggatgaaatgagaaaatgcacatagagtaactcatgctcaaaatgaaaaaaggtaaattcccttatctattgagatcgatcaactgttttctgtatctcagagaatcaaccatcaactgcacacaaataaaaaagctctgggcaccgtatcaagccaagaacagcccaatctcctttctgggcaaac

SEQ ID NO: 424115 - DNA, 4524 bp, Homo sapiens
tgaattcgtgagagacttgagggaggcgctgcgactgacaagcggctctgcccgggaccttctcgctttcatctagcgctgcactcaatggaggggcgggcaccgcagtgcttaatgctgtcttaactagtgtaggaaaacggctcaacccaccgctgccgaaatgaagtataagaatcttatggcaagggccttatatgacaatgtcccagagtgtgccgaggaactggcctttcgcaagggagacatcctgaccgtcatagagcagaacacagggggactggaaggatggtggctgtgctcgttacacggtcggcaaggcattgtcccaggcaaccgggtgaagcttctgattggtcccatgcaggagactgcctccagtcacgagcagcctgcctctggactgatgcagcagacctttggccaacagaagctctatcaagtgccaaacccacaggctgctccccgagacaccatctaccaagtgccaccttcctaccaaaatcagggaatttaccaagtccccactggccacggcacccaagaacaagaggtatatcaggtgccaccatcagtgcagagaagcattgggggaaccagtgggccccacgtgggtaaaaaggtgataacccccgtgaggacaggccatggctacgtatacgagtacccatccagataccaaaaggacgtctatgatatccctccttctcataccactcaaggggtatacgacatccctccctcatcagcaaaaggccctgtgttttcagttccagtgggagagataaaacctcaaggggtgtatgacatcccgcctacaaaaggggtatatgccattccgccctctgcttgccgggatgaagcagggcttagggaaaaagactatgacttcccccctcccatgagacaagctggaaggccggacctcagaccggagggggtttatgacattcctccaacctgcaccaagccagcagggaaggaccttcatgtaaaatacaactgtgacattccaggagctgcagaaccggtggctcgaaggcaccagagcctgtccccgaatcacccacccccgcaactcggacagtcagtgggctctcagaacgacgcatatgatgtcccccgaggcgttcagtttcttgagccaccagcagaaaccagtgagaaagcaaacccccaggaaagggatggtgtttatgatgtccctctgcataacccgccagatgctaaaggctctcgggacttggtggatgggatcaaccgattgtctttctccagtacaggcagcacccggagtaacatgtccacgtcttccacctcctccaaggagtcctcactgtcagcctccccagctcaggacaaaaggctcttcctggatccagacacagctattgagagacttcagcggctccagcaggcccttgagatgggtgtctccagcctaatggcactggtcactaccgactggcggtgttacggatatatggaaagacacatcaatgaaatacgcacagcagtggacaaggtggagctgttcctgaaggagtacctccactttgtcaagggagctgttgcaaatgctgcctgcctcccggaactcatcctccacaacaagatgaagcgggagctgcaacgagtcgaagactcccaccagatcctgagtcaaaccagccatgacttaaatgagtgcagctggtccctgaatatcttggccatcaacaagccccagaacaagtgtgacgatctggaccggtttgtgatggtggcaaagacggtgcccgatgacgccaagcagctcaccacaaccatcaacaccaacgcagaggccctcttcagacccggccctggcagcttgcatctgaagaatgggccggagagcatcatgaactcaacggagtacccacacggtggctcccagggacagctgctgcatcctggtgaccacaaggcccaggcccacaacaaggcactgcccccaggcctgagcaaggagcaggcccctgactgtagcagcagtgatggttctgagaggagctggatggatgactacgattacgtccacctacagggtaaggaggagtttgagaggcaacagaaagagctattggaaaaagagaatatcatgaaacagaacaagatgcagctggaacatcatcagctgagccagttccagctgttggaacaagagattacaaagcccgtggagaatgacatctcgaagtggaagccctctcagagcctacccaccacaaacagtggcgtgagtgctcaggatcggcagttgctgtgcttctactatgaccaatgtgagacccatttcatttcccttctcaacgccattgacgcactcttcagttgtgtcagctcagcccagcccccgcgaatcttcgtggcacacagcaagtttgtcatcctcagtgcacacaaactggtgttcattggagacacgctgacacggcaggtgactgcccaggacattcgcaacaaagtcatgaactccagcaaccagctctgcgagcagctcaagaccatagtcatggcaaccaagatggccgccctccattaccccagcaccacggccctgcaggaaatggtgcaccaagtgacagacctttctagaaatgcccagctgttcaagcgctctttgctggagatggcaacgttctgagaagaaaaaaaagaggaaggggactgcgttaacggttactaaggaaaactggaaatactgtctggtttttgtaaatgttatctatttttgtagatattttatataaaaatgaaatattttaacattttatgggtcagacaactttcagaaattcagggagctggagagggaaatctttttttttccccctgagtggttcttatgtatacatagaagtatctgagacataaactgtacagaaaacttgtccacgtgcttttgtatgcccatgtattcatgtttgtttgtagatgtttgtctgatgcatttcattaaaaaaaaaaccatgaattacgaagcaccttagtaagcaccttctaatgctgcattttttttgttgttgttaaaaacataccagctggttataatattgttctccacgtccttgtgatgattctgagcctggcactcccaaatctgggaagcatagtttatttgcaagtgttcaccttccaaatcatgaggcatagcatgacttattcttgttttgaaaactcttttcaaaactgaccatcttaaacacatgatggccaagtgcccaaaagccctcttgcggagcaaatttcagaatatatatgtggatccaagctctgatagttcaggtgctggagggaagagagacctgtgtgtttagaggccaggaccacagttaggattgggttgtttcaatactgagagacagctacaataaaaggagagcaattgcctccctggggctgttcaatcttctgcatttgtgagtggttcagtcatgaggttttccaaaagatgtttttagagttgtaaaaaccatatttgcagcaaagatttacaaaggcgtatcagactatgattgttcaccaaaataggggaatggtttgatccgccagttgcaagtagaggcctttctgactcttaatattcactttggtgctactacccccattacctgagggaaactggccaggtccttgatcatggaactatagagctaccaggacatatcctgctctctaagggaatttattgctatcttgcaccttctttaaaactcacatatgcagacctgacactcaagagtggctagctacacagagtccatctaatttttgcaacttcctgtggccagtgtgtataaccccttccactatctcacagatagtcacagcgtccattccatagtctgtctcctcacatctgttagtattgacacagcacagacaccacaagccatcaggttcttcatggggcaggtgaaatacttctaccccatgggtaaatgtatttacatattaccaagagaagaagcacattatctatgatcttttggcccagttcttatttagcatttttattccagcctacttggaaacatgtttttatttgcaatatatgcctgactgaattaagcttgcttgttttaaacaaccaaatcattggaacagaaaaggatttaaaaaacaagaatgcatgatctcagcgtgattaaaaaaaaatcagtggaaataaatgatcatagaaggtgcttttcaaaacaactgctattataattctcaaagtcctactctgccaaaagaagattaaaagtcatacattacattacaaggaaatgttcatgtgggaagagggttgctgaaaatcaacaacgcttgaagttaaaaagtgtgtctttgtagatttcattgtataatgtgtatttcttaggagatggctgacttgattgatctacgctaagtggagacatttcacatttttaaaaccaaatgttcaatctgtattactctttgccgtcttgtatgtagaggctatttttaaatcattaaatttttagatctctg

SEQ ID NO: 424116 - DNA, 4783 bp, Homo sapiens
tgaattcgtgagagacttgagggaggcgctgcgactgacaagcggctctgcccgggaccttctcgctttcatctagcgctgcactcaatggaggggcgggcaccgcagtgcttaatgctgtcttaactagtgtaggaaaacggctcaacccaccgctgccgaaatgaagtataagaatcttatggcaagggccttatatgacaatgtcccagagtgtgccgaggaactggcctttcgcaagggagacatcctgaccgtcatagagcagaacacagggggactggaaggatggtggctgtgctcgttacacggtcggcaaggcattgtcccaggcaaccgggtgaagcttctgattggtcccatgcaggagactgcctccagtcacgagcagcctgcctctggactgatgcagcagacctttggccaacagaagctctatcaagtgccaaacccacaggctgctccccgagacaccatctaccaagtgccaccttcctaccaaaatcagggaatttaccaagtccccactggccacggcacccaagaacaagaggtatatcaggtgccaccatcagtgcagagaagcattgggggaaccagtgggccccacgtgggtaaaaaggtgataacccccgtgaggacaggccatggctacgtatacgagtacccatccagataccaaaaggacgtctatgatatccctccttctcataccactcaaggggtatacgacatccctccctcatcagcaaaaggccctgtgttttcagttccagtgggagagataaaacctcaaggggtgtatgacatcccgcctacaaaaggggtatatgccattccgccctctgcttgccgggatgaagcagggcttagggaaaaagactatgacttcccccctcccatgagacaagctggaaggccggacctcagaccggagggggtttatgacattcctccaacctgcaccaagccagcagggaaggaccttcatgtaaaatacaactgtgacattccaggagctgcagaaccggtggctcgaaggcaccagagcctgtccccgaatcacccacccccgcaactcggacagtcagtgggctctcagaacgacgcatatgatgtcccccgaggcgttcagtttcttgagccaccagcagaaaccagtgagaaagcaaacccccaggaaagggatggtgtttatgatgtccctctgcataacccgccagatgctaaaggctctcgggacttggtggatgggatcaaccgattgtctttctccagtacaggcagcacccggagtaacatgtccacgtcttccacctcctccaaggagtcctcactgtcagcctccccagctcaggacaaaaggctcttcctggatccagacacagctattgagagacttcagcggctccagcaggcccttgagatgggtgtctccagcctaatggcactggtcactaccgactggcggtgttacggatatatggaaagacacatcaatgaaatacgcacagcagtggacaaggtggagctgttcctgaaggagtacctccactttgtcaagggagctgttgcaaatgctgcctgcctcccggaactcatcctccacaacaagatgaagcgggagctgcaacgagtcgaagactcccaccagatcctgagtcaaaccagccatgacttaaatgagtgcagctggtccctgaatatcttggccatcaacaagccccagaacaagtgtgacgatctggaccggtttgtgatggtggcaaagacggtgcccgatgacgccaagcagctcaccacaaccatcaacaccaacgcagaggccctcttcagacccggccctggcagcttgcatctgaagaatgggccggagagcatcatgaactcaacggagtacccacacggtggctcccagggacagctgctgcatcctggtgaccacaaggcccaggcccacaacaaggcactgcccccaggcctgagcaaggagcaggcccctgactgtagcagcagtgatggttctgagaggagctggatggatgactacgattacgtccacctacagggtaaggaggagtttgagaggcaacagaaagagctattggaaaaagagaatatcatgaaacagaacaagatgcagctggaacatcatcagctgagccagttccagctgttggaacaagagattacaaagcccgtggagaatgacatctcgaagtggaagccctctcagagcctacccaccacaaacagtggcgtgagtgctcaggatcggcagttgctgtgcttctactatgaccaatgtgagacccatttcatttcccttctcaacgccattgacgcactcttcagttgtgtcagctcagcccagcccccgcgaatcttcgtggcacacagcaagtttgtcatcctcagtgcacacaaactggtgttcattggagacacgctgacacggcaggtgactgcccaggacattcgcaacaaagtcatgaactccagcaaccagctctgcgagcagctcaagaccatagtcatggcaaccaagatggccgccctccattaccccagcaccacggccctgcaggaaatggtgcaccaagtgacagacctttctagaaatgcccagctgttcaagcgctctttgctggagatggcaacgttctgagaagaaaaaaaagaggaaggggactgcgttaacggttactaaggaaaactggaaatactgtctggtttttgtaaatgttatctatttttgtagatattttatataaaaatgaaatattttaacattttatgggtcagacaactttcagaaattcagggagctggagagggaaatctttttttttccccctgagtggttcttatgtatacatagaagtatctgagacataaactgtacagaaaacttgtccacgtgcttttgtatgcccatgtattcatgtttgtttgtagatgtttgtctgatgcatttcattaaaaaaaaaaccatgaattacgaagcaccttagtaagcaccttctaatgctgcattttttttgttgttgttaaaaacataccagctggttataatattgttctccacgtccttgtgatgattctgagcctggcactcccaaatctgggaagcatagtttatttgcaagtgttcaccttccaaatcatgaggcatagcatgacttattcttgttttgaaaactcttttcaaaactgaccatcttaaacacatgatggccaagtgcccaaaagccctcttgcggagcaaatttcagaatatatatgtggatccaagctctgatagttcaggtgctggagggaagagagacctgtgtgtttagaggccaggaccacagttaggattgggttgtttcaatactgagagacagctacaataaaaggagagcaattgcctccctggggctgttcaatcttctgcatttgtgagtggttcagtcatgaggttttccaaaagatgtttttagagttgtaaaaaccatatttgcagcaaagatttacaaaggcgtatcagactatgattgttcaccaaaataggggaatggtttgatccgccagttgcaagtagaggcctttctgactcttaatattcactttggtgctactacccccattacctgagggaaactggccaggtccttgatcatggaactatagagctaccaggacatatcctgctctctaagggaatttattgctatcttgcaccttctttaaaactcacatatgcagacctgacactcaagagtggctagctacacagagtccatctaatttttgcaacttcctgtggccagtgtgtataaccccttccactatctcacagatagtcacagcgtccattccatagtctgtctcctcacatctgttagtattgacacagcacagacaccacaagccatcaggttcttcatggggcaggtgaaatacttctaccccatgggtaaatgtatttacatattaccaagagaagaagcacattatctatgatcttttggcccagttcttatttagcatttttattccagcctacttggaaacatgtttttatttgcaatatatgcctgactgaattaagcttgcttgttttaaacaaccaaatcattggaacagaaaaggatttaaaaaacaagaatgcatgatctcagcgtgattaaaaaaaaatcagtggaaataaatgatcatagaaggtgcttttcaaaacaactgctattataattctcaaagtcctactctgccaaaagaagattaaaagtcatacattacattacaaggaaatgttcatgtgggaagagggttgctgaaaatcaacaacgcttgaagttaaaaagtgtgtctttgtagatttcattgtataatgtgtatttcttaggagatggctgacttgattgatctacgctaagtggagacatttcacatttttaaaaccaaatgttcaatctgtattactctttgccgtcttgtatgtagaggctatttttaaatcattaaatttttagatctctgaaaaaaaaacataaccaaaaacaaaaaacaaccaaaaaaaaagcacaaaaacacccaacaacaaaaaacaaaaaccactacaacagaacagaacacaagcgaggacatcaaaaaactaaacatacaacagcaaagagagacacaaacagagaacagaaacaaacacaaaagataaggacatcagacaaaaaaaagcgcgcaaacagaagcacagacaaacaagtgaggaacacaaaacaaacccaaaatagacaaccaa

SEQ ID NO: 424117 - DNA, 4290 bp, Homo sapiens
tgaattcgtgagagacttgagggaggcgctgcgactgacaagcggctctgcccgggaccttctcgctttcatctagcgctgcactcaatggaggggcgggcaccgcagtgcttaatgctgtcttaactagtgtaggaaaacggctcaacccaccgctgccgaaatgaagtataagaatcttatggcaagggccttatatgacaatgtcccagagtgtgccgaggaactggcctttcgcaagggagacatcctgaccgtcatagagcagaacacagggggactggaaggatggtggctgtgctcgttacacggtcggcaaggcattgtcccaggcaaccgggtgaagcttctgattggtcccatgcaggagactgcctccagtcacgagcagcctgcctctggactgatgcagcagacctttggccaacagaagctctatcaagtgccaaacccacaggctgctccccgagacaccatctaccaagtgccaccttcctaccaaaatcagggaatttaccaagtccccactggccacggcacccaagaacaagaggtatatcaggtgccaccatcagtgcagagaagcattgggggaaccagtgggccccacgtgggtaaaaaggtgataacccccgtgaggacaggccatggctacgtatacgagtacccatccagataccaaaaggacgtctatgatatccctccttctcataccactcaaggggtatacgacatccctccctcatcagcaaaaggccctgtgttttcagttccagtgggagagataaaacctcaaggggtgtatgacatcccgcctacaaaaggggtatatgccattccgccctctgcttgccgggatgaagcagggcttagggaaaaagactatgacttcccccctcccatgagacaagctggaaggccggacctcagaccggagggggtttatgacattcctccaacctgcaccaagccagcagggaaggaccttcatgtaaaatacaactgtgacattccaggagctgcagaaccggtggctcgaaggcaccagagcctgtccccgaatcacccacccccgcaactcggacagtcagtgggctctcagaacgacgcatatgatgtcccccgaggcgttcagtttcttgagccaccagcagaaaccagtgagaaagcaaacccccaggaaagggatggtgtttatgatgtccctctgcataacccgccagatgctaaaggctctcgggacttggtggatgggatcaaccgattgtctttctccagtacaggcagcacccggagtaacatgtccacgtcttccacctcctccaaggagtcctcactgtcagcctccccagctcaggacaaaaggctcttcctggatccagacacagctattgagagacttcagcggctccagcaggcccttgagatgggtgtctccagcctaatggcactggtcactaccgactggcggtgttacggatatatggaaagacacatcaatgaaatacgcacagcagtggacaaggtggagctgttcctgaaggagtacctccactttgtcaagggagctgttgcaaatgctgcctgcctcccggaactcatcctccacaacaagatgaagcgggagctgcaacgagtcgaagactcccaccagatcctgagtcaaaccagccatgacttaaatgagtgcagctggtccctgaatatcttggccatcaacaagccccagaacaagtgtgacgatctggaccggtttgtgatggtggcaaagacggtgcccgatgacgccaagcagctcaccacaaccatcaacaccaacgcagaggccctcttcagacccggccctggcagcttgcatctgaagaatgggccggagagcatcatgaactcaacggagtacccacacggtggctcccagggacagctgctgcatcctggtgaccacaaggcccaggcccacaacaaggcactgcccccaggcctgagcaaggagcaggcccctgactgtagcagcagtgatggttctgagaggagctggatggatgactacgattacgtccacctacagggtaaggaggagtttgagaggcaacagaaagagctattggaaaaagagaatatcatgaaacagaacaagatgcagctggaacatcatcagctgagccagttccagctgttggaacaagagattacaaagcccgtggagaatgacatctcgaagtggaagccctctcagagcctacccaccacaaacagtggcgtgagtgctcaggatcggcagttgctgtgcttctactatgaccaatgtgagacccatttcatttcccttctcaacgccattgacgcactcttcagttgtgtcagctcagcccagcccccgcgaatcttcgtggcacacagcaagtttgtcatcctcagtgcacacaaactggtgttcattggagacacgctgacacggcaggtgactgcccaggacattcgcaacaaagtcatgaactccagcaaccagctctgcgagcagctcaagaccatagtcatggcaaccaagatggccgccctccattaccccagcaccacggccctgcaggaaatggtgcaccaagtgacagacctttctagaaatgcccagctgttcaagcgctctttgctggagatggcaacgttctgagaagaaaaaaaagaggaaggggactgcgttaacggttactaaggaaaactggaaatactgtctggtttttgtaaatgttatctatttttgtagatattttatataaaaatgaaatattttaacattttatgggtcagacaactttcagaaattcagggagctggagagggaaatctttttttttccccctgagtggttcttatgtatacatagaagtatctgagacataaactgtacagaaaacttgtccacgtgcttttgtatgcccatgtattcatgtttgtttgtagatgtttgtctgatgcatttcattaaaaaaaaaaccatgaattacgaagcaccttagtaagcaccttctaatgctgcattttttttgttgttgttaaaaacataccagctggttataatattgttctccacgtccttgtgatgattctgagcctggcactcccaaatctgggaagcatagtttatttgcaagtgttcaccttccaaatcatgaggcatagcatgacttattcttgttttgaaaactcttttcaaaactgaccatcttaaacacatgatggccaagtgcccaaaagccctcttgcggagcaaatttcagaatatatatgtggatccaagctctgatagttcaggtgctggagggaagagagacctgtgtgtttagaggccaggaccacagttaggattgggttgtttcaatactgagagacagctacaataaaaggagagcaattgcctccctggggctgttcaatcttctgcatttgtgagtggttcagtcatgaggttttccaaaagatgtttttagagttgtaaaaaccatatttgcagcaaagatttacaaaggcgtatcagactatgattgttcaccaaaataggggaatggtttgatccgccagttgcaagtagaggcctttctgactcttaatattcactttggtgctactacccccattacctgagggaaactggccaggtccttgatcatggaactatagagctaccaggacatatcctgctctctaagggaatttattgctatcttgcaccttctttaaaactcacatatgcagacctgacactcaagagtggctagctacacagagtccatctaatttttgcaacttcctgtggccagtgtgtataaccccttccactatctcacagatagtcacagcgtccattccatagtctgtctcctcacatctgttagtattgacacagcacagacaccacaagccatcaggttcttcatggggcaggtgaaatacttctaccccatgggtaaatgtatttacatattaccaagagaagaagcacattatctatgatcttttggcccagttcttatttagcatttttattccagcctacttggaaacatgtttttatttgcaatatatgcctgactgaattaagcttgcttgttttaaacaaccaaatcattggaacagggctttcccaacccaggatggctgttctcagcgtgattcacaagcatcgcggccctcacgatcctgcacggtgcttccacacaccgggccctacttccgtctacccgcccaggacatttaacgtctccttccttccagggccggcccgtggcgcgggcg

SEQ ID NO: 424118 - DNA, 4475 bp, Homo sapiens
tgaattcgtgagagacttgagggaggcgctgcgactgacaagcggctctgcccgggaccttctcgctttcatctagcgctgcactcaatggaggggcgggcaccgcagtgcttaatgctgtcttaactagtgtaggaaaacggctcaacccaccgctgccgaaatgaagtataagaatcttatggcaagggccttatatgacaatgtcccagagtgtgccgaggaactggcctttcgcaagggagacatcctgaccgtcatagagcagaacacagggggactggaaggatggtggctgtgctcgttacacggtcggcaaggcattgtcccaggcaaccgggtgaagcttctgattggtcccatgcaggagactgcctccagtcacgagcagcctgcctctggactgatgcagcagacctttggccaacagaagctctatcaagtgccaaacccacaggctgctccccgagacaccatctaccaagtgccaccttcctaccaaaatcagggaatttaccaagtccccactggccacggcacccaagaacaagaggtatatcaggtgccaccatcagtgcagagaagcattgggggaaccagtgggccccacgtgggtaaaaaggtgataacccccgtgaggacaggccatggctacgtatacgagtacccatccagataccaaaaggacgtctatgatatccctccttctcataccactcaaggggtatacgacatccctccctcatcagcaaaaggccctgtgttttcagttccagtgggagagataaaacctcaaggggtgtatgacatcccgcctacaaaaggggtatatgccattccgccctctgcttgccgggatgaagcagggcttagggaaaaagactatgacttcccccctcccatgagacaagctggaaggccggacctcagaccggagggggtttatgacattcctccaacctgcaccaagccagcagggaaggaccttcatgtaaaatacaactgtgacattccaggagctgcagaaccggtggctcgaaggcaccagagcctgtccccgaatcacccacccccgcaactcggacagtcagtgggctctcagaacgacgcatatgatgtcccccgaggcgttcagtttcttgagccaccagcagaaaccagtgagaaagcaaacccccaggaaagggatggtgtttatgatgtccctctgcataacccgccagatgctaaaggctctcgggacttggtggatgggatcaaccgattgtctttctccagtacaggcagcacccggagtaacatgtccacgtcttccacctcctccaaggagtcctcactgtcagcctccccagctcaggacaaaagcaggcccttgagatgggtgtctccagcctaatggcactggtcactaccgactggcggtgttacggatatatggaaagacacatcaatgaaatacgcacagcagtggacaaggtggagctgttcctgaaggagtacctccactttgtcaagggagctgttgcaaatgctgcctgcctcccggaactcatcctccacaacaagatgaagcgggagctgcaacgagtcgaagactcccaccagatcctgagtcaaaccagccatgacttaaatgagtgcagctggtccctgaatatcttggccatcaacaagccccagaacaagtgtgacgatctggaccggtttgtgatggtggcaaagacggtgcccgatgacgccaagcagctcaccacaaccatcaacaccaacgcagaggccctcttcagacccggccctggcagcttgcatctgaagaatgggccggagagcatcatgaactcaacggagtacccacacggtggctcccagggacagctgctgcatcctggtgaccacaaggcccaggcccacaacaaggcactgcccccaggcctgagcaaggagcaggcccctgactgtagcagcagtgatggttctgagaggagctggatggatgactacgattacgtccacctacagggtaaggaggagtttgagaggcaacagaaagagctattggaaaaagagaatatcatgaaacagaacaagatgcagctggaacatcatcagctgagccagttccagctgttggaacaagagattacaaagcccgtggagaatgacatctcgaagtggaagccctctcagagcctacccaccacaaacagtggcgtgagtgctcaggatcggcagttgctgtgcttctactatgaccaatgtgagacccatttcatttcccttctcaacgccattgacgcactcttcagttgtgtcagctcagcccagcccccgcgaatcttcgtggcacacagcaagtttgtcatcctcagtgcacacaaactggtgttcattggagacacgctgacacggcaggtgactgcccaggacattcgcaacaaagtcatgaactccagcaaccagctctgcgagcagctcaagaccatagtcatggcaaccaagatggccgccctccattaccccagcaccacggccctgcaggaaatggtgcaccaagtgacagacctttctagaaatgcccagctgttcaagcgctctttgctggagatggcaacgttctgagaagaaaaaaaagaggaaggggactgcgttaacggttactaaggaaaactggaaatactgtctggtttttgtaaatgttatctatttttgtagatattttatataaaaatgaaatattttaacattttatgggtcagacaactttcagaaattcagggagctggagagggaaatctttttttttccccctgagtggttcttatgtatacatagaagtatctgagacataaactgtacagaaaacttgtccacgtgcttttgtatgcccatgtattcatgtttgtttgtagatgtttgtctgatgcatttcattaaaaaaaaaaccatgaattacgaagcaccttagtaagcaccttctaatgctgcattttttttgttgttgttaaaaacataccagctggttataatattgttctccacgtccttgtgatgattctgagcctggcactcccaaatctgggaagcatagtttatttgcaagtgttcaccttccaaatcatgaggcatagcatgacttattcttgttttgaaaactcttttcaaaactgaccatcttaaacacatgatggccaagtgcccaaaagccctcttgcggagcaaatttcagaatatatatgtggatccaagctctgatagttcaggtgctggagggaagagagacctgtgtgtttagaggccaggaccacagttaggattgggttgtttcaatactgagagacagctacaataaaaggagagcaattgcctccctggggctgttcaatcttctgcatttgtgagtggttcagtcatgaggttttccaaaagatgtttttagagttgtaaaaaccatatttgcagcaaagatttacaaaggcgtatcagactatgattgttcaccaaaataggggaatggtttgatccgccagttgcaagtagaggcctttctgactcttaatattcactttggtgctactacccccattacctgagggaaactggccaggtccttgatcatggaactatagagctaccaggacatatcctgctctctaagggaatttattgctatcttgcaccttctttaaaactcacatatgcagacctgacactcaagagtggctagctacacagagtccatctaatttttgcaacttcctgtggccagtgtgtataaccccttccactatctcacagatagtcacagcgtccattccatagtctgtctcctcacatctgttagtattgacacagcacagacaccacaagccatcaggttcttcatggggcaggtgaaatacttctaccccatgggtaaatgtatttacatattaccaagagaagaagcacattatctatgatcttttggcccagttcttatttagcatttttattccagcctacttggaaacatgtttttatttgcaatatatgcctgactgaattaagcttgcttgttttaaacaaccaaatcattggaacagaaaaggatttaaaaaacaagaatgcatgatctcagcgtgattaaaaaaaaatcagtggaaataaatgatcatagaaggtgcttttcaaaacaactgctattataattctcaaagtcctactctgccaaaagaagattaaaagtcatacattacattacaaggaaatgttcatgtgggaagagggttgctgaaaatcaacaacgcttgaagttaaaaagtgtgtctttgtagatttcattgtataatgtgtatttcttaggagatggctgacttgattgatctacgctaagtggagacatttcacatttttaaaaccaaatgttcaatctgtattactctttgccgtcttgtatgtagaggctatttttaaatcattaaatttttagatctctg

SEQ ID NO: 424119 - DNA, 4713 bp, Homo sapiens
atgccactcacatccgacgtgtgtggttgctcagtagggaaatgcttacagctgcctctagaagcaagtccgctcgctgcatggagagggaaacatgagcatgcagcaggactagctgtcacctcccgcccgcctgcccagagagggccagagcgtcggggaggcaagatgatccaccagcggttccatcctacacttggattcagtaagctgtgaggtccgtaatgtcagacactggcaaacatcatatgttcttcaagtagagttatgaaaacgaagaaactggtcagaagagtaaaacgccggaattgtcctttccaacatccagagctgcatcattccttggggcaaaatgtggacaaggaatcttatggcaagggccttatatgacaatgtcccagagtgtgccgaggaactggcctttcgcaagggagacatcctgaccgtcatagagcagaacacagggggactggaaggatggtggctgtgctcgttacacggtcggcaaggcattgtcccaggcaaccgggtgaagcttctgattggtcccatgcaggagactgcctccagtcacgagcagcctgcctctggactgatgcagcagacctttggccaacagaagctctatcaagtgccaaacccacaggctgctccccgagacaccatctaccaagtgccaccttcctaccaaaatcagggaatttaccaagtccccactggccacggcacccaagaacaagaggtatatcaggtgccaccatcagtgcagagaagcattgggggaaccagtgggccccacgtgggtaaaaaggtgataacccccgtgaggacaggccatggctacgtatacgagtacccatccagataccaaaaggacgtctatgatatccctccttctcataccactcaaggggtatacgacatccctccctcatcagcaaaaggccctgtgttttcagttccagtgggagagataaaacctcaaggggtgtatgacatcccgcctacaaaaggggtatatgccattccgccctctgcttgccgggatgaagcagggcttagggaaaaagactatgacttcccccctcccatgagacaagctggaaggccggacctcagaccggagggggtttatgacattcctccaacctgcaccaagccagcagggaaggaccttcatgtaaaatacaactgtgacattccaggagctgcagaaccggtggctcgaaggcaccagagcctgtccccgaatcacccacccccgcaactcggacagtcagtgggctctcagaacgacgcatatgatgtcccccgaggcgttcagtttcttgagccaccagcagaaaccagtgagaaagcaaacccccaggaaagggatggtgtttatgatgtccctctgcataacccgccagatgctaaaggctctcgggacttggtggatgggatcaaccgattgtctttctccagtacaggcagcacccggagtaacatgtccacgtcttccacctcctccaaggagtcctcactgtcagcctccccagctcaggacaaaaggctcttcctggatccagacacagctattgagagacttcagcggctccagcaggcccttgagatgggtgtctccagcctaatggcactggtcactaccgactggcggtgttacggatatatggaaagacacatcaatgaaatacgcacagcagtggacaaggtggagctgttcctgaaggagtacctccactttgtcaagggagctgttgcaaatgctgcctgcctcccggaactcatcctccacaacaagatgaagcgggagctgcaacgagtcgaagactcccaccagatcctgagtcaaaccagccatgacttaaatgagtgcagctggtccctgaatatcttggccatcaacaagccccagaacaagtgtgacgatctggaccggtttgtgatggtggcaaagacggtgcccgatgacgccaagcagctcaccacaaccatcaacaccaacgcagaggccctcttcagacccggccctggcagcttgcatctgaagaatgggccggagagcatcatgaactcaacggagtacccacacggtggctcccagggacagctgctgcatcctggtgaccacaaggcccaggcccacaacaaggcactgcccccaggcctgagcaaggagcaggcccctgactgtagcagcagtgatggttctgagaggagctggatggatgactacgattacgtccacctacagggtaaggaggagtttgagaggcaacagaaagagctattggaaaaagagaatatcatgaaacagaacaagatgcagctggaacatcatcagctgagccagttccagctgttggaacaagagattacaaagcccgtggagaatgacatctcgaagtggaagccctctcagagcctacccaccacaaacagtggcgtgagtgctcaggatcggcagttgctgtgcttctactatgaccaatgtgagacccatttcatttcccttctcaacgccattgacgcactcttcagttgtgtcagctcagcccagcccccgcgaatcttcgtggcacacagcaagtttgtcatcctcagtgcacacaaactggtgttcattggagacacgctgacacggcaggtgactgcccaggacattcgcaacaaagtcatgaactccagcaaccagctctgcgagcagctcaagaccatagtcatggcaaccaagatggccgccctccattaccccagcaccacggccctgcaggaaatggtgcaccaagtgacagacctttctagaaatgcccagctgttcaagcgctctttgctggagatggcaacgttctgagaagaaaaaaaagaggaaggggactgcgttaacggttactaaggaaaactggaaatactgtctggtttttgtaaatgttatctatttttgtagatattttatataaaaatgaaatattttaacattttatgggtcagacaactttcagaaattcagggagctggagagggaaatctttttttttccccctgagtggttcttatgtatacatagaagtatctgagacataaactgtacagaaaacttgtccacgtgcttttgtatgcccatgtattcatgtttgtttgtagatgtttgtctgatgcatttcattaaaaaaaaaaccatgaattacgaagcaccttagtaagcaccttctaatgctgcattttttttgttgttgttaaaaacataccagctggttataatattgttctccacgtccttgtgatgattctgagcctggcactcccaaatctgggaagcatagtttatttgcaagtgttcaccttccaaatcatgaggcatagcatgacttattcttgttttgaaaactcttttcaaaactgaccatcttaaacacatgatggccaagtgcccaaaagccctcttgcggagcaaatttcagaatatatatgtggatccaagctctgatagttcaggtgctggagggaagagagacctgtgtgtttagaggccaggaccacagttaggattgggttgtttcaatactgagagacagctacaataaaaggagagcaattgcctccctggggctgttcaatcttctgcatttgtgagtggttcagtcatgaggttttccaaaagatgtttttagagttgtaaaaaccatatttgcagcaaagatttacaaaggcgtatcagactatgattgttcaccaaaataggggaatggtttgatccgccagttgcaagtagaggcctttctgactcttaatattcactttggtgctactacccccattacctgagggaaactggccaggtccttgatcatggaactatagagctaccaggacatatcctgctctctaagggaatttattgctatcttgcaccttctttaaaactcacatatgcagacctgacactcaagagtggctagctacacagagtccatctaatttttgcaacttcctgtggccagtgtgtataaccccttccactatctcacagatagtcacagcgtccattccatagtctgtctcctcacatctgttagtattgacacagcacagacaccacaagccatcaggttcttcatggggcaggtgaaatacttctaccccatgggtaaatgtatttacatattaccaagagaagaagcacattatctatgatcttttggcccagttcttatttagcatttttattccagcctacttggaaacatgtttttatttgcaatatatgcctgactgaattaagcttgcttgttttaaacaaccaaatcattggaacagaaaaggatttaaaaaacaagaatgcatgatctcagcgtgattaaaaaaaaatcagtggaaataaatgatcatagaaggtgcttttcaaaacaactgctattataattctcaaagtcctactctgccaaaagaagattaaaagtcatacattacattacaaggaaatgttcatgtgggaagagggttgctgaaaatcaacaacgcttgaagttaaaaagtgtgtctttgtagatttcattgtataatgtgtatttcttaggagatggctgacttgattgatctacgctaagtggagacatttcacatttttaaaaccaaatgttcaatctgtattactctttgccgtcttgtatgtagaggctatttttaaatcattaaatttttagatctctg

SEQ ID NO: 424120 - DNA, 4077 bp, Homo sapiens
tgaattcgtgagagacttgagggaggcgctgcgactgacaagcggctctgcccgggaccttctcgctttcatctagcgctgcactcaatggaggggcgggcaccgcagtgcttaatgctgtcttaactagtgtaggaaaacggctcaacccaccgctgccgaaatgaagtataaggtgataacccccgtgaggacaggccatggctacgtatacgagtacccatccagataccaaaaggacgtctatgatatccctccttctcataccactcaaggggtatacgacatccctccctcatcagcaaaaggccctgtgttttcagttccagtgggagagataaaacctcaaggggtgtatgacatcccgcctacaaaaggggtatatgccattccgccctctgcttgccgggatgaagcagggcttagggaaaaagactatgacttcccccctcccatgagacaagctggaaggccggacctcagaccggagggggtttatgacattcctccaacctgcaccaagccagcagggaaggaccttcatgtaaaatacaactgtgacattccaggagctgcagaaccggtggctcgaaggcaccagagcctgtccccgaatcacccacccccgcaactcggacagtcagtgggctctcagaacgacgcatatgatgtcccccgaggcgttcagtttcttgagccaccagcagaaaccagtgagaaagcaaacccccaggaaagggatggtgtttatgatgtccctctgcataacccgccagatgctaaaggctctcgggacttggtggatgggatcaaccgattgtctttctccagtacaggcagcacccggagtaacatgtccacgtcttccacctcctccaaggagtcctcactgtcagcctccccagctcaggacaaaaggctcttcctggatccagacacagctattgagagacttcagcggctccagcaggcccttgagatgggtgtctccagcctaatggcactggtcactaccgactggcggtgttacggatatatggaaagacacatcaatgaaatacgcacagcagtggacaaggtggagctgttcctgaaggagtacctccactttgtcaagggagctgttgcaaatgctgcctgcctcccggaactcatcctccacaacaagatgaagcgggagctgcaacgagtcgaagactcccaccagatcctgagtcaaaccagccatgacttaaatgagtgcagctggtccctgaatatcttggccatcaacaagccccagaacaagtgtgacgatctggaccggtttgtgatggtggcaaagacggtgcccgatgacgccaagcagctcaccacaaccatcaacaccaacgcagaggccctcttcagacccggccctggcagcttgcatctgaagaatgggccggagagcatcatgaactcaacggagtacccacacggtggctcccagggacagctgctgcatcctggtgaccacaaggcccaggcccacaacaaggcactgcccccaggcctgagcaaggagcaggcccctgactgtagcagcagtgatggttctgagaggagctggatggatgactacgattacgtccacctacagggtaaggaggagtttgagaggcaacagaaagagctattggaaaaagagaatatcatgaaacagaacaagatgcagctggaacatcatcagctgagccagttccagctgttggaacaagagattacaaagcccgtggagaatgacatctcgaagtggaagccctctcagagcctacccaccacaaacagtggcgtgagtgctcaggatcggcagttgctgtgcttctactatgaccaatgtgagacccatttcatttcccttctcaacgccattgacgcactcttcagttgtgtcagctcagcccagcccccgcgaatcttcgtggcacacagcaagtttgtcatcctcagtgcacacaaactggtgttcattggagacacgctgacacggcaggtgactgcccaggacattcgcaacaaagtcatgaactccagcaaccagctctgcgagcagctcaagaccatagtcatggcaaccaagatggccgccctccattaccccagcaccacggccctgcaggaaatggtgcaccaagtgacagacctttctagaaatgcccagctgttcaagcgctctttgctggagatggcaacgttctgagaagaaaaaaaagaggaaggggactgcgttaacggttactaaggaaaactggaaatactgtctggtttttgtaaatgttatctatttttgtagatattttatataaaaatgaaatattttaacattttatgggtcagacaactttcagaaattcagggagctggagagggaaatctttttttttccccctgagtggttcttatgtatacatagaagtatctgagacataaactgtacagaaaacttgtccacgtgcttttgtatgcccatgtattcatgtttgtttgtagatgtttgtctgatgcatttcattaaaaaaaaaaccatgaattacgaagcaccttagtaagcaccttctaatgctgcattttttttgttgttgttaaaaacataccagctggttataatattgttctccacgtccttgtgatgattctgagcctggcactcccaaatctgggaagcatagtttatttgcaagtgttcaccttccaaatcatgaggcatagcatgacttattcttgttttgaaaactcttttcaaaactgaccatcttaaacacatgatggccaagtgcccaaaagccctcttgcggagcaaatttcagaatatatatgtggatccaagctctgatagttcaggtgctggagggaagagagacctgtgtgtttagaggccaggaccacagttaggattgggttgtttcaatactgagagacagctacaataaaaggagagcaattgcctccctggggctgttcaatcttctgcatttgtgagtggttcagtcatgaggttttccaaaagatgtttttagagttgtaaaaaccatatttgcagcaaagatttacaaaggcgtatcagactatgattgttcaccaaaataggggaatggtttgatccgccagttgcaagtagaggcctttctgactcttaatattcactttggtgctactacccccattacctgagggaaactggccaggtccttgatcatggaactatagagctaccaggacatatcctgctctctaagggaatttattgctatcttgcaccttctttaaaactcacatatgcagacctgacactcaagagtggctagctacacagagtccatctaatttttgcaacttcctgtggccagtgtgtataaccccttccactatctcacagatagtcacagcgtccattccatagtctgtctcctcacatctgttagtattgacacagcacagacaccacaagccatcaggttcttcatggggcaggtgaaatacttctaccccatgggtaaatgtatttacatattaccaagagaagaagcacattatctatgatcttttggcccagttcttatttagcatttttattccagcctacttggaaacatgtttttatttgcaatatatgcctgactgaattaagcttgcttgttttaaacaaccaaatcattggaacagaaaaggatttaaaaaacaagaatgcatgatctcagcgtgattaaaaaaaaatcagtggaaataaatgatcatagaaggtgcttttcaaaacaactgctattataattctcaaagtcctactctgccaaaagaagattaaaagtcatacattacattacaaggaaatgttcatgtgggaagagggttgctgaaaatcaacaacgcttgaagttaaaaagtgtgtctttgtagatttcattgtataatgtgtatttcttaggagatggctgacttgattgatctacgctaagtggagacatttcacatttttaaaaccaaatgttcaatctgtattactctttgccgtcttgtatgtagaggctatttttaaatcattaaatttttagatctctg

SEQ ID NO: 424121 - DNA, 3855 bp, Homo sapiens
tgaattcgtgagagacttgagggaggcgctgcgactgacaagcggctctgcccgggaccttctcgctttcatctagcgctgcactcaatggaggggcgggcaccgcagtgcttaatgctgtcttaactagtgtaggaaaacggctcaacccaccgctgccgaaatgaagtataagaatcttatggcaagggccttatatgacaatgtcccagagtgtgccgaggaactggcctttcgcaagggagacatcctgaccgtcatagagcagaacacagggggactggaaggatggtggctgtgctcgttacacggtcggcaaggcattgtcccaggcaaccgggtgaagcttctgattggtcccatgcaggagactgcctccagtcacgagcagcctgcctctggactgatgcagcagacctttggccaacagaagctctatcaagtgccaaacccacaggctgctccccgagacaccatctaccaagtgccaccttcctaccaaaatcagggaatttaccaagtccccactggccacggcacccaagaacaagaggtatatcaggtgccaccatcagtgcagagaagcattgggggaaccagtgggccccacgtgggtaaaaaggtgataacccccgtgaggacaggccatggctacgtatacgagtacccatccagataccaaaaggacgtctatgatatccctccttctcataccactcaaggggtatacgacatccctccctcatcagcaaaaggccctgtgttttcagttccagtgggagagataaaacctcaaggggtgtatgacatcccgcctacaaaaggggtatatgccattccgccctctgcttgccgggatgaagcagggcttagggaaaaagactatgacttcccccctcccatgagacaagctggaaggccggacctcagaccggagggggtttatgacattcctccaacctgcaccaagccagcagggaaggaccttcatgtaaaatacaactgtgacattccaggagctgcagaaccggtggctcgaaggcaccagagcctgtccccgaatcacccacccccgcaactcggacagtcagtgggctctcagaacgacgcatatgatgtcccccgaggcgttcagtttcttgagccaccagcagaaaccagtgagaaagcaaacccccaggaaagggatggtgtttatgatgtccctctgcataacccgccagatgctaaaggctctcgggacttggtggatgggatcaaccgattgtctttctccagtacaggcagcacccggagtaacatgtccacgtcttccacctcctccaaggagtcctcactgtcagcctccccagctcaggacaaaagctggatggatgactacgattacgtccacctacagggtaaggaggagtttgagaggcaacagaaagagctattggaaaaagagaatatcatgaaacagaacaagatgcagctggaacatcatcagctgagccagttccagctgttggaacaagagattacaaagcccgtggagaatgacatctcgaagtggaagccctctcagagcctacccaccacaaacagtggcgtgagtgctcaggatcggcagttgctgtgcttctactatgaccaatgtgagacccatttcatttcccttctcaacgccattgacgcactcttcagttgtgtcagctcagcccagcccccgcgaatcttcgtggcacacagcaagtttgtcatcctcagtgcacacaaactggtgttcattggagacacgctgacacggcaggtgactgcccaggacattcgcaacaaagtcatgaactccagcaaccagctctgcgagcagctcaagaccatagtcatggcaaccaagatggccgccctccattaccccagcaccacggccctgcaggaaatggtgcaccaagtgacagacctttctagaaatgcccagctgttcaagcgctctttgctggagatggcaacgttctgagaagaaaaaaaagaggaaggggactgcgttaacggttactaaggaaaactggaaatactgtctggtttttgtaaatgttatctatttttgtagatattttatataaaaatgaaatattttaacattttatgggtcagacaactttcagaaattcagggagctggagagggaaatctttttttttccccctgagtggttcttatgtatacatagaagtatctgagacataaactgtacagaaaacttgtccacgtgcttttgtatgcccatgtattcatgtttgtttgtagatgtttgtctgatgcatttcattaaaaaaaaaaccatgaattacgaagcaccttagtaagcaccttctaatgctgcattttttttgttgttgttaaaaacataccagctggttataatattgttctccacgtccttgtgatgattctgagcctggcactcccaaatctgggaagcatagtttatttgcaagtgttcaccttccaaatcatgaggcatagcatgacttattcttgttttgaaaactcttttcaaaactgaccatcttaaacacatgatggccaagtgcccaaaagccctcttgcggagcaaatttcagaatatatatgtggatccaagctctgatagttcaggtgctggagggaagagagacctgtgtgtttagaggccaggaccacagttaggattgggttgtttcaatactgagagacagctacaataaaaggagagcaattgcctccctggggctgttcaatcttctgcatttgtgagtggttcagtcatgaggttttccaaaagatgtttttagagttgtaaaaaccatatttgcagcaaagatttacaaaggcgtatcagactatgattgttcaccaaaataggggaatggtttgatccgccagttgcaagtagaggcctttctgactcttaatattcactttggtgctactacccccattacctgagggaaactggccaggtccttgatcatggaactatagagctaccaggacatatcctgctctctaagggaatttattgctatcttgcaccttctttaaaactcacatatgcagacctgacactcaagagtggctagctacacagagtccatctaatttttgcaacttcctgtggccagtgtgtataaccccttccactatctcacagatagtcacagcgtccattccatagtctgtctcctcacatctgttagtattgacacagcacagacaccacaagccatcaggttcttcatggggcaggtgaaatacttctaccccatgggtaaatgtatttacatattaccaagagaagaagcacattatctatgatcttttggcccagttcttatttagcatttttattccagcctacttggaaacatgtttttatttgcaatatatgcctgactgaattaagcttgcttgttttaaacaaccaaatcattggaacagaaaaggatttaaaaaacaagaatgcatgatctcagcgtgattaaaaaaaaatcagtggaaataaatgatcatagaaggtgcttttcaaaacaactgctattataattctcaaagtcctactctgccaaaagaagattaaaagtcatacattacattacaaggaaatgttcatgtgggaagagggttgctgaaaatcaacaacgcttgaagttaaaaagtgtgtctttgtagatttcattgtataatgtgtatttcttaggagatggctgacttgattgatctacgctaagtggagacatttcacatttttaaaaccaaatgttcaatctgtattactctttgccgtcttgtatgtagaggctatttttaaatcattaaatttttagatctctg

SEQ ID NO: 424122 - DNA, 3113 bp, Homo sapiens
atacaccatttggtagcatgaggaaagaaggaagaaagccagcacctgatgcatctgactctgggtaaaacccccttcttttaacagctctgggggactaaatattatgatgcacaattcccattcagactgccttagaaactttttttccttaagtgctcatatatttatatgcattaatcttcctgtagtgctggatcataacatgtctatcaatcttcacagaaagagtaggataaacagaaaggggtcatgaatggtcatttcatctgagcatcctgagatagtagaggctttctccgagaaggagcaaactgtcagtgacttacttgacaaggaggtcactacatttggttttcccttgccacccctcaacattaataaacatttacatagagcctactacataccaaactattataagcacttggtaaacgttaactcatttaacctccataaaggtgtaggtaacagggctgcggtttaaacactatgctaccttctagccagagggtacaagagaccagtagtccaatcatagaaggtctgagcttgaggatcatctttcccaacgtctacattttacaatttaggaaagcaaggcagcttgacccaggctttacagctcacatgcatctgacagttactagcgactaaaatccctgtcttttaactccaaggcctagtgaatttccattgcaacacactcccttgctctaatgagatctgctttcgtcttccttgcagctgagccagttccagctgttggaacaagagattacaaagcccgtggagaatgacatctcgaagtggaagccctctcagagcctacccaccacaaacagtggcgtgagtgctcaggatcggcagttgctgtgcttctactatgaccaatgtgagacccatttcatttcccttctcaacgccattgacgcactcttcagttgtgtcagctcagcccagcccccgcgaatcttcgtggcacacagcaagtttgtcatcctcagtgcacacaaactggtgttcattggagacacgctgacacggcaggtgactgcccaggacattcgcaacaaagtcatgaactccagcaaccagctctgcgagcagctcaagaccatagtcatggcaaccaagatggccgccctccattaccccagcaccacggccctgcaggaaatggtgcaccaagtgacagacctttctagaaatgcccagctgttcaagcgctctttgctggagatggcaacgttctgagaagaaaaaaaagaggaaggggactgcgttaacggttactaaggaaaactggaaatactgtctggtttttgtaaatgttatctatttttgtagatattttatataaaaatgaaatattttaacattttatgggtcagacaactttcagaaattcagggagctggagagggaaatctttttttttccccctgagtggttcttatgtatacatagaagtatctgagacataaactgtacagaaaacttgtccacgtgcttttgtatgcccatgtattcatgtttgtttgtagatgtttgtctgatgcatttcattaaaaaaaaaaccatgaattacgaagcaccttagtaagcaccttctaatgctgcattttttttgttgttgttaaaaacataccagctggttataatattgttctccacgtccttgtgatgattctgagcctggcactcccaaatctgggaagcatagtttatttgcaagtgttcaccttccaaatcatgaggcatagcatgacttattcttgttttgaaaactcttttcaaaactgaccatcttaaacacatgatggccaagtgcccaaaagccctcttgcggagcaaatttcagaatatatatgtggatccaagctctgatagttcaggtgctggagggaagagagacctgtgtgtttagaggccaggaccacagttaggattgggttgtttcaatactgagagacagctacaataaaaggagagcaattgcctccctggggctgttcaatcttctgcatttgtgagtggttcagtcatgaggttttccaaaagatgtttttagagttgtaaaaaccatatttgcagcaaagatttacaaaggcgtatcagactatgattgttcaccaaaataggggaatggtttgatccgccagttgcaagtagaggcctttctgactcttaatattcactttggtgctactacccccattacctgagggaaactggccaggtccttgatcatggaactatagagctaccaggacatatcctgctctctaagggaatttattgctatcttgcaccttctttaaaactcacatatgcagacctgacactcaagagtggctagctacacagagtccatctaatttttgcaacttcctgtggccagtgtgtataaccccttccactatctcacagatagtcacagcgtccattccatagtctgtctcctcacatctgttagtattgacacagcacagacaccacaagccatcaggttcttcatggggcaggtgaaatacttctaccccatgggtaaatgtatttacatattaccaagagaagaagcacattatctatgatcttttggcccagttcttatttagcatttttattccagcctacttggaaacatgtttttatttgcaatatatgcctgactgaattaagcttgcttgttttaaacaaccaaatcattggaacagaaaaggatttaaaaaacaagaatgcatgatctcagcgtgattaaaaaaaaatcagtggaaataaatgatcatagaaggtgcttttcaaaacaactgctattataattctcaaagtcctactctgccaaaagaagattaaaagtcatacattacattacaaggaaatgttcatgtgggaagagggttgctgaaaatcaacaacgcttgaagttaaaaagtgtgtctttgtagatttcattgtataatgtgtatttcttaggagatggctgacttgattgatctacgctaagtggagacatttcacatttttaaaaccaaatgttcaatctgtattactctttgccgtcttgtatgtagaggctatttttaaatcattaaatttttagatctctg

SEQ ID NO: 424123 - DNA, 3268 bp, Homo sapiens
tgaattcgtgagagacttgagggaggcgctgcgactgacaagcggctctgcccgggaccttctcgctttcatctagcgctgcactcaatggaggggcgggcaccgcagtgcttaatgctgtcttaactagtgtaggaaaacggctcaacccaccgctgccgaaatgaagtataagaatcttatggcaagggccttatatgacaatgtcccagagtgtgccgaggaactggcctttcgcaagggagacatcctgaccgtcatagagcagaacacagggggactggaaggatggtggctgtgctcgttacacggtcggcaaggcattgtcccaggcaaccgggtgaagcttctgattggtcccatgcaggagactgcctccagtcacgagcagcctgcctctggactgatgcagcagacctttggccaacagaagctctatcaagtgccaaacccacaggctgctccccgagacaccatctaccaagtgccaccttcctaccaaaatcagggaatttaccaagtccccactggccacggcacccaagaacaagaggtatatcaggtgccaccatcagtgcagagaagcattgggggaaccagtgggccccacgtgggtaaaaaggtgataacccccgtgaggacaggccatggctacgtatacgagtacccatccagataccaaaaggacgtctatgatatccctccttctcataccactcaaggggtatacgacatccctccctcatcagcaaaaggccctgtgttttcagttccagtgggagagataaaacctcaaggggtgtatgacatcccgcctacaaaaggggtatatgccattccgccctctgcttgccgggatgaagcagggcttagggaaaaagactatgacttcccccctcccatgagacaagctggaaggccggacctcagaccggagggggtttatgacattcctccaacctgcaccaagccagcagggaaggaccttcatgtaaaatacaactgtgacattccaggagctgcagaaccggtggctcgaaggcaccagagcctgtccccgaatcacccacccccgcaactcggacagtcagtgggctctcagaacgacgcatatgatgtcccccgaggcgttcagtttcttgagccaccagcagaaaccagtgagaaagcaaacccccaggaaagggatggtgtttatgatgtccctctgcataacccgccagatgctaaaggctctcgggacttggtggatgggatcaaccgattgtctttctccagtacaggcagcacccggagtaacatgtccacgtcttccacctcctccaaggagtcctcactgtcagcctccccagctcaggacaaaaggctcttcctggatccagacacagctattgagagacttcagcggctccagcaggcccttgagatgggtgtctccagcctaatggcactggtcactaccgactggcggtgttacggatatatggaaagacacatcaatgaaatacgcacagcagtggacaaggtggagctgttcctgaaggagtacctccactttgtcaagggagctgttgcaaatgctgcctgcctcccggaactcatcctccacaacaagatgaagcgggagctgcaacgagtcgaagactcccaccagatcctgagtcaaaccagccatgacttaaatgagtgcagctggtccctgaatatcttggccatcaacaagccccagaacaagtgtgacgatctggaccggtttgtgatggtggcaaagacggtgcccgatgacgccaagcagctcaccacaaccatcaacaccaacgcagaggccctcttcagacccggccctggcagcttgcatctgaagaatgggccggagagcatcatgaactcaacggagtacccacacggtggctcccagggacagctgctgcatcctggtgaccacaaggcccaggcccacaacaaggcactgcccccaggcctgagcaaggagcaggcccctgactgtagcagcagtgatggttctgagaggagctggatggatgactacgattacgtccacctacagggtaaggaggagtttgagaggcaacagaaagagctattggaaaaagagaatatcatgaaacagaacaagatgcagctggaacatcatcagctgagccagttccagctgttggaacaagagattacaaagcccgtggagaatgacatctcgaagtggaagccctctcagagcctacccaccacaaacagtggcgtgagtgctcaggatcggcagttgctgtgcttctactatgaccaatgtgagacccatttcatttcccttctcaacgccattgacgcactcttcagttgtgtcagctcagcccagcccccgcgaatcttcgtggcacacagcaagtttgtcatcctcagtgcacacaaactggtgttcattggagacacgctgacacggcaggtgactgcccaggacattcgcaacaaagtcatgaactccagcaaccagctctgcgagcagctcaagaccatagtcatggcaaccaagatggccgccctccattaccccagcaccacggccctgcaggaaatggtgcaccaagtgacagacctttctagaaatgcccagctgttcaagcgctctttgctggagatggcaacgttctgagaagaaaaaaaagaggaaggggactgcgttaacggttactaaggaaaactggaaatactgtctggtttttgtaaatgttatctatttttgtagatattttatataaaaatgaaatattttaacattttatgggtcagacaactttcagaaattcagggagctggagagggaaatctttttttttccccctgagtggttcttatgtatacatagaagtatctgagacataaactgtacagaaaacttgtccacgtgcttttgtatgcccatgtattcatgtttgtttgtagatgtttgtctgatgcatttcattaaaaaaaaaaccatgaattacgaagcaccttagtaagcaccttctaatgctgcattttttttgttgttgttaaaaacataccagctggttataatattgttctccacgtccttgtgatgattctgagcctggcactcccaaatctgggaagcatagtttatttgcaagtgttcaccttccaaatcatgaggcatagcatgacttattcttgttttgaaaactcttttcaaaactgaccatcttgtatgtagaggctatttttaaatcattaaatttttagatctctg

SEQ ID NO: 424124 - DNA, 2607 bp, Homo sapiens
tgaattcgtgagagacttgagggaggcgctgcgactgacaagcggctctgcccgggaccttctcgctttcatctagcgctgcactcaatggaggggcgggcaccgcagtgcttaatgctgtcttaactagtgtaggaaaacggctcaacccaccgctgccgaaatgaagtataagaatcttatggcaagggccttatatgacaatgtcccagagtgtgccgaggaactggcctttcgcaagggagacatcctgaccgtcatagagcagaacacagggggactggaaggatggtggctgtgctcgttacacggtcggcaaggcattgtcccaggcaaccgggtgaagcttctgattggtcccatgcaggagactgcctccagtcacgagcagcctgcctctggactgatgcagcagacctttggccaacagaagctctatcaagtgccaaacccacaggctgctccccgagacaccatctaccaagtgccaccttcctaccaaaatcagggaatttaccaagtccccactggccacggcacccaagaacaagaggtatatcaggtgccaccatcagtgcagagaagcattgggggaaccagtgggccccacgtgggtaaaaaggtgataacccccgtgaggacaggccatggctacgtatacgagtacccatccagataccaaaaggacgtctatgatatccctccttctcataccactcaaggggtatacgacatccctccctcatcagcaaaaggccctgtgttttcagttccagtgggagagataaaacctcaaggggtgtatgacatcccgcctacaaaaggggtatatgccattccgccctctgcttgccgggatgaagcagggcttagggaaaaagactatgacttcccccctcccatgagacaagctggaaggccggacctcagaccggagggggtttatgacattcctccaacctgcaccaagccagcagggaaggaccttcatgtaaaatacaactgtgacattccaggagctgcagaaccggtggctcgaaggcaccagagcctgtccccgaatcacccacccccgcaactcggacagtcagtgggctctcagaacgacgcatatgatgtcccccgaggcgttcagtttcttgagccaccagcagaaaccagtgagaaagcaaacccccaggaaagggatggtgtttatgatgtccctctgcataacccgccagatgctaaaggctctcgggacttggtggatgggatcaaccgattgtctttctccagtacaggcagcacccggagtaacatgtccacgtcttccacctcctccaaggagtcctcactgtcagcctccccagctcaggacaaaaggctcttcctggatccagacacagctattgagagacttcagcggctccagcaggcccttgagatgggtgtctccagcctaatggcactggtcactaccgactggcggtgttacggatatatggaaagacacatcaatgaaatacgcacagcagtggacaaggtggagctgttcctgaaggagtacctccactttgtcaagggagctgttgcaaatgctgcctgcctcccggaactcatcctccacaacaagatgaagcgggagctgcaacgagtcgaagactcccaccagatcctgagtcaaaccagccatgacttaaatgagtgcagctggtccctgaatatcttggccatcaacaagccccagaacaagtgtgacgatctggaccggtttgtgatggtggcaaagacggtgcccgatgacgccaagcagctcaccacaaccatcaacaccaacgcagaggccctcttcagacccggccctggcagcttgcatctgaagaatgggccggagagcatcatgaactcaacggagtacccacacggtggctcccagggacagctgctgcatcctggtgaccacaaggcccaggcccacaacaaggcactgcccccaggcctgagcaaggagcaggcccctgactgtagcagcagtgatggttctgagaggagctggatggatgactacgattacgtccacctacagggtaaggaggagtttgagaggcaacagaaagagctattggaaaaagagaatatcatgaaacagaacaagatgcagctggaacatcatcagctgagccagttccagctgttggaacaagagattacaaagcccgtggagaatgacatctcgaagtggaagccctctcagagcctacccaccacaaacagtggcgtgagtgctcaggatcggcagttgctgtgcttctactatgaccaatgtgagacccatttcatttcccttctcaacgccattgacgcactcttcagttgtgtcagctcagcccagcccccgcgaatcttcgtggcacacagcaagtttgtcatcctcagtgcacacaaactggtgttcattggagacacgctgacacgggcgaggtggaactgggcccccaaaggggggaaaacccaaattttccccgggccaaaaactcaaaaaaaaggggttcccaaatttgggaaaaaccctttccccccaaaaggcccaaaaaaaaccccccaaaagggaccatttcccttggg

SEQ ID NO: 424125 - DNA, 2616 bp, Homo sapiens
tgaattcgtgagagacttgagggaggcgctgcgactgacaagcggctctgcccgggaccttctcgctttcatctagcgctgcactcaatggaggggcgggcaccgcagtgcttaatgctgtcttaactagtgtaggaaaacggctcaacccaccgctgccgaaatgaagtataagaatcttatggcaagggccttatatgacaatgtcccagagtgtgccgaggaactggcctttcgcaagggagacatcctgaccgtcatagagcagaacacagggggactggaaggatggtggctgtgctcgttacacggtcggcaaggcattgtcccaggcaaccgggtgaagcttctgattggtcccatgcaggagactgcctccagtcacgagcagcctgcctctggactgatgcagcagacctttggccaacagaagctctatcaagtgccaaacccacaggctgctccccgagacaccatctaccaagtgccaccttcctaccaaaatcagggaatttaccaagtccccactggccacggcacccaagaacaagaggtatatcaggtgccaccatcagtgcagagaagcattgggggaaccagtgggccccacgtgggtaaaaaggtgataacccccgtgaggacaggccatggctacgtatacgagtacccatccagataccaaaaggacgtctatgatatccctccttctcataccactcaaggggtatacgacatccctccctcatcagcaaaaggccctgtgttttcagttccagtgggagagataaaacctcaaggggtgtatgacatcccgcctacaaaaggggtatatgccattccgccctctgcttgccgggatgaagcagggcttagggaaaaagactatgacttcccccctcccatgagacaagctggaaggccggacctcagaccggagggggtttatgacattcctccaacctgcaccaagccagcagggaaggaccttcatgtaaaatacaactgtgacattccaggagctgcagaaccggtggctcgaaggcaccagagcctgtccccgaatcacccacccccgcaactcggacagtcagtgggctctcagaacgacgcatatgatgtcccccgaggcgttcagtttcttgagccaccagcagaaaccagtgagaaagcaaacccccaggaaagggatggtgtttatgatgtccctctgcataacccgccagatgctaaaggctctcgggacttggtggatgggatcaaccgattgtctttctccagtacaggcagcacccggagtaacatgtccacgtcttccacctcctccaaggagtcctcactgtcagcctccccagctcaggacaaaaggctcttcctggatccagacacagctattgagagacttcagcggctccagcaggcccttgagatgggtgtctccagcctaatggcactggtcactaccgactggcggtgttacggatatatggaaagacacatcaatgaaatacgcacagcagtggacaaggtggagctgttcctgaaggagtacctccactttgtcaagggagctgttgcaaatgctgcctgcctcccggaactcatcctccacaacaagatgaagcgggagctgcaacgagtcgaagactcccaccagatcctgagtcaaaccagccatgacttaaatgagtgcagctggtccctgaatatcttggccatcaacaagccccagaacaagtgtgacgatctggaccggtttgtgatggtggcaaagacggtgcccgatgacgccaagcagctcaccacaaccatcaacaccaacgcagaggccctcttcagacccggccctggcagcttgcatctgaagaatgggccggagagcatcatgaactcaacggagtacccacacggtggctcccagggacagctgctgcatcctggtgaccacaaggcccaggcccacaacaaggcactgcccccaggcctgagcaaggagcaggcccctgactgtagcagcagtgatggttctgagaggagctggatggatgactacgattacgtccacctacagggtaaggaggagtttgagaggcaacagaaagagctattggaaaaagagaatatcatgaaacagaacaagatgcagctggaacatcatcaggtaagttcaatcagagcaaaaactgcttggcattggaaagatttcccacctagcactaaggaaaggtatcacttcaagagattatgattttgattcttccagctcactggcaggaatcagctccaaagcacggaatggggtttaaaagcaaagagaaggtttatgaccttgttagttcaactgggtgtacctgggttccatctaaacggcaatttttttaaaggctaaacctgcatatctaacatatgaggactatttgggttaaggcatttggtctcaagaaacaagacccattcaagctagcctaagcaagcaggtttatagtaaagccacagtaggggaattcagtaacagaaagtgaagatagagccaggtctggggagaactagaactgtaaattatctctccttcttgtagttcctttgcttctttctatcagtctacttcactctcaccta

SEQ ID NO: 424126 - DNA, 1443 bp, Homo sapiens
tgaattcgtgagagacttgagggaggcgctgcgactgacaagcggctctgcccgggaccttctcgctttcatctagcgctgcactcaatggaggggcgggcaccgcagtgcttaatgctgtcttaactagtgtaggaaaacggctcaacccaccgctgccgaaatgaagtataagaatcttatggcaagggccttatatgacaatgtcccagagtgtgccgaggaactggcctttcgcaagggagacatcctgaccgtcatagagcagaacacagggggactggaaggatggtggctgtgctcgttacacggtcggcaaggcattgtcccaggcaaccgggtgaagcttctgattggtcccatgcaggagactgcctccagtcacgagcagcctgcctctggactgatgcagcagacctttggccaacagaagctctatcaagtgccaaacccacaggctgctccccgagacaccatctaccaagtgccaccttcctaccaaaatcagggaatttaccaagtccccactggccacggcacccaagaacaagaggtatatcaggtgccaccatcagtgcagagaagcattgggggaaccagtgggccccacgtgggtaaaaaggcacctagccagctctgcattaaggaggtgaagtggatgcccaaggaaagaagtgcccccaaggagacttgctgagaccttgaacaagtgacacaatgtgagcagaacttgtcttgacagaaaatgctttgtctctaggtgttccagagagatgggcaagtgtcctatttcttagtgagagcctctaaacaaaccagcttgtgaacctccactgaaaagatctcatctgatgagcattttaataaagtgtcctgagtttggaggcttgccgtctttctcttggataaatatcttcatctcctagacttggaaaaacacattttctcctggggtttcccattggcgtgtcttgagctgctctggtgataaccgtaataatgccaatactgatacgaacagcagaaaacagtaaccccaagaactctacagatgatcatcaaggaccactgtctcttaccatttgctgctttggtttgaaattctcactgcctcgtagatctcattttgagcactatacattcctaaagattgatttctttctatctgacttaaatttaggaatgattaaatcttcatttctcccatgatttgatcctaaaacattttgaaaggaaacagccttgagatctgtgattactaagacatacataacattcttatcacattagaaagcaagaattgactgttgcttgtcttgttcctgttgtcttgtcccctgaattcctgtttatctttgattgtatgtgggacattgtattttcagtacatttgtagaaataatgtgaagcctataaagatgttctctgcctccaaaaaaaatt

SEQ ID NO: 424127 - DNA, 1583 bp, Homo sapiens
ttcatgggtaaactccactggtcaataatcaagtcactatctctatattggaggcaaaggattgcacaattcaggctatttgtaatgttgctttggattgtagagacttagactcagaggaatcacgggacatagaatctagaacaggtctgtgtcccatcattctcttaaaagaaaacctttcaagtaatatttcttattatcttttaaaatcttgttaaaatgacaaaatatatatatatttgtaatttttaaaattttgatgcatacaaagatagacatagatagatagataatgtagaagtataaataataataagtcactagagcatgactaactagtgaagttacccagtctcctctccatcccatctctctgtctcccatccactctacccaactcttcctttcaaagagtaggatttttctgcttcgtttttttactgctttgttcttacttagggttgctggaagcacatggaaggagggaagtagtcaaaacaagacagtgttgtgaggggagagatgagaagtcatgataagtaggtgggtgggtgacccacagggctggcatcagaaggaaacatagcaaaacatgatggatatgaggcttgctgtggggagggggattggcctttgtgagtggcagccgcctgctcccttcccgcttcccttagtgctccattgagctagcagcatgcagctgagaagttgaagttctgaccacatggcctctgctgccactgctctgccccatcccaggcacctagccagctctgcattaaggaggtgaagtggatgcccaaggaaagaagtgcccccaaggagacttgctgagaccttgaacaagtgacacaatgtgagcagaacttgtcttgacagaaaatgctttgtctctaggtgttccagagagatgggcaagtgtcctatttcttagtgagagcctctaaacaaaccagcttgtgaacctccactgaaaagatctcatctgatgagcattttaataaagtgtcctgagtttggaggcttgccgtctttctcttggataaatatcttcatctcctagacttggaaaaacacattttctcctggggtttcccattggcgtgtcttgagctgctctggtgataaccgtaataatgccaatactgatacgaacagcagaaaacagtaaccccaagaactctacagatgatcatcaaggaccactgtctcttaccatttgctgctttggtttgaaattctcactgcctcgtagatctcattttgagcactatacattcctaaagattgatttctttctatctgacttaaatttaggaatgattaaatcttcatttctcccatgatttgatcctaaaacattttgaaaggaaacagccttgagatctgtgattactaagacatacataacattcttatcacattagaaagcaagaattgactgttgcttgtcttgttcctgttgtcttgtcccctgaattcctgtttatctttgattgtatgtgggacattgtattttcagtacatttgtagaaataatgtgaagcctataaagatgttctctgcctccaaaaaaaatt

SEQ ID NO: 424128 - DNA, 746 bp, Homo sapiens
tgaattcgtgagagacttgagggaggcgctgcgactgacaagcggctctgcccgggaccttctcgctttcatctagcgctgcactcaatggaggggcgggcaccgcagtgcttaatgctgtcttaactagtgtaggaaaacggctcaacccaccgctgccgaaatgaagtataagaatcttatggcaagggccttatatgacaatgtcccagagtgtgccgaggaactggcctttcgcaagggagacatcctgaccgtcatagagcagaacacagggggactggaaggatggtggctgtgctcgttacacggtcggcaaggcattgtcccaggcaaccgggtgaagcttctgattggtcccatgcaggagactgcctccagtcacgagcagcctgcctctggactgatgcagcagacctttggccaacagaagctctatcaagtgccaaacccacaggctgctccccgagacaccatctaccaagtgccaccttcctaccaaaatcagggaatttaccaagtccccactggccacggcacccaagaacaagaggtatatcaggtgccaccatcagtgcagagaagcattgggggaaccagtgggccccacgtgggtaaaaaggtgttccagagagatgggcaagtgtcctatttcttagtgagagcctctaaacaaaccagcttgtgaacctccactgaaaagatctcatctgatgagcattttaataaagtgtcctgagtttgga

SEQ ID NO: 424129 - DNA, 884 bp, Homo sapiens
tgaattcgtgagagacttgagggaggcgctgcgactgacaagcggctctgcccgggaccttctcgctttcatctagcgctgcactcaatggaggggcgggcaccgcagtgcttaatgctgtcttaactagtgtaggaaaacggctcaacccaccgctgccgaaatgaagtataagaatcttatggcaagggccttatatgacaatgtcccagagtgtgccgaggaactggcctttcgcaagggagacatcctgaccgtcatagagcagaacacagggggactggaaggatggtggctgtgctcgttacacggtcggcaaggcattgtcccaggcaaccgggtgaagcttctgattggtcccatgcaggagactgcctccagtcacgagcagcctgcctctggactgatgcagcagacctttggccaacagaagctctatcaagtgccaaacccacaggctgctccccgagacaccatctaccaagtgccaccttcctaccaaaatcagggaatttaccaagtccccactggccacggcacccaagaacaagaggtatatcaggtgccaccatcagtgcagagaagcattgggggaaccagtgggccccacgtgggtaaaaaggcacctagccagctctgcattaaggaggtgaagtggatgcccaaggaaagaagtgcccccaaggagacttgctgagaccttgaacaagtgacacaatgtgagcagaacttgtcttgacagaaaatgctttgtctctaggtgttccagagagatgggcaagtgtcctatttcttagtgagagcctctaaacaaaccagcttgtgaacctccactgaaaagatctcatctgatgagcattttaataaagtgtcctgagtttgga

SEQ ID NO: 424130 - DNA, 385 bp, Homo sapiens
gcttggaaatttacacctctgtgccttctctcccacaggtgataacccccgtgaggacaggccatggctacgtatacgagtacccatccagataccaaaaggacgtctatgatatccctccttctcataccactcaaggggtgcgtaccagaacatggtcacaagaggagaagcgcttctaagggtagcattccttcagggctgtagagaaaagggagttcacaaattatgcattaatatatgtcatatgaagctttgtttaggttgtctacccagtagccactttagccaatgctatttaaattatgttttctggatttgctttatcaggaaatcctagtatttcacccaagagagcttatgttcttctacaattttgcttcag

SEQ ID NO: 424131 - DNA, 498 bp, Homo sapiens
ggccatatttgtgcatttgtcttagggccctcttgagggcttagcacttctctctgacccaggcaagactttatgtgctgtgcattcctcctgaacatgatgtcatgcttgtgcctcaccatggaattctgcagccaggcactggggctcaagtccaaagacgggaagacttaaaaggctcaaacaagcaaatgtttgtcattatttaagattttaagacaactgaattctgaaatgtttatggtcctggcctcctttgtgggtcatcaatgacctcttcccttttaggaggtatctcatggagagggcgtcttggcctgctcccctctggggccactaactcacaccagagctgactcaaccattccaggggaagattggtaagaagtttattcaccagacatgtctagctgaaatgaatgaaatcaaactcagcagaagtcaacacttagcacggaaggcaaagtagagacaaagggtcacccggctgctgcacac

SEQ ID NO: 424132 - DNA, 491 bp, Homo sapiens
cagcaaataggactgagcacatgggaccacaggttcccatgagccaactcaataaatagcatttcgctttctacttgctttgcaggtatatgccattccgccctctgcttgccgggatgaagcagggcttagggaaaaagactatgacttcccccctcccatgagacaagctggaaggccggacctcagaccggagggggtttatgacattcctccaacctgcaccaagccagcagggaaggaccttcatgtaaaatacaactgtgacattccaggagctgcagaaccggtggctcgaaggcaccagagcctgtccccgaatcacccacccccgcaactcggacagtcagtgggctctcagaacgacgcatatgatgtcccccgaggcgttcagtttcttgagccaccagcagaaaccagtgagaaagcaaacccccaggaaagggatggtgtttatgatgtccctctgcataacccgccagatgctaaag

SEQ ID NO: 424133 - DNA, 607 bp, Homo sapiens
acaagccatcaggttcttcatggggcaggtgaaatacttctaccccatgggtaaatgtatttacatattaccaagagaagaagcacattatctatgatcttttggcccagttcttatttagcatttttattccagcctacttggaaacatgtttttatttgcaatatatgcctgactgaattaagcttgcttgttttaaacaaccaaatcattggaacagaaaaggatttaaaaaacaagaatgcatgatctcagcgtgattaaaaaaaaatcagtggaaataaatgatcatagaaggtgcttttcaaaacaactgctattataattctcaaagtcctactctgccaaaagaagattaaaagtcatacattacattacaaggaaatgttcatgtgggaagagggttgctgaaaatcaacaacgcttgaagttaaaaagtgtgtctttgtagatttcattgtataatgtgtatttcttaggagatggctgacttgattgatctacgctaagtggagacatttcacatttttaaaaccaaatgttcaatctgtattactctttgccgtcttgtatgtagaggctatttttaaatcattaaatttttaga

SEQ ID NO: 424134 - DNA, 257 bp, Homo sapiens
actgggagattccaaggagaggaatgacaccggctaatacttgaacaagatcactacatcttgtcttctctgttgctcctggactgcaggggacaagtgtgaaagcagggagaccagctggggagctaccacaacagacggaagaaccagatccaatgatatgtgtaagaagaataatttcagtgcaattgaaagaacagatgcacaattgactctgtcaagtgatggaatgacccgtctcaaataaagccaatgag

SEQ ID NO: 424135 - DNA, 391 bp, Homo sapiens
aaattttcctttttaatttcttaaattaaatgtgtcttcccaaggatgcccagaaataggaaagttacataaatgctaattaaaaacatgcctgacaagctgtgcccactagtcccgttgatcattctttaattcacatttcacagcaatttctaagaacatcaccacgtccttcattaactacatatcaattaaaatacctctgagaggcaggtacaataatgcactatatattatccttgaaaactgaaaggcccactttgctaactgctacacacagcacatagagacttagagagagaaggaaaaaaaataaagcctgcccttaaggatttcgcagacgatgaagaaagacattttttccaatgctgtacaaaaagaaaagaaagaa

SEQ ID NO: 424136 - DNA, 349 bp, Homo sapiens
ataaagaaataaaagtaatttacctataattcccatccttagatcctaattgccttgctgtgattttgaaaaactgacctacactttttgtgcattatatgtatgtcaatatagtttaagtcatattatataaaaatttcgcatttggcttttaacaaatataagacaaacacaaggtttttgttaacataattttaaatacctgcctgatattttacttaaataacgtgtttagatttctaaggctgtgctattataaatcttgttactctgaacatctatttttacacaagcttcttccacattccgggaacattttctagaaggcggaaataaaattgtgttatat

SEQ ID NO: 424137 - DNA, 755 bp, Homo sapiens
tacccagttcgacggagactctccttggctcaagaccaaggagagtggatgttgatgaacattcctttaaataaaagtgcttaggttgtagttatggctttgtctagaatggtgatgtcaactgtgagtgtaggtctgtgatatagaaagaattcaactttccagatctagaaagatgctaccttgcatagatttgctccttaaacataaattgcaaaaataaaaatatcacagagaacacctgtactttgcttactgaaagatttgctcactaaagaaggaaagttgccatttacctgtttaacaaatctgcacatcctgcacatgttccccagaatgtaaaataaaaaaagtttaaataaaaaaggaaagttgtcctttattgttaacatgatccattacatgaatataacataaataattatcttttttaataaatttctattgtattagatcagagagcagtcttttggaaagtattatagatacattactgtagaatttacaaactcattgtaatacaatgtatttaattttcagaatatgattatctgaatggtattgtcatgattattgttcccattttcagatgaacactgacttcaagtccaatgatatattcactatgccattttattgacttttccttgtaaagcaatgcacactaatttagtaagtatttggtttctgtgatgtgttcagttgcgtgctgggtgacatgtgaaataaactcatccttgaggaatttacagctc

SEQ ID NO: 424138 - DNA, 1025 bp, Homo sapiens
aatggatggaatatgctaaaagatttacttcttatcaaaaaatatttatgggagtgttgctgtttatccatttgtgttaagtggtgaattattcagcaaccttcaggtacttgtctatatatataattattaggtcattcagtcatttcttggttgacaaatgttgaaaagagaattggatgcataaaggcatccagaataaatttttcttaagtaatttcagaagagatgctttcataatgcattaaaaaattcttattttacatttttacagtcatttacttatgtaataaaatgtttaattatattgaatattatggtaaacagatatctttatcacaaaataatgaagttaatggaaccaccatttcatgtttcagatgtacagtgggagaaatcacagatgccctgaaaaaggtatttggtgaacataaagcgaatgatcgaatggtgagtggagcatatcgccaggaatttggagaaagtaaagagataacatctgctatcaagaggtaatatgtaaggtttcttaggccagaatttcatcttttctgttagcacaatccccttgaatctactgggagcttaatttccttacatacaactgagaaaatttttgaattttataataataaatagtaaattaaatattaattatatagactatataacatataatagagtatataatttattcattacatataatatataattagaaatatatcatacatgatacatattatatatctatactatcattttaataggtacatgataatatttaataataaatatcaaatattgaaactaatattagttttcatataattaatactattttgaactttcaccatagtccccttcaggagtttctcatgtcaaacagatgtttaactaacaatgatattgcttcatatcctccaggtatttatatttcaatctgcttactatggtagagtttcatattttttgaagttgtttacatttttcattgcttgaataattataaaatcttaattttc

SEQ ID NO: 424139 - DNA, 485 bp, Homo sapiens
aaaaaaccccccccctgggcacaccgagcccccaaaccttaaggaataaaaaaaaaaaaaaaaaaaatgtaaaataaaaaaagtttaaataaaaaaggaaagttgtcctttattgttaacatgatccattacatgaatataacataaataattatcttttttaataaatttctattgtattagatcagagagcagtcttttggaaagtattatagatacattactgtagaatttacaaactcattgtaatacaatgtatttaattttcagaatatgattatctgaatggtattgtcatgattattgttcccattttcagatgaacactgacttcaagtccaatgatatattcactatgccattttattgacttttccttgtaaagcaatgcacactaatttagtaagtatttggtttctgtgatgtgttcagttgcgtgctgggtgacatgtgaaataaactcatccttgaggaatttacagctc

SEQ ID NO: 424140 - DNA, 2949 bp, Homo sapiens
ggaatgcgcccatgagagcgctattagattggctggagggagggcggtgtcggcctacgcccccagagtcgtccggctgacgctggcggtggcgcggtttgtgtgggcttggtgagggcggggaggcctggctgtgtggatgtctgacaggtgaggcgggggacgcagaagtgcagccgccctctcccacagcggagtccaaaacaggcctaccagtcagttcttatttctattgggtgtttccatgctccaccatgttaagagctaagaatcagctttttttactttcacctcattacctgaggcaggtaaaagaatcatcaggctccaggctcatacagcaacgacttctacaccagcaacagccccttcacccagaatgggctgccctggctaaaaagcagctgaaaggcaaaaacccagaagacctaatatggcacaccccggaagggatctctataaaacccttgtattccaagagagatactatggacttacctgaagaacttccaggagtgaagccattcacacgtggaccatatcctaccatgtatacctttaggccctggaccatccgccagtatgctggttttagtactgtggaagaaagcaataagttctataaggacaacattaaggctggtcagcagggattatcagttgcctttgatctggcgacacatcgtggctatgattcagacaaccctcgagttcgtggtgatgttggaatggctggagttgctattgacactgtggaagataccaaaattctttttgatggaattcctttagaaaaaatgtcagtttccatgactatgaatggagcagttattccagttcttgcaaattttatagtaactggagaagaacaaggtgtacctaaagagaaacttactggtaccatccaaaatgatatactaaaggaatttatggttcgaaatacatacatttttcctccagaaccatccatgaaaattattgctgacatatttgaatatacagcaaagcacatgccaaaatttaattcaatttcaattagtggataccatatgcaggaagcaggggctgatgccattctggagctggcctatactttagcagatggattggagtactctagaactggactccaggctggcctgacaattgatgaatttgcaccaaggttgtctttcttctggggaattggaatgaatttctatatggaaatagcaaagatgagagctggtagaagactctgggctcacttaatagagaaaatgtttcagcctaaaaactcaaaatctcttcttctaagagcacactgtcagacatctggatggtcacttactgagcaggatccctacaataatattgtccgtactgcaatagaagcaatggcagcagtatttggagggactcagtctttgcacacaaattcttttgatgaagctttgggtttgccaactgtgaaaagtgctcgaattgccaggaacacacaaatcatcattcaagaagaatctgggattcccaaagtggctgatccttggggaggttcttacatgatggaatgtctcacaaatgatgtttatgatgctgctttaaagctcattaatgaaattgaagaaatgggtggaatggccaaagctgtagctgagggaatacctaaacttcgaattgaagaatgtgctgcccgaagacaagctagaatagattctggttctgaagtaattgttggagtaaataagtaccagttggaaaaagaagacgctgtagaagttctggcaattgataatacttcagtgcgaaacaggcagattgaaaaacttaagaagatcaaatccagcagggatcaagctttggctgaacgttgtcttgctgcactaaccgaatgtgctgctagcggagatggaaatatcctggctcttgcagtggatgcatctcgggcaagatgtacagtgggagaaatcacagatgccctgaaaaaggtatttggtgaacataaagcgaatgatcgaatggtgagtggagcatatcgccaggaatttggagaaagtaaagagataacatctgctatcaagagggttcataaattcatggaacgtgaaggtcgcagacctcgtcttcttgtagcaaaaatgggacaagatggccatgacagaggagcaaaagttattgctacaggatttgctgatcttggttttgatgtggacataggccctcttttccagactcctcgtgaagtggcccagcaggctgtggatgcggatgtgcatgctgtgggcgtaagcaccctcgctgctggtcataaaaccctagttcctgaactcatcaaagaacttaactcccttggacggccagatattcttgtcatgtgtggaggggtgataccacctcaggattatgaatttctgtttgaagttggtgtttccaatgtatttggtcctgggactcgaattccaaaggctgccgttcaggtgcttgatgatattgagaagtgtttggaaaagaagcagcaatctgtataatatcctctttttgttttagcttttgtctaaaatattattttagttatgatcaaagaagagagtaaagctatgtcttcaatttaatttcaatacctgatttgtactttccttgaaagctttactttaaaataccttacttataggcctggtgtcatgctataagtatgtacatacagtttcacttcaaaaataaaaaaaaaatccctaaaaactctctatactctctataacaatactttatcaagaactctggacaatggtattatttttaaaaatcatggtgatgtatttattagaatgtttcttataaatctgtttactttttatattaagaattaaactgtacctaaaaaaactctgactattcccatttgtcagtttagcattacattgtcttgagcaccagaaaataaaatccatatattaataaaaacctatcttg

SEQ ID NO: 424141 - DNA, 3881 bp, Homo sapiens
ggaatgcgcccatgagagcgctattagattggctggagggagggcggtgtcggcctacgcccccagagtcgtccggctgacgctggcggtggcgcggtttgtgtgggcttggtgagggcggggaggcctggctgtgtggatgtctgacaggtgaggcgggggacgcagaagtgcagccgccctctcccacagcggagtccaaaacaggcctaccagtcagttcttatttctattgggtgtttccatgctccaccatgttaagagctaagaatcagctttttttactttcacctcattacctgaggcaggtaaaagaatcatcaggctccaggctcatacagcaacgacttctacaccagcaacagccccttcacccagaatgggctgccctggctaaaaagcagctgaaaggcaaaaacccagaagacctaatatggcacaccccggaagggatctctataaaacccttgtattccaagagagatactatggacttacctgaagaacttccaggagtgaagccattcacacgtggaccatatcctaccatgtatacctttaggccctggaccatccgccagtatgctggttttagtactgtggaagaaagcaataagttctataaggacaacattaaggctggtcagcagggattatcagttgcctttgatctggcgacacatcgtggctatgattcagacaaccctcgagttcgtggtgatgttggaatggctggagttgctattgacactgtggaagataccaaaattctttttgatggaattcctttagaaaaaatgtcagtttccatgactatgaatggagcagttattccagttcttgcaaattttatagtaactggagaagaacaaggtgtacctaaagagaaacttactggtaccatccaaaatgatatactaaaggaatttatggttcgaaatacatacatttttcctccagaaccatccatgaaaattattgctgacatatttgaatatacagcaaagcacatgccaaaatttaattcaatttcaattagtggataccatatgcaggaagcaggggctgatgccattctggagctggcctatactttagcagatggattggagtactctagaactggactccaggctggcctgacaattgatgaatttgcaccaaggttgtctttcttctggggaattggaatgaatttctatatggaaatagcaaagatgagagctggtagaagactctgggctcacttaatagagaaaatgtttcagcctaaaaactcaaaatctcttcttctaagagcacactgtcagacatctggatggtcacttactgagcaggatccctacaataatattgtccgtactgcaatagaagcaatggcagcagtatttggagggactcagtctttgcacacaaattcttttgatgaagctttgggtttgccaactgtgaaaagtgctcgaattgccaggaacacacaaatcatcattcaagaagaatctgggattcccaaagtggctgatccttggggaggttcttacatgatggaatgtctcacaaatgatgtttatgatgctgctttaaagctcattaatgaaattgaagaaatgggtggaatggccaaagctgtagctgagggaatacctaaacttcgaattgaagaatgtgctgcccgaagacaagctagaatagattctggttctgaagtaattgttggagtaaataagtaccagttggaaaaagaagacgctgtagaagttctggcaattgataatacttcagtgcgaaacaggcagattgaaaaacttaagaagatcaaatccagcagggatcaagctttggctgaacgttgtcttgctgcactaaccgaatgtgctgctagcggagatggaaatatcctggctcttgcagtggatgcatctcgggcaagatgtacagtgggagaaatcacagatgccctgaaaaaggtatttggtgaacataaagcgaatgatcgaatggtgagtggagcatatcgccaggaatttggagaaagtaaagagataacatctgctatcaagagggttcataaattcatggaacgtgaaggtcgcagacctcgtcttcttgtagcaaaaatgggacaagatggccatgacagaggagcaaaagttattgctacaggatttgctgatcttggttttgatgtggacataggccctcttttccagactcctcgtgaagtggcccagcaggctgtggatgcggatgtgcatgctgtgggcgtaagcaccctcgctgctggtcataaaaccctagttcctgaactcatcaaagaacttaactcccttggacggccagatattcttgtcatgtgtggaggggtgataccacctcaggattatgaatttctgtttgaagttggtgtttccaatgtatttggtcctgggactcgaattccaaaggctgccgttcaggtgcttgatgatattgagaagtgtttggaaaagaagcagcaatctgtataatatcctctttttgttttagcttttgtctaaaatattattttagttatgatcaaagaagagagtaaagctatgtcttcaatttaatttcaatacctgatttgtactttccttgaaagctttactttaaaataccttacttataggcctggtgtcatgctataagtatgtacatacagtttcacttcaaaaataaaaaaaaaatccctaaaaactctctatactctctataacaatactttatcaagaactctggacaatggtattatttttaaaaatcatggtgatgtatttattagaatgtttcttataaatctgtttactttttatattaagaattaaactgtacctaaaaaaactctgactattcccatttgtcagtttagcattacattgtcttgagcaccagaaaataaaatccatatattaataaaaacctatcttgaaaaactagtggagtgtatttacgtggcaaaagagattttgggaggagtcctcagccaaattctaccagaatcaccttaataaaagaagtattaaaatcaagcacagcaggttggaatatggggaatttgacagtatatttcttcaagtctgagtttactttcttcctgatcatgaccatctgaccttgttatttctgggcttggctcaagaccaaggagagtggatgttgatgaacattcctttaaataaaagtgcttaggttgtagttatggctttgtctagaatggtgatgtcaactgtgagtgtaggtctgtgatatagaaagaattcaactttccagatctagaaagatgctaccttgcatagatttgctccttaaacataaattgcaaaaataaaaatatcacagagaacacctgtactttgcttactgaaagatttgctcactaaagaaggaaagttgccatttacctgtttaacaaatctgcacatcctgcacatgttccccagaatgtaaaataaaaaaagtttaaataaaaaaggaaagttgtcctttattgttaacatgatccattacatgaatataacataaataattatcttttttaataaatttctattgtattagatcagagagcagtcttttggaaagtattatagatacattactgtagaatttacaaactcattgtaatacaatgtatttaattttcagaatatgattatctgaatggtattgtcatgattattgttcccattttcagatgaacactgacttcaagtccaatgatatattcactatgccattttattgacttttccttgtaaagcaatgcacactaatttagtaagtatttggtttctgtgatgtgttcagttgcgtgctgggtgacatgtgaaataaactcatccttgaggaatttacagctc

SEQ ID NO: 424142 - DNA, 3827 bp, Homo sapiens
ggaatgcgcccatgagagcgctattagattggctggagggagggcggtgtcggcctacgcccccagagtcgtccggctgacgctggcggtggcgcggtttgtgtgggcttggtgagggcggggaggcctggctgtgtggatgtctgacaggtgaggcgggggacgcagaagtgcagccgccctctcccacagcggagtccaaaacaggcctaccagtcagttcttatttctattgggtgtttccatgctccaccatgttaagagctaagaatcagctttttttactttcacctcattacctgaggcaggtaaaagaatcatcaggctccaggctcatacagcaacgacttctacaccagcaacagccccttcacccagaatgggctgccctggctaaaaagcagctgaaaggcaaaaacccagaagacctaatatggcacaccccggaagggatctctataaaacccttgtattccaagagagatactatggacttacctgaagaacttccaggagtgaagccattcacacgtggaccatatcctaccatgtatacctttaggccctggaccatccgccagtatgctggttttagtactgtggaagaaagcaataagttctataaggacaacattaaggctggtcagcagggattatcagttgcctttgatctggcgacacatcgtggctatgattcagacaaccctcgagttcgtggtgatgttggaatggctggagttgctattgacactgtggaagataccaaaattctttttgatggaattcctttagaaaaaatgtcagtttccatgactatgaatggagcagttattccagttcttgcaaattttatagtaactggagaagaacaaggtgtacctaaagagaaacttactggtaccatccaaaatgatatactaaaggaatttatggttcgaaatacatacatttttcctccagaaccatccatgaaaattattgctgacatatttgaatatacagcaaagcacatgccaaaatttaattcaatttcaattagtggataccatatgcaggaagcaggggctgatgccattctggagctggcctatactttagcagatggattggagtactctagaactggactccaggctggcctgacaattgatgaatttgcaccaaggttgtctttcttctggggaattggaatgaatttctatatggaaatagcaaagatgagagctggtagaagactctgggctcacttaatagagaaaatgtttcagcctaaaaactcaaaatctcttcttctaagagcacactgtcagacatctggatggtcacttactgagcaggatccctacaataatattgtccgtactgcaatagaagcaatggcagcagtatttggagggactcagtctttgcacacaaattcttttgatgaagctttgggtttgccaactgggattcccaaagtggctgatccttggggaggttcttacatgatggaatgtctcacaaatgatgtttatgatgctgctttaaagctcattaatgaaattgaagaaatgggtggaatggccaaagctgtagctgagggaatacctaaacttcgaattgaagaatgtgctgcccgaagacaagctagaatagattctggttctgaagtaattgttggagtaaataagtaccagttggaaaaagaagacgctgtagaagttctggcaattgataatacttcagtgcgaaacaggcagattgaaaaacttaagaagatcaaatccagcagggatcaagctttggctgaacgttgtcttgctgcactaaccgaatgtgctgctagcggagatggaaatatcctggctcttgcagtggatgcatctcgggcaagatgtacagtgggagaaatcacagatgccctgaaaaaggtatttggtgaacataaagcgaatgatcgaatggtgagtggagcatatcgccaggaatttggagaaagtaaagagataacatctgctatcaagagggttcataaattcatggaacgtgaaggtcgcagacctcgtcttcttgtagcaaaaatgggacaagatggccatgacagaggagcaaaagttattgctacaggatttgctgatcttggttttgatgtggacataggccctcttttccagactcctcgtgaagtggcccagcaggctgtggatgcggatgtgcatgctgtgggcgtaagcaccctcgctgctggtcataaaaccctagttcctgaactcatcaaagaacttaactcccttggacggccagatattcttgtcatgtgtggaggggtgataccacctcaggattatgaatttctgtttgaagttggtgtttccaatgtatttggtcctgggactcgaattccaaaggctgccgttcaggtgcttgatgatattgagaagtgtttggaaaagaagcagcaatctgtataatatcctctttttgttttagcttttgtctaaaatattattttagttatgatcaaagaagagagtaaagctatgtcttcaatttaatttcaatacctgatttgtactttccttgaaagctttactttaaaataccttacttataggcctggtgtcatgctataagtatgtacatacagtttcacttcaaaaataaaaaaaaaatccctaaaaactctctatactctctataacaatactttatcaagaactctggacaatggtattatttttaaaaatcatggtgatgtatttattagaatgtttcttataaatctgtttactttttatattaagaattaaactgtacctaaaaaaactctgactattcccatttgtcagtttagcattacattgtcttgagcaccagaaaataaaatccatatattaataaaaacctatcttgaaaaactagtggagtgtatttacgtggcaaaagagattttgggaggagtcctcagccaaattctaccagaatcaccttaataaaagaagtattaaaatcaagcacagcaggttggaatatggggaatttgacagtatatttcttcaagtctgagtttactttcttcctgatcatgaccatctgaccttgttatttctgggcttggctcaagaccaaggagagtggatgttgatgaacattcctttaaataaaagtgcttaggttgtagttatggctttgtctagaatggtgatgtcaactgtgagtgtaggtctgtgatatagaaagaattcaactttccagatctagaaagatgctaccttgcatagatttgctccttaaacataaattgcaaaaataaaaatatcacagagaacacctgtactttgcttactgaaagatttgctcactaaagaaggaaagttgccatttacctgtttaacaaatctgcacatcctgcacatgttccccagaatgtaaaataaaaaaagtttaaataaaaaaggaaagttgtcctttattgttaacatgatccattacatgaatataacataaataattatcttttttaataaatttctattgtattagatcagagagcagtcttttggaaagtattatagatacattactgtagaatttacaaactcattgtaatacaatgtatttaattttcagaatatgattatctgaatggtattgtcatgattattgttcccattttcagatgaacactgacttcaagtccaatgatatattcactatgccattttattgacttttccttgtaaagcaatgcacactaatttagtaagtatttggtttctgtgatgtgttcagttgcgtgctgggtgacatgtgaaataaactcatccttgaggaatttacagctc

SEQ ID NO: 424143 - DNA, 3827 bp, Homo sapiens
ggaatgcgcccatgagagcgctattagattggctggagggagggcggtgtcggcctacgcccccagagtcgtccggctgacgctggcggtggcgcggtttgtgtgggcttggtgagggcggggaggcctggctgtgtggatgtctgacaggtgaggcgggggacgcagaagtgcagccgccctctcccacagcggagtccaaaacaggcctaccagtcagttcttatttctattgggtgtttccatgctccaccatgttaagagctaagaatcagctttttttactttcacctcattacctgaggcaggtaaaagaatcatcaggctccaggctcatacagcaacgacttctacaccagcaacagccccttcacccagaatgggctgccctggctaaaaagcagctgaaaggcaaaaacccagaagacctaatatggcacaccccggaagggatctctataaaacccttgtattccaagagagatactatggacttacctgaagaacttccaggagtgaagccattcacacgtggaccatatcctaccatgtatacctttaggccctggaccatccgccagtatgctggttttagtactgtggaagaaagcaataagttctataaggacaacattaaggctggtcagcagggattatcagttgcctttgatctggcgacacatcgtggctatgattcagacaaccctcgagttcgtggtgatgttggaatggctggagttgctattgacactgtggaagataccaaaattctttttgatggaattcctttagaaaaaatgtcagtttccatgactatgaatggagcagttattccagttcttgcaaattttatagtaactggagaagaacaaggtgtacctaaagagaaacttactggtaccatccaaaatgatatactaaaggaatttatggttcgaaatacatacatttttcctccagaaccatccatgaaaattattgctgacatatttgaatatacagcaaagcacatgccaaaatttaattcaatttcaattagtggataccatatgcaggaagcaggggctgatgccattctggagctggcctatactttagcagatggattggagtactctagaactggactccaggctggcctgacaattgatgaatttgcaccaaggttgtctttcttctggggaattggaatgaatttctatatggaaatagcaaagatgagagctggtagaagactctgggctcacttaatagagaaaatgtttcagcctaaaaactcaaaatctcttcttctaagagcacactgtcagacatctggatggtcacttactgagcaggatccctacaataatattgtccgtactgcaatagaagcaatggcagcagtatttggagggactcagtctttgcacacaaattcttttgatgaagctttgggtttgccaactgtgaaaagtgctcgaattgccaggaacacacaaatcatcattcaagaagaatctgggattcccaaagtggctgatccttggggaggttcttacatgatggaatgtctcacaaatgatgtttatgatgctgctttaaagctcattaatgaaattgaagaaatgggtggaatggccaaagctgtagctgagggaatacctaaacttcgaattgaagaatgtgctgcccgaagacaagctagaatagattctggttctgaagtaattgttggagtaaataagtaccagttggaaaaagaagacgctgtagaagttctggcaattgataatacttcagtgcgaaacaggcagattgaaaaacttaagaagatcaaatccagcagggatcaagctttggctgaacgttgtcttgctgcactaaccgaatgtgctgctagcggagatggaaatatcctggctcttgcagtggatgcatctcgggcaagatgtacagtgggagaaatcacagatgccctgaaaaaggaatttggagaaagtaaagagataacatctgctatcaagagggttcataaattcatggaacgtgaaggtcgcagacctcgtcttcttgtagcaaaaatgggacaagatggccatgacagaggagcaaaagttattgctacaggatttgctgatcttggttttgatgtggacataggccctcttttccagactcctcgtgaagtggcccagcaggctgtggatgcggatgtgcatgctgtgggcgtaagcaccctcgctgctggtcataaaaccctagttcctgaactcatcaaagaacttaactcccttggacggccagatattcttgtcatgtgtggaggggtgataccacctcaggattatgaatttctgtttgaagttggtgtttccaatgtatttggtcctgggactcgaattccaaaggctgccgttcaggtgcttgatgatattgagaagtgtttggaaaagaagcagcaatctgtataatatcctctttttgttttagcttttgtctaaaatattattttagttatgatcaaagaagagagtaaagctatgtcttcaatttaatttcaatacctgatttgtactttccttgaaagctttactttaaaataccttacttataggcctggtgtcatgctataagtatgtacatacagtttcacttcaaaaataaaaaaaaaatccctaaaaactctctatactctctataacaatactttatcaagaactctggacaatggtattatttttaaaaatcatggtgatgtatttattagaatgtttcttataaatctgtttactttttatattaagaattaaactgtacctaaaaaaactctgactattcccatttgtcagtttagcattacattgtcttgagcaccagaaaataaaatccatatattaataaaaacctatcttgaaaaactagtggagtgtatttacgtggcaaaagagattttgggaggagtcctcagccaaattctaccagaatcaccttaataaaagaagtattaaaatcaagcacagcaggttggaatatggggaatttgacagtatatttcttcaagtctgagtttactttcttcctgatcatgaccatctgaccttgttatttctgggcttggctcaagaccaaggagagtggatgttgatgaacattcctttaaataaaagtgcttaggttgtagttatggctttgtctagaatggtgatgtcaactgtgagtgtaggtctgtgatatagaaagaattcaactttccagatctagaaagatgctaccttgcatagatttgctccttaaacataaattgcaaaaataaaaatatcacagagaacacctgtactttgcttactgaaagatttgctcactaaagaaggaaagttgccatttacctgtttaacaaatctgcacatcctgcacatgttccccagaatgtaaaataaaaaaagtttaaataaaaaaggaaagttgtcctttattgttaacatgatccattacatgaatataacataaataattatcttttttaataaatttctattgtattagatcagagagcagtcttttggaaagtattatagatacattactgtagaatttacaaactcattgtaatacaatgtatttaattttcagaatatgattatctgaatggtattgtcatgattattgttcccattttcagatgaacactgacttcaagtccaatgatatattcactatgccattttattgacttttccttgtaaagcaatgcacactaatttagtaagtatttggtttctgtgatgtgttcagttgcgtgctgggtgacatgtgaaataaactcatccttgaggaatttacagctc

SEQ ID NO: 424144 - DNA, 3828 bp, Homo sapiens
ggaatgcgcccatgagagcgctattagattggctggagggagggcggtgtcggcctacgcccccagagtcgtccggctgacgctggcggtggcgcggtttgtgtgggcttggtgagggcggggaggcctggctgtgtggatgtctgacaggtgaggcgggggacgcagaagtgcagccgccctctcccacagcggagtccaaaacaggcctaccagtcagttcttatttctattgggtgtttccatgctccaccatgttaagagctaagaatcagctttttttactttcacctcattacctgaggcaggtaaaagaatcatcaggctccaggctcatacagcaacgacttctacaccagcaacagccccttcacccagaatgggctgccctggctaaaaagcagctgaaaggcaaaaacccagaagacctaatatggcacaccccggaagggatctctatgagtgaagccattcacacgtggaccatatcctaccatgtatacctttaggccctggaccatccgccagtatgctggttttagtactgtggaagaaagcaataagttctataaggacaacattaaggctggtcagcagggattatcagttgcctttgatctggcgacacatcgtggctatgattcagacaaccctcgagttcgtggtgatgttggaatggctggagttgctattgacactgtggaagataccaaaattctttttgatggaattcctttagaaaaaatgtcagtttccatgactatgaatggagcagttattccagttcttgcaaattttatagtaactggagaagaacaaggtgtacctaaagagaaacttactggtaccatccaaaatgatatactaaaggaatttatggttcgaaatacatacatttttcctccagaaccatccatgaaaattattgctgacatatttgaatatacagcaaagcacatgccaaaatttaattcaatttcaattagtggataccatatgcaggaagcaggggctgatgccattctggagctggcctatactttagcagatggattggagtactctagaactggactccaggctggcctgacaattgatgaatttgcaccaaggttgtctttcttctggggaattggaatgaatttctatatggaaatagcaaagatgagagctggtagaagactctgggctcacttaatagagaaaatgtttcagcctaaaaactcaaaatctcttcttctaagagcacactgtcagacatctggatggtcacttactgagcaggatccctacaataatattgtccgtactgcaatagaagcaatggcagcagtatttggagggactcagtctttgcacacaaattcttttgatgaagctttgggtttgccaactgtgaaaagtgctcgaattgccaggaacacacaaatcatcattcaagaagaatctgggattcccaaagtggctgatccttggggaggttcttacatgatggaatgtctcacaaatgatgtttatgatgctgctttaaagctcattaatgaaattgaagaaatgggtggaatggccaaagctgtagctgagggaatacctaaacttcgaattgaagaatgtgctgcccgaagacaagctagaatagattctggttctgaagtaattgttggagtaaataagtaccagttggaaaaagaagacgctgtagaagttctggcaattgataatacttcagtgcgaaacaggcagattgaaaaacttaagaagatcaaatccagcagggatcaagctttggctgaacgttgtcttgctgcactaaccgaatgtgctgctagcggagatggaaatatcctggctcttgcagtggatgcatctcgggcaagatgtacagtgggagaaatcacagatgccctgaaaaaggtatttggtgaacataaagcgaatgatcgaatggtgagtggagcatatcgccaggaatttggagaaagtaaagagataacatctgctatcaagagggttcataaattcatggaacgtgaaggtcgcagacctcgtcttcttgtagcaaaaatgggacaagatggccatgacagaggagcaaaagttattgctacaggatttgctgatcttggttttgatgtggacataggccctcttttccagactcctcgtgaagtggcccagcaggctgtggatgcggatgtgcatgctgtgggcgtaagcaccctcgctgctggtcataaaaccctagttcctgaactcatcaaagaacttaactcccttggacggccagatattcttgtcatgtgtggaggggtgataccacctcaggattatgaatttctgtttgaagttggtgtttccaatgtatttggtcctgggactcgaattccaaaggctgccgttcaggtgcttgatgatattgagaagtgtttggaaaagaagcagcaatctgtataatatcctctttttgttttagcttttgtctaaaatattattttagttatgatcaaagaagagagtaaagctatgtcttcaatttaatttcaatacctgatttgtactttccttgaaagctttactttaaaataccttacttataggcctggtgtcatgctataagtatgtacatacagtttcacttcaaaaataaaaaaaaaatccctaaaaactctctatactctctataacaatactttatcaagaactctggacaatggtattatttttaaaaatcatggtgatgtatttattagaatgtttcttataaatctgtttactttttatattaagaattaaactgtacctaaaaaaactctgactattcccatttgtcagtttagcattacattgtcttgagcaccagaaaataaaatccatatattaataaaaacctatcttgaaaaactagtggagtgtatttacgtggcaaaagagattttgggaggagtcctcagccaaattctaccagaatcaccttaataaaagaagtattaaaatcaagcacagcaggttggaatatggggaatttgacagtatatttcttcaagtctgagtttactttcttcctgatcatgaccatctgaccttgttatttctgggcttggctcaagaccaaggagagtggatgttgatgaacattcctttaaataaaagtgcttaggttgtagttatggctttgtctagaatggtgatgtcaactgtgagtgtaggtctgtgatatagaaagaattcaactttccagatctagaaagatgctaccttgcatagatttgctccttaaacataaattgcaaaaataaaaatatcacagagaacacctgtactttgcttactgaaagatttgctcactaaagaaggaaagttgccatttacctgtttaacaaatctgcacatcctgcacatgttccccagaatgtaaaataaaaaaagtttaaataaaaaaggaaagttgtcctttattgttaacatgatccattacatgaatataacataaataattatcttttttaataaatttctattgtattagatcagagagcagtcttttggaaagtattatagatacattactgtagaatttacaaactcattgtaatacaatgtatttaattttcagaatatgattatctgaatggtattgtcatgattattgttcccattttcagatgaacactgacttcaagtccaatgatatattcactatgccattttattgacttttccttgtaaagcaatgcacactaatttagtaagtatttggtttctgtgatgtgttcagttgcgtgctgggtgacatgtgaaataaactcatccttgaggaatttacagctc

SEQ ID NO: 424145 - DNA, 3816 bp, Homo sapiens
ggaatgcgcccatgagagcgctattagattggctggagggagggcggtgtcggcctacgcccccagagtcgtccggctgacgctggcggtggcgcggtttgtgtgggcttggtgagggcggggaggcctggctgtgtggatgtctgacaggtcagttcttatttctattgggtgtttccatgctccaccatgttaagagctaagaatcagctttttttactttcacctcattacctgaggcaggtaaaagaatcatcaggctccaggctcatacagcaacgacttctacaccagcaacagccccttcacccagaatgggctgccctggctaaaaagcagctgaaaggcaaaaacccagaagacctaatatggcacaccccggaagggatctctataaaacccttgtattccaagagagatactatggacttacctgaagaacttccaggagtgaagccattcacacgtggaccatatcctaccatgtatacctttaggccctggaccatccgccagtatgctggttttagtactgtggaagaaagcaataagttctataaggacaacattaaggctggtcagcagggattatcagttgcctttgatctggcgacacatcgtggctatgattcagacaaccctcgagttcgtggtgatgttggaatggctggagttgctattgacactgtggaagataccaaaattctttttgatggaattcctttagaaaaaatgtcagtttccatgactatgaatggagcagttattccagttcttgcaaattttatagtaactggagaagaacaaggtgtacctaaagagaaacttactggtaccatccaaaatgatatactaaaggaatttatggttcgaaatacatacatttttcctccagaaccatccatgaaaattattgctgacatatttgaatatacagcaaagcacatgccaaaatttaattcaatttcaattagtggataccatatgcaggaagcaggggctgatgccattctggagctggcctatactttagcagatggattggagtactctagaactggactccaggctggcctgacaattgatgaatttgcaccaaggttgtctttcttctggggaattggaatgaatttctatatggaaatagcaaagatgagagctggtagaagactctgggctcacttaatagagaaaatgtttcagcctaaaaactcaaaatctcttcttctaagagcacactgtcagacatctggatggtcacttactgagcaggatccctacaataatattgtccgtactgcaatagaagcaatggcagcagtatttggagggactcagtctttgcacacaaattcttttgatgaagctttgggtttgccaactgtgaaaagtgctcgaattgccaggaacacacaaatcatcattcaagaagaatctgggattcccaaagtggctgatccttggggaggttcttacatgatggaatgtctcacaaatgatgtttatgatgctgctttaaagctcattaatgaaattgaagaaatgggtggaatggccaaagctgtagctgagggaatacctaaacttcgaattgaagaatgtgctgcccgaagacaagctagaatagattctggttctgaagtaattgttggagtaaataagtaccagttggaaaaagaagacgctgtagaagttctggcaattgataatacttcagtgcgaaacaggcagattgaaaaacttaagaagatcaaatccagcagggatcaagctttggctgaacgttgtcttgctgcactaaccgaatgtgctgctagcggagatggaaatatcctggctcttgcagtggatgcatctcgggcaagatgtacagtgggagaaatcacagatgccctgaaaaaggtatttggtgaacataaagcgaatgatcgaatggtgagtggagcatatcgccaggaatttggagaaagtaaagagataacatctgctatcaagagggttcataaattcatggaacgtgaaggtcgcagacctcgtcttcttgtagcaaaaatgggacaagatggccatgacagaggagcaaaagttattgctacaggatttgctgatcttggttttgatgtggacataggccctcttttccagactcctcgtgaagtggcccagcaggctgtggatgcggatgtgcatgctgtgggcgtaagcaccctcgctgctggtcataaaaccctagttcctgaactcatcaaagaacttaactcccttggacggccagatattcttgtcatgtgtggaggggtgataccacctcaggattatgaatttctgtttgaagttggtgtttccaatgtatttggtcctgggactcgaattccaaaggctgccgttcaggtgcttgatgatattgagaagtgtttggaaaagaagcagcaatctgtataatatcctctttttgttttagcttttgtctaaaatattattttagttatgatcaaagaagagagtaaagctatgtcttcaatttaatttcaatacctgatttgtactttccttgaaagctttactttaaaataccttacttataggcctggtgtcatgctataagtatgtacatacagtttcacttcaaaaataaaaaaaaaatccctaaaaactctctatactctctataacaatactttatcaagaactctggacaatggtattatttttaaaaatcatggtgatgtatttattagaatgtttcttataaatctgtttactttttatattaagaattaaactgtacctaaaaaaactctgactattcccatttgtcagtttagcattacattgtcttgagcaccagaaaataaaatccatatattaataaaaacctatcttgaaaaactagtggagtgtatttacgtggcaaaagagattttgggaggagtcctcagccaaattctaccagaatcaccttaataaaagaagtattaaaatcaagcacagcaggttggaatatggggaatttgacagtatatttcttcaagtctgagtttactttcttcctgatcatgaccatctgaccttgttatttctgggcttggctcaagaccaaggagagtggatgttgatgaacattcctttaaataaaagtgcttaggttgtagttatggctttgtctagaatggtgatgtcaactgtgagtgtaggtctgtgatatagaaagaattcaactttccagatctagaaagatgctaccttgcatagatttgctccttaaacataaattgcaaaaataaaaatatcacagagaacacctgtactttgcttactgaaagatttgctcactaaagaaggaaagttgccatttacctgtttaacaaatctgcacatcctgcacatgttccccagaatgtaaaataaaaaaagtttaaataaaaaaggaaagttgtcctttattgttaacatgatccattacatgaatataacataaataattatcttttttaataaatttctattgtattagatcagagagcagtcttttggaaagtattatagatacattactgtagaatttacaaactcattgtaatacaatgtatttaattttcagaatatgattatctgaatggtattgtcatgattattgttcccattttcagatgaacactgacttcaagtccaatgatatattcactatgccattttattgacttttccttgtaaagcaatgcacactaatttagtaagtatttggtttctgtgatgtgttcagttgcgtgctgggtgacatgtgaaataaactcatccttgaggaatttacagctc

SEQ ID NO: 424146 - DNA, 2771 bp, Homo sapiens
aatatctgatatttcagaggattataagaggcactaaacactgaactctgactcttctaattttggcttctaaactaatttgtctgaatttatttgctattctgaagcttaatatggaaattgacatagaaaatatgcagcagttgctgtttaatcatgttgctgtttatagttgcaatatctatcacctgtttctttgagtttttgttttttatcaaatattttaggatccctacaataatattgtccgtactgcaatagaagcaatggcagcagtatttggagggactcagtctttgcacacaaattcttttgatgaagctttgggtttgccaactgtgaaaagtgctcgaattgccaggaacacacaaatcatcattcaagaagaatctgggattcccaaagtggctgatccttggggaggttcttacatgatggaatgtctcacaaatgatgtttatgatgctgctttaaagctcattaatgaaattgaagaaatgggtggaatggccaaagctgtagctgagggaatacctaaacttcgaattgaagaatgtgctgcccgaagacaagctagaatagattctggttctgaagtaattgttggagtaaataagtaccagttggaaaaagaagacgctgtagaagttctggcaattgataatacttcagtgcgaaacaggcagattgaaaaacttaagaagatcaaatccagcagggatcaagctttggctgaacgttgtcttgctgcactaaccgaatgtgctgctagcggagatggaaatatcctggctcttgcagtggatgcatctcgggcaagatgtacagtgggagaaatcacagatgccctgaaaaaggtatttggtgaacataaagcgaatgatcgaatggtgagtggagcatatcgccaggaatttggagaaagtaaagagataacatctgctatcaagagggttcataaattcatggaacgtgaaggtcgcagacctcgtcttcttgtagcaaaaatgggacaagatggccatgacagaggagcaaaagttattgctacaggatttgctgatcttggttttgatgtggacataggccctcttttccagactcctcgtgaagtggcccagcaggctgtggatgcggatgtgcatgctgtgggcgtaagcaccctcgctgctggtcataaaaccctagttcctgaactcatcaaagaacttaactcccttggacggccagatattcttgtcatgtgtggaggggtgataccacctcaggattatgaatttctgtttgaagttggtgtttccaatgtatttggtcctgggactcgaattccaaaggctgccgttcaggtgcttgatgatattgagaagtgtttggaaaagaagcagcaatctgtataatatcctctttttgttttagcttttgtctaaaatattattttagttatgatcaaagaagagagtaaagctatgtcttcaatttaatttcaatacctgatttgtactttccttgaaagctttactttaaaataccttacttataggcctggtgtcatgctataagtatgtacatacagtttcacttcaaaaataaaaaaaaaatccctaaaaactctctatactctctataacaatactttatcaagaactctggacaatggtattatttttaaaaatcatggtgatgtatttattagaatgtttcttataaatctgtttactttttatattaagaattaaactgtacctaaaaaaactctgactattcccatttgtcagtttagcattacattgtcttgagcaccagaaaataaaatccatatattaataaaaacctatcttgaaaaactagtggagtgtatttacgtggcaaaagagattttgggaggagtcctcagccaaattctaccagaatcaccttaataaaagaagtattaaaatcaagcacagcaggttggaatatggggaatttgacagtatatttcttcaagtctgagtttactttcttcctgatcatgaccatctgaccttgttatttctgggcttggctcaagaccaaggagagtggatgttgatgaacattcctttaaataaaagtgcttaggttgtagttatggctttgtctagaatggtgatgtcaactgtgagtgtaggtctgtgatatagaaagaattcaactttccagatctagaaagatgctaccttgcatagatttgctccttaaacataaattgcaaaaataaaaatatcacagagaacacctgtactttgcttactgaaagatttgctcactaaagaaggaaagttgccatttacctgtttaacaaatctgcacatcctgcacatgttccccagaatgtaaaataaaaaaagtttaaataaaaaaggaaagttgtcctttattgttaacatgatccattacatgaatataacataaataattatcttttttaataaatttctattgtattagatcagagagcagtcttttggaaagtattatagatacattactgtagaatttacaaactcattgtaatacaatgtatttaattttcagaatatgattatctgaatggtattgtcatgattattgttcccattttcagatgaacactgacttcaagtccaatgatatattcactatgccattttattgacttttccttgtaaagcaatgcacactaatttagtaagtatttggtttctgtgatgtgttcagttgcgtgctgggtgacatgtgaaataaactcatccttgaggaatttacagctc

SEQ ID NO: 424147 - DNA, 2840 bp, Homo sapiens
  misc_feature (2762)..(2762): n is a, c, g, or t
ggaatgcgcccatgagagcgctattagattggctggagggagggcggtgtcggcctacgcccccagagtcgtccggctgacgctggcggtggcgcggtttgtgtgggcttggtgagggcggggaggcctggctgtgtggatgtctgacaggtgaggcgggggacgcagaagtgcagccgccctctcccacagcggagtccaaaacaggcctaccagtcagttcttatttctattgggtgtttccatgctccaccatgttaagagctaagaatcagctttttttactttcacctcattacctgaggcaggtaaaagaatcatcaggctccaggctcatacagcaacgacttctacaccagcaacagccccttcacccagaatgggctgccctggctaaaaagcagctgaaaggcaaaaacccagaagacctaatatggcacaccccggaagggatctctataaaacccttgtattccaagagagatactatggacttacctgaagaacttccaggagtgaagccattcacacgtggaccatatcctaccatgtatacctttaggccctggaccatccgccagtatgctggttttagtactgtggaagaaagcaataagttctataaggacaacattaaggctggtcagcagggattatcagttgcctttgatctggcgacacatcgtggctatgattcagacaaccctcgagttcgtggtgatgttggaatggctggagttgctattgacactgtggaagataccaaaattctttttgatggaattcctttagaaaaaatgtcagtttccatgactatgaatggagcagttattccagttcttgcaaattttatagtaactggagaagaacaaggtgtacctaaagagaaacttactggtaccatccaaaatgatatactaaaggaatttatggttcgaaatacatacatttttcctccagaaccatccatgaaaattattgctgacatatttgaatatacagcaaagcacatgccaaaatttaattcaatttcaattagtggataccatatgcaggaagcaggggctgatgccattctggagctggcctatactttagcagatggattggagtactctagaactggactccaggctggcctgacaattgatgaatttgcaccaaggttgtctttcttctggggaattggaatgaatttctatatggaaatagcaaagatgagagctggtagaagactctgggctcacttaatagagaaaatgtttcagcctaaaaactcaaaatctcttcttctaagagcacactgtcagacatctggatggtcacttactgagcaggatccctacaataatattgtccgtactgcaatagaagcaatggcagcagtatttggagggactcagtctttgcacacaaattcttttgatgaagctttgggtttgccaactgtgaaaagtgctcgaattgccaggaacacacaaatcatcattcaagaagaatctgggattcccaaagtggctgatccttggggaggttcttacatgatggaatgtctcacaaatgatgtttatgatgctgctttaaagctcattaatgaaattgaagaaatgggtggaatggccaaagctgtagctgagggaatacctaaacttcgaattgaagaatgtgctgcccgaagacaagctagaatagattctggttctgaagtaattgttggagtaaataagtaccagttggaaaaagaagacgctgtagaagttctggcaattgataatacttcagtgcgaaacaggcagattgaaaaacttaagaagatcaaatccagcagggatcaagctttggctgaacgttgtcttgctgcactaaccgaatgtgctgctagcggagatggaaatatcctggctcttgcagtggatgcatctcgggcaagatgtacagtgggagaaatcacagatgccctgaaaaaggtatttggtgaacataaagcgaatgatcgaatggtgagtggagcatatcgccaggaatttggagaaagtaaagagataacatctgctatcaagagggttcataaattcatggaacgtgaaggtcgcagacctcgtcttcttgtagcaaaaatgggacaagatggccatgacagaggagcaaaagttattgctacaggatttgctgatcttggttttgatgtggacataggccctcttttccagactcctcgtgaagtggcccagcaggctgtggatgcggatgtgcatgctgtgggcgtaagcaccctcgctgctggtcataaaaccctagttcctgaactcatcaaagaacttaactcccttggacggccagatattcttgtcatgtgtggaggggtgataccacctcaggattatgaatttctgtttgaagttggtgtttccaatgtatttggtcctgggactcgaattccaaaggctgccgttcaggtgcttgatgatattgagaagtgtttggaaaagaagcagcaatctgtataatatcctctttttgttttagcttttgtctaaaatattattttagttatgatcaaagaagagagtaaagctatgtcttcaatttaatttcaatacctgatttgtactttccttgaaagctttactttaaaataccttacttataggcctggtgtcatgctataagtatgtacatacagtttcacttcaaaaataaaaaaaaaaaaaagcctctaatactggtgatgctagaggtgatgtttttggtaaacaggcggngtaagatttgccgagttccttttactttttttaacctttccttatgagcatgcctgtgttgggttgacagtgagggta

SEQ ID NO: 424148 - DNA, 2331 bp, Homo sapiens
aatggatggaatatgctaaaagatttacttcttatcaaaaaatatttatgggagtgttgctgtttatccatttgtgttaagtggtgaattattcagcaaccttcaggtacttgtctatatatataattattaggtcattcagtcatttcttggttgacaaatgttgaaaagagaattggatgcataaaggcatccagaataaatttttcttaagtaatttcagaagagatgctttcataatgcattaaaaaattcttattttacatttttacagtcatttacttatgtaataaaatgtttaattatattgaatattatggtaaacagatatctttatcacaaaataatgaagttaatggaaccaccatttcatgtttcagatgtacagtgggagaaatcacagatgccctgaaaaaggtatttggtgaacataaagcgaatgatcgaatggtgagtggagcatatcgccaggaatttggagaaagtaaagagataacatctgctatcaagagggttcataaattcatggaacgtgaaggtcgcagacctcgtcttcttgtagcaaaaatgggacaagatggccatgacagaggagcaaaagttattgctacaggatttgctgatcttggttttgatgtggacataggccctcttttccagactcctcgtgaagtggcccagcaggctgtggatgcggatgtgcatgctgtgggcgtaagcaccctcgctgctggtcataaaaccctagttcctgaactcatcaaagaacttaactcccttggacggccagatattcttgtcatgtgtggaggggtgataccacctcaggattatgaatttctgtttgaagttggtgtttccaatgtatttggtcctgggactcgaattccaaaggctgccgttcaggtgcttgatgatattgagaagtgtttggaaaagaagcagcaatctgtataatatcctctttttgttttagcttttgtctaaaatattattttagttatgatcaaagaagagagtaaagctatgtcttcaatttaatttcaatacctgatttgtactttccttgaaagctttactttaaaataccttacttataggcctggtgtcatgctataagtatgtacatacagtttcacttcaaaaataaaaaaaaaatccctaaaaactctctatactctctataacaatactttatcaagaactctggacaatggtattatttttaaaaatcatggtgatgtatttattagaatgtttcttataaatctgtttactttttatattaagaattaaactgtacctaaaaaaactctgactattcccatttgtcagtttagcattacattgtcttgagcaccagaaaataaaatccatatattaataaaaacctatcttgaaaaactagtggagtgtatttacgtggcaaaagagattttgggaggagtcctcagccaaattctaccagaatcaccttaataaaagaagtattaaaatcaagcacagcaggttggaatatggggaatttgacagtatatttcttcaagtctgagtttactttcttcctgatcatgaccatctgaccttgttatttctgggcttggctcaagaccaaggagagtggatgttgatgaacattcctttaaataaaagtgcttaggttgtagttatggctttgtctagaatggtgatgtcaactgtgagtgtaggtctgtgatatagaaagaattcaactttccagatctagaaagatgctaccttgcatagatttgctccttaaacataaattgcaaaaataaaaatatcacagagaacacctgtactttgcttactgaaagatttgctcactaaagaaggaaagttgccatttacctgtttaacaaatctgcacatcctgcacatgttccccagaatgtaaaataaaaaaagtttaaataaaaaaggaaagttgtcctttattgttaacatgatccattacatgaatataacataaataattatcttttttaataaatttctattgtattagatcagagagcagtcttttggaaagtattatagatacattactgtagaatttacaaactcattgtaatacaatgtatttaattttcagaatatgattatctgaatggtattgtcatgattattgttcccattttcagatgaacactgacttcaagtccaatgatatattcactatgccattttattgacttttccttgtaaagcaatgcacactaatttagtaagtatttggtttctgtgatgtgttcagttgcgtgctgggtgacatgtgaaataaactcatccttgaggaatttacagctc

SEQ ID NO: 424149 - DNA, 2585 bp, Homo sapiens
acttgtacactagataaatatcaaaacagccaaggtgaaagtcatcaaaatggaacttttttcttttaacaaagataagtgcttttttgtgttggaagtaaatttgtcagtggagcaagcaagcattttgatttatatagcatgataagaaaccatattgctgttaccttgggagagttcacacttatgaagggtagatgagatatggacaattcaaagcagccagtctatcacatatatgtataaatgaccatgaagtcactttttagtttatatttcaatctttctgcatgttgtactctgtaccctggctcacgaaggtgggaggttgtcattttttgtcttagttcaccgtgatgttctcagtgttatgtgcttacagtctgtgccatctttcagactttcctctaagggggaaatggctttaatggagctctcaatgtaaaatagatgcattaacaaaatatggacgagagtagggagatcatcacaaagaatagctaatggatgctgggcttaatacctaggtgatggggtgatctatgcagctgtttaccatggcacgtgtttaactatgtaacaagcctgcacattaacccctgaatgtaaaataaaaattggaaaaaaaaaacaacccaaaatacaagtaaacaaattaggtgcttttaaataaacttgaaagatttgctgtgaataaattagtttttatatcttccctttggaaaattagtatctaactactgatatatttttaaatgtttttcagggttcataaattcatggaacgtgaaggtcgcagacctcgtcttcttgtagcaaaaatgggacaagatggccatgacagaggagcaaaagttattgctacaggatttgctgatcttggttttgatgtggacataggccctcttttccagactcctcgtgaagtggcccagcaggctgtggatgcggatgtgcatgctgtgggcgtaagcaccctcgctgctggtcataaaaccctagttcctgaactcatcaaagaacttaactcccttggacggccagatattcttgtcatgtgtggaggggtgataccacctcaggattatgaatttctgtttgaagttggtgtttccaatgtatttggtcctgggactcgaattccaaaggctgccgttcaggtgcttgatgatattgagaagtgtttggaaaagaagcagcaatctgtataatatcctctttttgttttagcttttgtctaaaatattattttagttatgatcaaagaagagagtaaagctatgtcttcaatttaatttcaatacctgatttgtactttccttgaaagctttactttaaaataccttacttataggcctggtgtcatgctataagtatgtacatacagtttcacttcaaaaataaaaaaaaaatccctaaaaactctctatactctctataacaatactttatcaagaactctggacaatggtattatttttaaaaatcatggtgatgtatttattagaatgtttcttataaatctgtttactttttatattaagaattaaactgtacctaaaaaaactctgactattcccatttgtcagtttagcattacattgtcttgagcaccagaaaataaaatccatatattaataaaaacctatcttgaaaaactagtggagtgtatttacgtggcaaaagagattttgggaggagtcctcagccaaattctaccagaatcaccttaataaaagaagtattaaaatcaagcacagcaggttggaatatggggaatttgacagtatatttcttcaagtctgagtttactttcttcctgatcatgaccatctgaccttgttatttctgggcttggctcaagaccaaggagagtggatgttgatgaacattcctttaaataaaagtgcttaggttgtagttatggctttgtctagaatggtgatgtcaactgtgagtgtaggtctgtgatatagaaagaattcaactttccagatctagaaagatgctaccttgcatagatttgctccttaaacataaattgcaaaaataaaaatatcacagagaacacctgtactttgcttactgaaagatttgctcactaaagaaggaaagttgccatttacctgtttaacaaatctgcacatcctgcacatgttccccagaatgtaaaataaaaaaagtttaaataaaaaaggaaagttgtcctttattgttaacatgatccattacatgaatataacataaataattatcttttttaataaatttctattgtattagatcagagagcagtcttttggaaagtattatagatacattactgtagaatttacaaactcattgtaatacaatgtatttaattttcagaatatgattatctgaatggtattgtcatgattattgttcccattttcagatgaacactgacttcaagtccaatgatatattcactatgccattttattgacttttccttgtaaagcaatgcacactaatttagtaagtatttggtttctgtgatgtgttcagttgcgtgctgggtgacatgtgaaataaactcatccttgaggaatttacagctc

SEQ ID NO: 424150 - DNA, 3044 bp, Homo sapiens
ggaatgcgcccatgagagcgctattagattggctggagggagggcggtgtcggcctacgcccccagagtcgtccggctgacgctggcggtggcgcggtttgtgtgggcttggtgagggcggggaggcctggctgtgtggatgtctgacaggtgaggcgggggacgcagaagtgcagccgccctctcccacagcggagtccaaaacaggcctaccagtcagttcttatttctattgggtgtttccatgctccaccatgttaagagctaagaatcagctttttttactttcacctcattacctgaggcaggtaaaagaatcatcaggctccaggctcatacagcaacgacttctacaccagcaacagccccttcacccagaatgggctgccctggctaaaaagcagctgaaaggcaaaaacccagaagacctaatatggcacaccccggaagggatctctataaaacccttgtattccaagagagatactatggacttacctgaagaacttccaggagtgaagccattcacacgtggaccatatcctaccatgtatacctttaggccctggaccatccgccagtatgctggttttagtactgtggaagaaagcaataagttctataaggacaacattaaggctggtcagcagggattatcagttgcctttgatctggcgacacatcgtggctatgattcagacaaccctcgagttcgtggtgatgttggaatggctggagttgctattgacactgtggaagataccaaaattctttttgatggaattcctttagaaaaaatgtcagtttccatgactatgaatggagcagttattccagttcttgcaaattttatagtaactggagaagaacaaggtgtacctaaagagaaacttactggtaccatccaaaatgatatactaaaggaatttatggttcgaaatacatacatttttcctccagaaccatccatgaaaattattgctgacatatttgaatatacagcaaagcacatgccaaaatttaattcaatttcaattagtggataccatatgcaggaagcaggggctgatgccattctggagctggcctatactttagcagatggattggagtactctagaactggactccaggctggcctgacaattgatgaatttgcaccaaggttgtctttcttctggggaattggaatgaatttctatatggaaatagcaaagatgagagctggtagaagactctgggctcacttaatagagaaaatgtttcagcctaaaaactcaaaatctcttcttctaagagcacactgtcagacatctggatggtcacttactgagcaggatccctacaataatattgtccgtactgcaatagaagcaatggcagcagtatttggagggactcagtctttgcacacaaattcttttgatgaagctttgggtttgccaactgtgaaaagtgctcgaattgccaggaacacacaaatcatcattcaagaagaatctgggattcccaaagtggctgatccttggggaggttcttacatgatggaatgtctcacaaatgatgtttatgatgctgctttaaagctcattaatgaaattgaagaaatgggtggaatggccaaagctgtagctgagggaatacctaaacttcgaattgaagaatgtgctgcccgaagacaagctagaatagattctggttctgaagtaattgttggagtaaataagtaccagttggaaaaagaagacgctgtagaagttctggcaattgataatacttcagtgcgaaacaggcagattgaaaaacttaagaagatcaaatccagcagggatcaagctttggctgaacgttgtcttgctgcactaaccgaatgtgctgctagcggagatggaaatatcctggctcttgcagtggatgcatctcgggcaagatgtacagtgggagaaatcacagatgccctgaaaaaggtatttggtgaacataaagcgaatgatcgaatggtgagtggagcatatcgccaggaatttggagaaagtaaagagataacatctgctatcaagagggttcataaattcatggaacgtgaaggtcgcagacctcgtcttcttgtagcaaaaatgggacaagatggccatgacagaggagcaaaagttattgctacaggatttgctgatcttggttttgatgtggacataggccctcttttccagactcctcgtgaagtggcccagcaggctgtggatgcggatgtgcatgctgtgggcgtaagcaccctcgctgctggtcataaaaccctagttcctgaactcatcaaagaacttaactcccttggacggccagatattcttgtcatgtgtggaggggtgataccacctcaggattatgaatttctgtttgaagttggtgtttccaatgtatttggtcctgggactcgaattccaaaggctgccgttcaggtgcttgatgatattgagaagtgtttggaaaagaagcagcaatctgtataaaataaaaatatcacagagaacacctgtactttgcttactgaaagatttgctcactaaagaaggaaagttgccatttacctgtttaacaaatctgcacatcctgcacatgttccccagaatgtaaaataaaaaaagtttaaataaaaaaggaaagttgtcctttattgttaacatgatccattacatgaatataacataaataattatcttttttaataaatttctattgtattagatcagagagcagtcttttggaaagtattatagatacattactgtagaatttacaaactcattgtaatacaatgtatttaattttcagaatatgattatctgaatggtattgtcatgattattgttcccattttcagatgaacactgacttcaagtccaatgatatattcactatgccattttattgacttttccttgtaaagcaatgcacactaatttagtaagtatttggtttctgtgatgtgttcagttgcgtgctgggtgacatgtgaaataaactcatccttgaggaatttacagctc

SEQ ID NO: 424151 - DNA, 2575 bp, Homo sapiens
ggaatgcgcccatgagagcgctattagattggctggagggagggcggtgtcggcctacgcccccagagtcgtccggctgacgctggcggtggcgcggtttgtgtgggcttggtgagggcggggaggcctggctgtgtggatgtctgacaggtgaggcgggggacgcagaagtgcagccgccctctcccacagcggagtccaaaacaggcctaccagtcagttcttatttctattgggtgtttccatgctccaccatgttaagagctaagaatcagctttttttactttcacctcattacctgaggcaggtaaaagaatcatcaggctccaggctcatacagcaacgacttctacaccagcaacagccccttcacccagaatgggctgccctggctaaaaagcagctgaaaggcaaaaacccagaagacctaatatggcacaccccggaagggatctctataaaacccttgtattccaagagagatactatggacttacctgaagaacttccaggagtgaagccattcacacgtggaccatatcctaccatgtatacctttaggccctggaccatccgccagtatgctggttttagtactgtggaagaaagcaataagttctataaggacaacattaaggctggtcagcagggattatcagttgcctttgatctggcgacacatcgtggctatgattcagacaaccctcgagttcgtggtgatgttggaatggctggagttgctattgacactgtggaagataccaaaattctttttgatggaattcctttagaaaaaatgtcagtttccatgactatgaatggagcagttattccagttcttgcaaattttatagtaactggagaagaacaaggtgtacctaaagagaaacttactggtaccatccaaaatgatatactaaaggaatttatggttcgaaatacatacatttttcctccagaaccatccatgaaaattattgctgacatatttgaatatacagcaaagcacatgccaaaatttaattcaatttcaattagtggataccatatgcaggaagcaggggctgatgccattctggagctggcctatactttagcagatggattggagtactctagaactggactccaggctggcctgacaattgatgaatttgcaccaaggttgtctttcttctggggaattggaatgaatttctatatggaaatagcaaagatgagagctggtagaagactctgggctcacttaatagagaaaatgtttcagcctaaaaactcaaaatctcttcttctaagagcacactgtcagacatctggatggtcacttactgagcaggatccctacaataatattgtccgtactgcaatagaagcaatggcagcagtatttggagggactcagtctttgcacacaaattcttttgatgaagctttgggtttgccaactgtgaaaagtgctcgaattgccaggaacacacaaatcatcattcaagaagaatctgggattcccaaagtggctgatccttggggaggttcttacatgatggaatgtctcacaaatgatgtttatgatgctgctttaaagctcattaatgaaattgaagaaatgggtggaatggccaaagctgtagctgagggaatacctaaacttcgaattgaagaatgtgctgcccgaagacaagctagaatagattctggttctgaagtaattgttggagtaaataagtaccagttggaaaaagaagacgctgtagaagttctggcaattgataatacttcagtgcgaaacaggcagattgaaaaacttaagaagatcaaatccagcagggatcaagctttggctgaacgttgtcttgctgcactaaccgaatgtgctgctagcggagatggaaatatcctggctcttgcagtggatgcatctcgggcaagatgtacagtgggagaaatcacagatgccctgaaaaaggtatttggtgaacataaagcgaatgatcgaatggtgagtggagcatatcgccaggaatttggagaaagtaaagagataacatctgctatcaagaggtaatatgtaaggtttcttaggccagaatttcatcttttctgttagcacaatccccttgaatctactgggagcttaatttccttacatacaactgagaaaatttttgaattttataataataaatagtaaattaaatattaattatatagactatataacatataatagagtatataatttattcattacatataatatataattagaaatatatcatacatgatacatattatatatctatactatcattttaataggtacatgataatatttaataataaatatcaaatattgaaactaatattagttttcatataattaatactattttgaactttcaccatagtccccttcaggagtttctcatgtcaaacagatgtttaactaacaatgatattgcttcatatcctccaggtatttatatttcaatctgcttactatggtagagtttcatattttttgaagttgtttacatttttcattgcttgaataattataaaatcttaattttc

SEQ ID NO: 424152 - DNA, 2009 bp, Homo sapiens
ggaatgcgcccatgagagcgctattagattggctggagggagggcggtgtcggcctacgcccccagagtcgtccggctgacgctggcggtggcgcggtttgtgtgggcttggtgagggcggggaggcctggctgtgtggatgtctgacaggtgaggcgggggacgcagaagtgcagccgccctctcccacagcggagtccaaaacaggcctaccagtcagttcttatttctattgggtgtttccatgctccaccatgttaagagctaagaatcagctttttttactttcacctcattacctgaggcaggtaaaagaatcatcaggctccaggctcatacagcaacgacttctacaccagcaacagccccttcacccagaatgggctgccctggctaaaaagcagctgaaaggcaaaaacccagaagacctaatatggcacaccccggaagggatctctataaaacccttgtattccaagagagatactatggacttacctgaagaacttccaggagtgaagccattcacacgtggaccatatcctaccatgtatacctttaggccctggaccatccgccagtatgctggttttagtactgtggaagaaagcaataagttctataaggacaacattaaggctggtcagcagggattatcagttgcctttgatctggcgacacatcgtggctatgattcagacaaccctcgagttcgtggtgatgttggaatggctggagttgctattgacactgtggaagataccaaaattctttttgatggaattcctttagaaaaaatgtcagtttccatgactatgaatggagcagttattccagttcttgcaaattttatagtaactggagaagaacaaggtgtacctaaagagaaacttactggtaccatccaaaatgatatactaaaggaatttatggttcgaaatacatacatttttcctccagaaccatccatgaaaattattgctgacatatttgaatatacagcaaagcacatgccaaaatttaattcaatttcaattagtggataccatatgcaggaagcaggggctgatgccattctggagctggcctatactttagcagatggattggagtactctagaactggactccaggctggcctgacaattgatgaatttgcaccaaggttgtctttcttctggggaattggaatgaatttctatatggaaatagcaaagatgagagctggtagaagactctgggctcacttaatagagaaaatgtttcagcctaaaaactcaaaatctcttcttctaagagcacactgtcagacatctggatggtcacttactgagcaggatccctacaataatattgtccgtactgcaatagaagcaatggcagcagtatttggagggactcagtctttgcacacaaattcttttgatgaagctttgggtttgccaactgtgaaaagtgctcgaattgccaggaacacacaaatcatcattcaagaagaatctgggattcccaaagtggctgatccttggggaggttcttacatgatggaatgtctcacaaatgatgtttatgatgctgctttaaagctcattaatgaaattgaagaaatgggtggaatggccaaagctgtagctgagggaatacctaaacttcgaattgaagaatgtgctgcccgaagacaagctagaatagattctggttctgaagtaattgttggagtaaataagtaccagttggaaaaagaagacgctgtagaagttctggcaattgataatacttcagtgcgaaacaggcagattgaaaaacttaagaagatcaaatccagcagggatcaagctttggctgaacgttgtcttgctgcactaaccgaatgtgctgctagcggagatggaaatatcctggctcttgcagtggatgcatctcgggcaagatggacagtgggagaaaacacagatgcctggaaaaggattttgggaacattatgtgtggagggggaaccacctcagata

SEQ ID NO: 424153 - DNA, 821 bp, Homo sapiens
  misc_feature (821)..(821): n is a, c, g, or t
ggaatgcgcccatgagagcgctattagattggctggagggagggcggtgtcggcctacgcccccagagtcgtccggctgacgctggcggtggcgcggtttgtgtgggcttggtgagggcggggaggcctggctgtgtggatgtctgacaggtgaggcgggggacgcagaagtgcagccgccctctcccacagcggagtccaaaacaggcctaccagtcagttcttatttctattgggtgtttccatgctccaccatgttaagagctaagaatcagctttttttactttcacctcattacctgaggcaggtaaaagaatcatcaggctccaggctcatacagcaacgacttctacaccagcaacagccccttcacccagaatgggctgccctggctaaaaagcagctgaaaggcaaaaacccagaagacctaatatggcacaccccggaagggatctctataaaacccttgtattccaagagagatactatggacttacctgaagaacttccaggagtgaagccattcacacgtggaccatatcctaccatgtatacctttaggccctggaccatccgccagtatgctggttttagtactgtggaagaaagcaataagttctataaggacaacattaaggctggtcagcagggattatcagttgcctttgatctggcgacacatcgtggctatgattcagacaaccctcgagttcgtggtgatgttggaatggctggagttgctattgacactgtggaagataccaaaattctttttgatggaattcctttagatatagtaacctgagagaacaaggtgtcn

SEQ ID NO: 424154 - DNA, 1098 bp, Homo sapiens
  misc_feature (1)..(1): n is a, c, g, or t
  misc_feature (3)..(3): n is a, c, g, or t
ngnggacggtggccgacaggctgcgcccgcccgcgcccggggtgatgcagttgccccccgcgctgtgcgcccgcctcgctgcggggcccggggcggcggagccgctgcctgtagagcgggatcccgcggctggggccgcgccctttcgcttcgttgcgcgccccgtgcgcttcccgcgggagcaccagttcttcgaggatggggacgtgcagcgccacctctacctccaggacgtgatcatgcaggtggccgacgtgcctgagaagcccagggtgcccgcgtttgcctgccaggtggccggctgctgccaggtgttcgatgccctggacgactacgagcaccactaccacacgctgcacggaaatgtttgctccttttgcaagcgggccttcccttccggacacctgctggacgcccacatcctggagtggcacgattcgctcttccagatcctgtctgagaggcaggacatgtatcagtgcttggtagaaggctgcacagagaagttcaagaccagcagagaccggaaggatcacatggtgaggatgcacctgtaccccgcggacttccggtttgataagccaaagaaaagcagaagcccagcctcagcagaagccccaggggacagtggagagcggtcagaaggggaggccatggaaatctgctctgagcctgtggcagcctcccctgcaccggcaggtgagaggcggatctacagacatagaataccctctaccatctgctttggtcagggtgccgctcgaggatttaaaagcaacaagaagaaaaccaaacaatgctgatagactcagaaaaggagtggggggcagtcaccactgctgggcgtggcatccgccttgggcctttctccgaccttctggtgtggccgccctgggggccaggccctcgccatcctccccatccttgttcctcagcaaatggcattagcagctgtcatcagaagctgtgagggacccacagattttggaaacgacctggacacactattgggaaggagatgtggacggcctgtctcctcctgcagggcccaccctaagaatgtatttttaaacacatgaaataagtatttttcactga

SEQ ID NO: 424155 - DNA, 1039 bp, Homo sapiens
  misc_feature (1)..(1): n is a, c, g, or t
  misc_feature (3)..(3): n is a, c, g, or t
ngnggacggtggccgacaggctgcgcccgcccgcgcccggggtgatgcagttgccccccgcgctgtgcgcccgcctcgctgcggggcccggggcggcggagccgctgcctgtagagcgggatcccgcggctggggccgcgccctttcgcttcgttgcgcgccccgtgcgcttcccgcgggagcaccagttcttcgaggatggggacgtgcagcgccacctctacctccaggacgtgatcatgcaggtggccgacgtgcctgagaagcccagggtgcccgcgtttgcctgccaggtggccggctgctgccaggtgttcgatgccctggacgactacgagcaccactaccacacgctgcacggaaatgtttgctccttttgcaagcgggccttcccttccggacacctgctggacgcccacatcctggagtggcacgattcgctcttccagatcctgtctgagaggcaggacatgtatcagtgcttggtagaaggctgcacagagaagttcaagaccagcagagaccggaaggatcacatgcccagcctcagcagaagccccaggggacagtggagagcggtcagaaggggaggccatggaaatctgctctgagcctgtggcagcctcccctgcaccggcaggtgagaggcggatctacagacatagaataccctctaccatctgctttggtcagggtgccgctcgaggatttaaaagcaacaagaagaaaaccaaacaatgctgatagactcagaaaaggagtggggggcagtcaccactgctgggcgtggcatccgccttgggcctttctccgaccttctggtgtggccgccctgggggccaggccctcgccatcctccccatccttgttcctcagcaaatggcattagcagctgtcatcagaagctgtgagggacccacagattttggaaacgacctggacacactattgggaaggagatgtggacggcctgtctcctcctgcagggcccaccctaagaatgtatttttaaacacatgaaataagtatttttcactga

SEQ ID NO: 424156 - DNA, 800 bp, Homo sapiens
gccagccaccgcggtcacacgattaacccaagtcaatagaagccggcgtaaagagtgttttagatcaccccctccccaataaagctaaaactcacctgagttgtaaaaaactccagttgacacaaaatagactacgaaagtggctttaacatatctgaacacacaatagctaagacccaaactgggattagataccccactatgcttagccctaaacctcaacagttaaatcaacaaaactgctcgccagaacactacgagccacagcttaaaactcaaaggacctggcggtgcttcatatccctctagagaaaaaaaaaaaaaaaaaaaaaaaaaaaaaaaaaaacggcacgccatggaaatctgctctgagcctgtggcagcctcccctgcaccggcaggtgagaggcggatctacagacatagaataccctctaccatctgctttggtcagggtgccgctcgaggatttaaaagcaacaagaagaaaaccaaacaatgctgatagactcagaaaaggagtggggggcagtcaccactgctgggcgtggcatccgccttgggcctttctccgaccttctggtgtggccgccctgggggccaggccctcgccatcctccccatccttgttcctcagcaaatggcattagcagctgtcatcagaagctgtgagggacccacagattttggaaacgacctggacacactattgggaaggagatgtggacggcctgtctcctcctgcagggcccaccctaagaatgtatttttaaacacatgaaataagtatttttcactga

SEQ ID NO: 424157 - DNA, 1156 bp, Homo sapiens
ctgtgaataacttagtttctctcgcatactctgtttttgagccattgaagcgcaggaatgccaagcaccactcacttttcctcattgtctgagtgggatggaaagagtctcacttgcagttgcttcagtcacaacccaggcgtctgccttaatagcatcacctgtgccgtctgcgtttctagcgtcacctgtgccgtctgcgtttctagcgtcacctgtgccgtctgccttcctagcatgacctgtgccgtctgcctttctagcatgacctgtactgtctgcctttctagcgtcacctgtgccgtctgcctttctagttaaagttgattttaaattaatttgggaaaaacggtgaacaagtggggaaaaacatcaccaaagactccaaacaggtggaacgatgaacttaatgttccctgcaccctccttacagatgcctggactttggcctgtgaatgagccccggggggctgggacagtaggggttttcatggaatggacatggggtagcaggaagtctcagccccagagggcttggcaggagccgccctctctgcggagttcttcccagcgggtgtgcgttggtggctggcggggaccccccacaggaactaggtctcaggctgtggaaagggagctgccccagggcccaggagggccggctctgcattccgcatgttcccagagtgaaagagaatgagaaggagacacacaagtgctgttatgacctgggttgttggttggcaaatacagcatctaatagaaactttcttccatcccagaataccctctaccatctgctttggtcagggtgccgctcgaggatttaaaagcaacaagaagaaaaccaaacaatgctgatagactcagaaaaggagtggggggcagtcaccactgctgggcgtggcatccgccttgggcctttctccgaccttctggtgtggccgccctgggggccaggccctcgccatcctccccatccttgttcctcagcaaatggcattagcagctgtcatcagaagctgtgagggacccacagattttggaaacgacctggacacactattgggaaggagatgtggacggcctgtctcctcctgcagggcccaccctaagaatgtatttttaaacacatgaaataagtatttttcactga

SEQ ID NO: 424158 - DNA, 1073 bp, Homo sapiens
  misc_feature (1)..(1): n is a, c, g, or t
  misc_feature (3)..(3): n is a, c, g, or t
ngnggacggtggccgacaggctgcgcccgcccgcgcccggggtgatgcagttgccccccgcgctgtgcgcccgcctcgctgcggggcccggggcggcggagccgctgcctgtagagcgggatcccgcggctggggccgcgccctttcgcttcgttgcgcgccccgtgcgcttcccgcgggagcaccagttcttcgaggatggggacgtgcagcgccacctctacctccaggacgtgatcatgcaggtggccgacgtgcctgagaagcccagggtgcccgcgtttgcctgccaggtggccggctgctgccaggtgttcgatgccctggacgactacgagcaccactaccacacgctgcacggaaatgtttgctccttttgcaagcgggccttcccttccggacacctgctggacgcccacatcctggagtggcacgattcgctcttccagatcctgtctgagaggcaggacatgtatcagtgcttggtagaaggctgcacagagaagttcaagaccagcagagaccggaaggatcacatggtgaggatgcacctgtaccccgcggacttccggtttgataagccaaagaaaagcagaagcccagcctcagcagaagccccaggggacagtggagagcggtcagaaggggaggccatggaaatctgctctgagcctgtggcagcctcccctgcaccggcagaataccctctaccatctgctttggtcagggtgccgctcgaggatttaaaagcaacaagaagaaaaccaaacaatgctgatagactcagaaaaggagtggggggcagtcaccactgctgggcgtggcatccgccttgggcctttctccgaccttctggtgtggccgccctgggggccaggccctcgccatcctccccatccttgttcctcagcaaatggcattagcagctgtcatcagaagctgtgagggacccacagattttggaaacgacctggacacactattgggaaggagatgtggacggcctgtctcctcctgcagggcccaccctaagaatgtatttttaaacacatgaaataagtatttttcactga

SEQ ID NO: 424159 - DNA, 786 bp, Homo sapiens
  misc_feature (1)..(1): n is a, c, g, or t
  misc_feature (3)..(3): n is a, c, g, or t
ngnggacggtggccgacaggctgcgcccgcccgcgcccggggtgatgcagttgccccccgcgctgtgcgcccgcctcgctgcggggcccggggcggcggagccgctgcctgtagagcgggatcccgcggctggggccgcgccctttcgcttcgttgcgcgccccgtgcgcttcccgcgggagcaccagttcttcgaggatggggacgtgcagcgccacctctacctccaggacgtgatcatgcaggtggccgacgtgcctgagaagcccagggtgcccgcgtttgcctgccaggtggccggctgctgccaggtgttcgatgccctggacgactacgagcaccactaccacacgctgcacggaaatgtttgctccttttgcaagcgggccttcccttccggacacctgctggacgcccacatcctggagtggcacgattcgctcttccagatcctgtctgagaggcaggacatgtatcagtgcttggtagaaggctgcacagagaagttcaagaccagcagagaccggaaggatcacatggtgaggatgcacctgtaccccgcggacttccggtttgataagccaaagaaaagcagaagcccagcctcagcagaagccccaggggacagtggagagcggtcagaaggggaggccatggaaatctgctctgagcctgtggcagcctcccctgcaccggcaggtgagaggcggatctacagacataggtcagtgtctgagctctttctgaaacccgttctcaacatgtgttcggtgctgaggattctgg

SEQ ID NO: 424160 - DNA, 867 bp, Homo sapiens
ctgtgaataacttagtttctctcgcatactctgtttttgagccattgaagcgcaggaatgccaagcaccactcacttttcctcattgtctgagtgggatggaaagagtctcacttgcagttgcttcagtcacaacccaggcgtctgccttaatagcatcacctgtgccgtctgcgtttctagcgtcacctgtgccgtctgcgtttctagcgtcacctgtgccgtctgccttcctagcatgacctgtgccgtctgcctttctagcatgacctgtactgtctgcctttctagcgtcacctgtgccgtctgcctttctagttaaagttgattttaaattaatttgggaaaaacggtgaacaagtggggaaaaacatcaccaaagactccaaacaggtggaacgatgaacttaatgttccctgcaccctccttacagatgcctggactttggcctgtgaatgagccccggggggctgggacagtaggggttttcatggaatggacatggggtagcaggaagtctcagccccagagggcttggcaggagccgccctctctgcggagttcttcccagcgggtgtgcgttggtgggtggggggcagtcaccactgctgggcgtggcatccgccttgggcctttctccgaccttctggtgtggccgccctgggggccaggccctcgccatcctccccatccttgttcctcagcaaatggcattagcagctgtcatcagaagctgtgagggacccacagattttggaaacgacctggacacactattgggaaggagatgtggacggcctgtctcctcctgcagggcccaccctaagaatgtatttttaaacacatgaaataagtatttttcactga

SEQ ID NO: 424161 - DNA, 896 bp, Homo sapiens
  misc_feature (1)..(1): n is a, c, g, or t
  misc_feature (3)..(3): n is a, c, g, or t
ngnggacggtggccgacaggctgcgcccgcccgcgcccggggtgatgcagttgccccccgcgctgtgcgcccgcctcgctgcggggcccggggcggcggagccgctgcctgtagagcgggatcccgcggctggggccgcgccctttcgcttcgttgcgcgccccgtgcgcttcccgcgggagcaccagttcttcgaggatggggacgtgcagcgccacctctacctccaggacgtgatcatgcaggtggccgacgtgcctgagaagcccagtatcagtgcttggtagaaggctgcacagagaagttcaagaccagcagagaccggaaggatcacatggtgaggatgcacctgtaccccgcggacttccggtttgataagccaaagaaaagcagaagcccagcctcagcagaagccccaggggacagtggagagcggtcagaaggggaggccatggaaatctgctctgagcctgtggcagcctcccctgcaccggcaggtgagaggcggatctacagacatagaataccctctaccatctgctttggtcagggtgccgctcgaggatttaaaagcaacaagaagaaaaccaaacaatgctgatagactcagaaaaggagtggggggcagtcaccactgctgggcgtggcatccgccttgggcctttctccgaccttctggtgtggccgccctgggggccaggccctcgccatcctccccatccttgttcctcagcaaatggcattagcagctgtcatcagaagctgtgagggacccacagattttggaaacgacctggacacactattgggaaggagatgtggacggcctgtctcctcctgcagggcccaccctaagaatgtatttttaaacacatgaaataagtatttttcactga

SEQ ID NO: 424162 - DNA, 659 bp, Homo sapiens
tagagtttaggatctgatagtgaggcaggacatgtatcagtgcttggtagaaggctgcacagagaagttcaagaccagcagagaccggaaggatcacatggtgaggatgcacctgtaccccgcggacttccggtttgataagccaaagaaaagcagaagcccagcctcagcagaagccccaggggacagtggagagcggtcagaaggggaggccatggaaatctgctctgagcctgtggcagcctcccctgcaccggcaggtgagaggcggatctacagacatagaataccctctaccatctgctttggtcagggtgccgctcgaggatttaaaagcaacaagaagaaaaccaaacaatgctgatagactcagaaaaggagtggggggcagtcaccactgctgggcgtggcatccgccttgggcctttctccgaccttctggtgtggccgccctgggggccaggccctcgccatcctccccatccttgttcctcagcaaatggcattagcagctgtcatcagaagctgtgagggacccacagattttggaaacgacctggacacactattgggaaggagatgtggacggcctgtctcctcctgcagggcccaccctaagaatgtatttttaaacacatgaaataagtatttttcactga

SEQ ID NO: 424163 - DNA, 499 bp, Homo sapiens
ctgtaatcattctccttttcccagtatcttaaaccacactataaaatcagactatgccaaaatagtaagaaaatatgctacttacagggaaatccagtttctttcttgcatgttcatttctggggaacacaggggctgtgggagccgtgcagggcagttactcactgctctctccccgcagcccagcctcagcagaagccccaggggacagtggagagcggtcagaaggggaggccatggaaatctgctctgagcctgtggcagcctcccctgcaccggcaggtgagaggcggatctacagacataggtcagtgtctgagctctttctgaaacccgttctcaacatgtgttcggtgctgaggattctgggctgcacctgggccgcagctcttctcatactgaattcagaaaggtaacgctgggtaagaaaatcggcttccgccagagaagaaagtccagatatctcaggtcctgtgaataacttagtttctctcgcata

SEQ ID NO: 424164 - DNA, 1090 bp, Homo sapiens
gccaggtgtactttttgggggacagcaaatagccctggccagaagggcacaaacacggcttcttaaatcactcactttctcctgttcccctcctgtttctgaaatataagtttatgacgttctttcacaaaagagtataatcattcttagactgttgacatggctgtggaaagccttaggagaagtagaaacaatttagggagggtggggaatgtactcatcccctcttctttccatcctagtgcccccaccaaagaggcttcttgttgcagccctcagtatctggatatgggccagggaggaaggaagggaaagagcaatgctgctgtgcttcaatcctggccttcccctcacagaattcttttaggaagagcaagcttttgtaagtagagtggcaagtgtttttatctttttttttttcctgctcctcaaaatgttgtcttgttccggcaatcacttttgccttccctctttcctgagcctgtagtgacaaagcccggcgattggggatgaaatctgttgtaacaccagagcttggattacacatcctctggtttggagttattctacagaatcagaaaggctggaaggtgggcttcacactcaggatggtgctttgagaaccagctaatagaccagccgagggaaggttgaatgggctgtctttacttttcccgataagccctacttaaatgcagcctgtaattgtataaaggagatgagaaacatcaggcaagaacttgcaccatcccactgttagacctctgggggtacagcaagacacgttagcaattttcactcacaattggggaatcccccattgtcccctatagggcccatgtggcatctacaacgaccacttgaagtggtgggtaagtagcatgaggcaatttcaagttcccactgagggatccccagagtgggggacacgcgacgcgacacaatgagtacgaagtgaagagagcacaagataaccccacacgaaagacgcggcacaacagagggggacacaccgcgagtcaggcgcacaaaaccacagatgagcaccaagaccaaagatgaccgggacacagccagtgagatacaccag

SEQ ID NO: 424165 - DNA, 2518 bp, Homo sapiens
cgtgctcgccgtctactacagcctcatctggcagccggtgggcgccgggacctcggggggagccgctggcccgccccccggcggctccaacgccactggcccgtctgggacttcgggggcggcggcggcggggcccaacaccactgggtcgtcccgccgcgaggcgccgcgcgacgttcccccactgcaggcggcgcgaccggcgcctccggagccccctgcggacagccccccggccgggccgctcgagcggcctcgggggccggacgaggacgaagaggaaacggcggcggcgcccgggagtcgttgaagccctccgcgctgggggccgccgggaaccattctccccaagcccagaggcaggacttcgcagcaggatggggtggagagcccgcgggagtgacccccacgagagtgaacgcccctcacactcccaccatcgccggctggccccggagcgggaggcccgcagccagatcttcagccaagggaccacgattcgccggggggctgggggtttgctgcccaggaccgtgctgcaccagggccctgagccgtagggggatggggggaggggtggggagatcccggcaccaaacccttctgcgccgctcgctctggtgtatcctacatgcaggggtgactggggctttcccccaagactcaggggaaggatggagctgtaggggctctttttaagtaagctgaagctctcgaaaggaggagggcaccaaaagtagtggagctcaggtacgtcaacctagttgcagtggccagagatgcattaaatttctagatccctgtatatagttgttgacatatgcactagaagctataatcacatagaattctatgtatatcctcccacaccctgggtagctactgactgaaggggtcaagcaagggctatttgctgtcccccaaaaagtacacctggccagaagggcacaaacacggcttcttaaatcactcactttctcctgttcccctcctgtttctgaaatataagtttatgacgttctttcacaaaagagtataatcattcttagactgttgacatggctgtggaaagccttaggagaagtagaaacaatttagggagggtggggaatgtactcatcccctcttctttccatcctagtgcccccaccaaagaggcttcttgttgcagccctcagtatctggatatgggccagggaggaaggaagggaaagagcaatgctgctgtgcttcaatcctggccttcccctcacagaattcttttaggaagagcaagcttttgtaagtagagtggcaagtgtttttatctttttttttttcctgctcctcaaaatgttgtcttgttccggcaatcacttttgccttccctctttcctgagcctgtagtgacaaagcccggcgattggggatgaaatctgttgtaacaccagagcttggattacacatcctctggtttggagttattctacagaatcagaaaggctggaaggtgggcttcacactcaggatggtgctttgagaaccagctaatagaccagccgagggaaggttgaatgggctgtctttacttttcccgataagccctacttaaatgcagcctgtaattgtataaaggagatgagaaacatcaagagaaatgacatacatgtagctctggggtagcaagaactagacttcctcaatttggattccatttccttctgccatttgcttttaggcaattgagtgtgggtagtgatgagatatcaaatcccttagtgtttccattttgggaaatgaggcactatttttttttttaaaagacaacttacccacctgagtcctgaaacagtttgtctctccagttttctggcctatactctagttagctctgatccaagtttacaggacaacagccttgctttaagccatgtcctgttgtgggcacgataatagcaactgagctgtcacagcctaccagcaggctggtaacacctccagggtctcttggctagagcagatttcttagcagctgactaggacttcagtcattgggaagcctatgaggcctttacatttttggtgtgagatggggaagaaacataaaatgccactttacaacttcaataatagcctgtaatttatatttactgtgtgaatttttagtcctatattttaataatttgtaaattgatctcttattccaagaatcctttgaacttgtagaacatctgggagtccacttccctgtcctcttcctgatccctgctttctggactgtttaaatcctctttgggatggatcagagagtctagagaggccactcataggtccagctgctggcctcctgactctccaaagccttcactggaattgggacatttgctccagccctagctgtgaacatgaccagagacattatttataattcagccatttaagatatacctgtactcaaaaagtcctgtatatttttaaaaagttttatttttcaggtgaacaaaaatacatcctaagaactctgcctaaaaaaaaaaaa

SEQ ID NO: 424166 - DNA, 2060 bp, Homo sapiens
cccggcggggctcgcggctcccggcagccgccgcctcccctcgcggcacttccggaccccggcgtcgcccttttaaggggcagcccccaagcccagaggcaggacttcgcagcaggatggggggagatcccggcaccaaacccttctgcgccgctcgctctggtgtatcctacatgcaggggtgactggggctttcccccaagactcaggggaaggatggagctgtaggggctctttttaagtaagctgaagctctcgaaaggaggagggcaccaaaagtagtggagctcaggtacgtcaacctagttgcagtggccagagatgcattaaatttctagatccctgtatatagttgttgacatatgcactagaagctataatcacatagaattctatgtatatcctcccacaccctgggtagctactgactgaaggggtcaagcaagggctatttgctgtcccccaaaaagtacacctggccagaagggcacaaacacggcttcttaaatcactcactttctcctgttcccctcctgtttctgaaatataagtttatgacgttctttcacaaaagagtataatcattcttagactgttgacatggctgtggaaagccttaggagaagtagaaacaatttagggagggtggggaatgtactcatcccctcttctttccatcctagtgcccccaccaaagaggcttcttgttgcagccctcagtatctggatatgggccagggaggaaggaagggaaagagcaatgctgctgtgcttcaatcctggccttcccctcacagaattcttttaggaagagcaagcttttgtaagtagagtggcaagtgtttttatctttttttttttcctgctcctcaaaatgttgtcttgttccggcaatcacttttgccttccctctttcctgagcctgtagtgacaaagcccggcgattggggatgaaatctgttgtaacaccagagcttggattacacatcctctggtttggagttattctacagaatcagaaaggctggaaggtgggcttcacactcaggatggtgctttgagaaccagctaatagaccagccgagggaaggttgaatgggctgtctttacttttcccgataagccctacttaaatgcagcctgtaattgtataaaggagatgagaaacatcaagagaaatgacatacatgtagctctggggtagcaagaactagacttcctcaatttggattccatttccttctgccatttgcttttaggcaattgagtgtgggtagtgatgagatatcaaatcccttagtgtttccattttgggaaatgaggcactatttttttttttaaaagacaacttacccacctgagtcctgaaacagtttgtctctccagttttctggcctatactctagttagctctgatccaagtttacaggacaacagccttgctttaagccatgtcctgttgtgggcacgataatagcaactgagctgtcacagcctaccagcaggctggtaacacctccagggtctcttggctagagcagatttcttagcagctgactaggacttcagtcattgggaagcctatgaggcctttacatttttggtgtgagatggggaagaaacataaaatgccactttacaacttcaataatagcctgtaatttatatttactgtgtgaatttttagtcctatattttaataatttgtaaattgatctcttattccaagaatcctttgaacttgtagaacatctgggagtccacttccctgtcctcttcctgatccctgctttctggactgtttaaatcctctttgggatggatcagagagtctagagaggccactcataggtccagctgctggcctcctgactctccaaagccttcactggaattgggacatttgctccagccctagctgtgaacatgaccagagacattatttataattcagccatttaagatatacctgtactcaaaaagtcctgtatatttttaaaaagttttatttttcaggtgaacaaaaatacatcctaagaactctgcctaaaaaaaaaaaa

SEQ ID NO: 424167 - DNA, 1619 bp, Homo sapiens
gccaggtgtactttttgggggacagcaaatagccctggccagaagggcacaaacacggcttcttaaatcactcactttctcctgttcccctcctgtttctgaaatataagtttatgacgttctttcacaaaagagtataatcattcttagactgttgacatggctgtggaaagccttaggagaagtagaaacaatttagggagggtggggaatgtactcatcccctcttctttccatcctagtgcccccaccaaagaggcttcttgttgcagccctcagtatctggatatgggccagggaggaaggaagggaaagagcaatgctgctgtgcttcaatcctggccttcccctcacagaattcttttaggaagagcaagcttttgtaagtagagtggcaagtgtttttatctttttttttttcctgctcctcaaaatgttgtcttgttccggcaatcacttttgccttccctctttcctgagcctgtagtgacaaagcccggcgattggggatgaaatctgttgtaacaccagagcttggattacacatcctctggtttggagttattctacagaatcagaaaggctggaaggtgggcttcacactcaggatggtgctttgagaaccagctaatagaccagccgagggaaggttgaatgggctgtctttacttttcccgataagccctacttaaatgcagcctgtaattgtataaaggagatgagaaacatcaagagaaatgacatacatgtagctctggggtagcaagaactagacttcctcaatttggattccatttccttctgccatttgcttttaggcaattgagtgtgggtagtgatgagatatcaaatcccttagtgtttccattttgggaaatgaggcactatttttttttttaaaagacaacttacccacctgagtcctgaaacagtttgtctctccagttttctggcctatactctagttagctctgatccaagtttacaggacaacagccttgctttaagccatgtcctgttgtgggcacgataatagcaactgagctgtcacagcctaccagcaggctggtaacacctccagggtctcttggctagagcagatttcttagcagctgactaggacttcagtcattgggaagcctatgaggcctttacatttttggtgtgagatggggaagaaacataaaatgccactttacaacttcaataatagcctgtaatttatatttactgtgtgaatttttagtcctatattttaataatttgtaaattgatctcttattccaagaatcctttgaacttgtagaacatctgggagtccacttccctgtcctcttcctgatccctgctttctggactgtttaaatcctctttgggatggatcagagagtctagagaggccactcataggtccagctgctggcctcctgactctccaaagccttcactggaattgggacatttgctccagccctagctgtgaacatgaccagagacattatttataattcagccatttaagatatacctgtactcaaaaagtcctgtatatttttaaaaagttttatttttcaggtgaacaaaaatacatcctaagaactctgcctaaaaaaaaaaaa

SEQ ID NO: 424168 - DNA, 1858 bp, Homo sapiens
cgtgctcgccgtctactacagcctcatctggcagccggtgggcgccgggacctcggggggagccgctggcccgccccccggcggctccaacgccactggcccgtctgggacttcgggggcggcggcggcggggcccaacaccactgggtcgtcccgccgcgaggcgccgcgcgacgttcccccactgcaggcggcgcgaccggcgcctccggagccccctgcggacagccccccggccgggccgctcgagcggcctcgggggccggacgaggacgaagaggaaacggcggcggcgcccgggagtcgttgaagccctccgcgctgggggccgccgggaaccattctccccaagcccagaggcaggacttcgcagcaggatggggtggagagcccgcgggagtgacccccacgagagtgaacgcccctcacactcccaccatcgccggctggccccggagcgggaggcccgcagccagatcttcagccaagggaccacgattcgccggggggctgggggtttgctgcccaggaccgtgctgcaccagggccctgagccgtagggggatggggggaggggtggggagatcccggcaccaaacccttctgcgccgctcgctctggtgtatcctacatgcaggggtgactggggctttcccccaagactcaggggaaggatggagctgtaggggctctttttaagtaagctgaagctctcgaaaggaggagggcaccaaaagtagtggagctcaggtacgtcaacctagttgcagtggccagagatgcattaaatttctagatccctgtatatagttgttgacatatgcactagaagctataatcacatagaattctatgtatatcctcccacaccctgggtagctactgactgaaggggtcaagcaagggctatttgctgtcccccaaaaagtacacctggccagaagggcacaaacacggcttcttaaatcactcactttctcctgttcccctcctgtttctgaaatataagtttatgacgttctttcacaaaagagtataatcattcttagactgttgacatggctgtggaaagccttaggagaagtagaaacaatttagggagggtggggaatgtactcatcccctcttctttccatcctagtgcccccaccaaagaggcttcttgttgcagccctcagtatctggatatgggccagggaggaaggaagggaaagagcaatgctgctgtgcttcaatcctggccttcccctcacagaattcttttaggaagagcaagcttttgtaagtagagtggcaagtgtttttatctttttttttttcctgctcctcaaaatgttgtcttgttccggcaatcacttttgccttccctctttcctgagcctgtagtgacaaagcccggcgattggggatgaaatctgttgtaacaccagagcttggattacacatcctctggtttggagttattctacagaatcagaaaggctggaaggtgggcttcacactcaggatggtgctttgagaaccagctaatagaccagccgagggaaggttgaatgggctgtctttacttttcccgataagccctacttaaatgcagcctgtaattgtataaaggagatgagaaacatcaagagaaatgacatacatgtagctctggggtagcaagaactagacttcctcaatttggattccatttccttctgccatttgcttttaggcaattgagtgtgggtagtgatgagatatcaaatcccttagtgtttccattttgggaaatgaggcactatttttttttttaaaagacatttcccactggtctgaaagtggtccagtcggcaaatagaaccgtcagttaggc

SEQ ID NO: 424169 - DNA, 1612 bp, Homo sapiens
cgtgctcgccgtctactacagcctcatctggcagccggtgggcgccgggacctcggggggagccgctggcccgccccccggcggctccaacgccactggcccgtctgggacttcgggggcggcggcggcggggcccaacaccactgggtcgtcccgccgcgaggcgccgcgcgacgttcccccactgcaggcggcgcgaccggcgcctccggagccccctgcggacagccccccggccgggccgctcgagcggcctcgggggccggacgaggacgaagaggaaacggcggcggcgcccgggagtcgttgaagccctccgcgctgggggccgccgggaaccattctccccaagcccagaggcaggacttcgcagcaggatggggtggagagcccgcgggagtgacccccacgagagtgaacgcccctcacactcccaccatcgccggctggccccggagcgggaggcccgcagccagatcttcagccaagggaccacgattcgccggggggctgggggtttgctgcccaggaccgtgctgcaccagggccctgagccgtagggggatggggggaggggtggggagatcccggcaccaaacccttctgcgccgctcgctctggtgtatcctacatgcaggggtgactggggctttcccccaagactcaggggaaggatggagctgtaggggctctttttaagtaagctgaagctctcgaaaggaggagggcaccaaaagtagtggagctcaggtacgtcaacctagttgcagtggccagagatgcattaaatttctagatccctgtatatagttgttgacatatgcactagaagctataatcacatagaattctatgtatatcctcccacaccctgggtagctactgactgaaggggtcaagcaagggctatttgctgtcccccaaaaagtacacctggccagaagggcacaaacacggcttcttaaatcactcactttctcctgttcccctcctgtttctgaaatataagtttatgacgttctttcacaaaagagtataatcattcttagactgttgacatggctgtggaaagccttaggagaagtagaaacaatttagggagggtggggaatgtactcatcccctcttctttccatcctagtgcccccaccaaagaggcttcttgttgcagccctcagtatctggatatgggccagggaggaaggaagggaaagagcaatgctgctgtgcttcaatcctggccttcccctcacagaattcttttaggaagagcaagcttttaatcctttgaacttgtagaacatctgggagtccacttccctgtcctcttcctgatccctgctttctggactgtttaaatcctctttgggatggatcagagagtctagagaggccactcataggtccagctgctggcctcctgactctccaaagccttcactggaattgggacatttgctccagccctagctgtgaacatgaccagagacattatttataattcagccatttaagatatacctgtactcaaaaagtcctgtatatttttaaaaagttttatttttcaggtgaacaaaaatacatcctaagaactctgcctaaaaaaaaaaaa

SEQ ID NO: 424170 - DNA, 1876 bp, Homo sapiens
cgtgctcgccgtctactacagcctcatctggcagccggtgggcgccgggacctcggggggagccgctggcccgccccccggcggctccaacgccactggcccgtctgggacttcgggggcggcggcggcggggcccaacaccactgggtcgtcccgccgcgaggcgccgcgcgacgttcccccactgcaggcggcgcgaccggcgcctccggagccccctgcggacagccccccggccgggccgctcgagcggcctcgggggccggacgaggacgaagaggaaacggcggcggcgcccgggagtcgttgaagccctccgcgctgggggccgccgggaaccattctccccaagcccagaggcaggacttcgcagcaggatggggtggagagcccgcgggagtgacccccacgagagtgaacgcccctcacactcccaccatcgccggctggccccggagcgggaggcccgcagccagatcttcagccaagggaccacgattcgccggggggctgggggtttgctgcccaggaccgtgctgcaccagggccctgagccgtagggggatggggggaggggtggggagatcccggcaccaaacccttctgcgccgctcgctctggtgtatcctacatgcaggggtgactggggctttcccccaagactcaggggaaggatggagctgtaggggctctttttaagtaagctgaagctctcgaaaggaggagggcaccaaaagtagtggagctcaggtacgtcaacctagttgcagtggccagagatgcattaaatttctagatccctgtatatagttgttgacatatgcactagaagctataatcacatagaattctatgtatatcctcccacaccctgggtagctactgactgaaggggtcaagcaagggctatttgctgtcccccaaaaagtacacctggccagaagggcacaaacacggcttcttaaatcactcactttctcctgttcccctcctgtttctgaaatataagtttatgacgttctttcacaaaagagtataatcattcttagactgttgacatggctgtggaaagccttaggagaagtagaaacaatttagggagggtggggaatgtactcatcccctcttctttccatcctagtgcccccaccaaagaggcttcttgttgcagccctcagtatctggatatgggccagggaggaaggaagggaaagagcaatgctgctgtgcttcaatcctggccttcccctcacagaattcttttaggaagagcaagcttttgtaagtagagtggcaagtgtttttatctttttttttttcctgctcctcaaaatgttgtcttgttccggcaatcacttttgccttccctctttcctgagcctgtagtgacaaagcccggcgattggggatgaaatctgttgtaacaccagagcttggattacacatcctctggtttggagttattctacagaatcagaaaggctggaaggtgggcttcacactcaggatggtgctttgagaaccagctaatagaccagccgagggaaggttgaatgggctgtctttacttttcccgataagccctacttaaatgcagcctgtaattgtataaaggagatgagaaacatcaagagaaatgacatacatgtagctctggggtagcaagaactagacttcctcaatttggattccatttccttctgccatttgcttttaggcaattgagtgtgggtagtgatgagatatcaaatcccttagtgtttccattttgggaaatgaggcactatttttttttttgaacatttcccctgagtctcgaagtggtctccggtcggcaactagtgcctgtccagtcggaaaagctgtttacagcttt

SEQ ID NO: 424171 - DNA, 1989 bp, Homo sapiens
cgtgctcgccgtctactacagcctcatctggcagccggtgggcgccgggacctcggggggagccgctggcccgccccccggcggctccaacgccactggcccgtctgggacttcgggggcggcggcggcggggcccaacaccactgggtcgtcccgccgcgaggcgccgcgcgacgttcccccactgcaggcggcgcgaccggcgcctccggagccccctgcggacagccccccggccgggccgctcgagcggcctcgggggccggacgaggacgaagaggaaacggcggcggcgcccgggagtcgttgaagccctccgcgctgggggccgccgggaaccattctccccaagcccagaggcaggacttcgcagcaggatggggtggagagcccgcgggagtgacccccacgagagtgaacgcccctcacactcccaccatcgccggctggccccggagcgggaggcccgcagccagatcttcagccaagggaccacgattcgccggggggctgggggtttgctgcccaggaccgtgctgcaccagggccctgagccgtagggggatggggggaggggtggggagatcccggcaccaaacccttctgcgccgctcgctctggtgtatcctacatgcaggggtgactggggctttcccccaagactcaggggaaggatggagctgtaggggctctttttaagtaagctgaagctctcgaaaggaggagggcaccaaaagtagtggagctcaggtacgtcaacctagttgcagtggccagagatgcattaaatttctagatccctgtatatagttgttgacatatgcactagaagctataatcacatagaattctatgtatatcctcccacaccctgggtagctactgactgaaggggtcaagcaagggctatttgctgtcccccaaaaagtacacctggccagaagggcacaaacacggcttcttaaatcactcactttctcctgttcccctcctgtttctgaaatataagtttatgacgttctttcacaaaagagtataatcattcttagactgttgacatggctgtggaaagccttaggagaagtagaaacaatttagggagggtggggaatgtactcatcccctcttctttccatcctagtgcccccaccaaagaggcttcttgttgcagccctcagtatctggatatgggccagggaggaaggaagggaaagagcaatgctgctgtgcttcaatcctggccttcccctcacagaattcttttaggaagagcaagcttttgtaagtagagtggcaagtgtttttatctttttttttttcctgctcctcaaaatgttgtcttgttccggcaatcacttttgccttccctctttcctgagcctgtagtgacaaagcccggcgattggggatgaaatctgttgtaacaccagagcttggattacacatcctctggtttggagttattctacagaatcagaaaggctggaaggtgggcttcacactcaggatggtgctttgagaaccagctaatagaccagccgagggaaggttgaatgggctgtctttacttttcccgataagccctacttaaatgcagcctgtaattgtataaaggagatgagaaacatcaggcaagaacttgcaccatcccactgttagacctctgggggtacagcaagacacgttagcaattttcactcacaattggggaatcccccattgtcccctatagggcccatgtggcatctacaacgaccacttgaagtggtgggtaagtagcatgaggcaatttcaagttcccactgagggatccccagagtgggggacacgcgacgcgacacaatgagtacgaagtgaagagagcacaagataaccccacacgaaagacgcggcacaacagagggggacacaccgcgagtcaggcgcacaaaaccacagatgagcaccaagaccaaagatgaccgggacacagccagtgagatacaccag

SEQ ID NO: 424172 - DNA, 580 bp, Homo sapiens
gcccctcgcgtaacctgcgcccttctcgcaactcgcgtgcctcacagatcccaggtgctgcgcagctcagggtggggaatgtactcatcccctcttctttccatcctagtgcccccaccaaagaggcttcttgttgcagccctcagtatctggatatgggccagggaggaaggaagggaaagagcaatgctgctgtgcttcaatcctggccttcccctcacagaattcttttaggaagagcaagcttttaatcctttgaacttgtagaacatctgggagtccacttccctgtcctcttcctgatccctgctttctggactgtttaaatcctctttgggatggatcagagagtctagagaggccactcataggtccagctgctggcctcctgactctccaaagccttcactggaattgggacatttgctccagccctagctgtgaacatgaccagagacattatttataattcagccatttaagatatacctgtactcaaaaagtcctgtatatttttaaaaagttttatttttcaggtgaacaaaaatacatcctaagaactctgcctaaaaaaaaaaaa

SEQ ID NO: 424173 - DNA, 2411 bp, Homo sapiens
ggcggccgttgacggcgaggccccgccccggatgtcgcgtgtcgctgaaagggcggcggcgattggccggcgccgcgggggcgggcggggcggaaggttctggagggggctggcgggctctggaagcttccgccggacgggtatatagagtccgggactggtcggcggcggagccgggggacggcgacagcgggtcggcgggccgcaggagggggtcatgggtaaagactactaccagacgttgggcctggcccgcggcgcgtcggacgaggagatcaagcgggcctaccgccgccaggcgctgcgctaccacccggacaagaacaaggagcccggcgccgaggagaagttcaaggagatcgctgaggcctacgacgtgctcagcgacccgcgcaagcgcgagatcttcgaccgctacggggaggaaggcctaaaggggagtggccccagtggcggtagcggcggtggtgccaatggtacctctttcagctacacattccatggagaccctcatgccatgtttgctgagttcttcggtggcagaaatccctttgacaccttttttgggcagcggaacggggaggaaggcatggacattgatgacccattctctggcttccctatgggcatgggtggcttcaccaacgtgaactttggccgctcccgctctgcccaagagcccgcccgaaagaagcaagatcccccagtcacccacgaccttcgagtctcccttgaagagatctacagcggctgtaccaagaagatgaaaatctcccacaagcggctaaaccccgacggaaagagcattcgaaacgaagacaaaatattgaccatcgaagtgaagaaggggtggaaagaaggaaccaaaatcactttccccaaggaaggagaccagacctccaacaacattccagctgatatcgtctttgttttaaaggacaagccccacaatatctttaagagagatggctctgatgtcatttatcctgccaggatcagcctccgggaggctctgtgtggctgcacagtgaacgtccccactctggacggcaggacgatacccgtcgtattcaaagatgttatcaggcctggcatgcggcgaaaagttcctggagaaggcctccccctccccaaaacacccgagaaacgtggggacctcattattgagtttgaagtgatcttccccgaaaggattccccagacatcaagaaccgtacttgagcaggttcttccaatatagctatctgagctccccaaggactgaccagggacctttccagagctcaaggatttctggacctttctaccagttgtggaccatgagagggtgggagggcccagggagggctttcgtactgctgaatgttttccagagcatatattacaatctttcaaagtcgcacactagacttcagtggtttttcgagctatagggcatcaggtggtgggaacagcaggaaaaggcattccagtctgccccactgggtctggcagccctcccgggatgggcccacatccacctccagtccctggccaggggtgagaggcagaccagcagatggacttgatccctctgtgtctttttgcttctggctggtagataatgtcaacctgcagtcttgattcccagaccctgtacactcctccttttctgttgtgtgatcagtttgtgctttattctgtatttgtctcccatgtcttgctcttctcctggagaattctgtcttctctttggccatctcaaattgagaacctaaactattcctgcagaactgcctggttggcgtccacaagcaatacctctcgttccagcaggaccaagggagccagcctccagtgagtgactccagcaagtgcagccacctctcccttgatggtctgggagcctggcctcagcaaggggccttcctgacctctggctccagtgaagctgaatgtcctcactttgtgggtcacactctttacatttctgtaaggcaatcttggcacacgtggggcttaccagtggcccaggtaattttttgtttcatggactatggactctttcaaagggatctgatccttttgaattttgcacagccctagatacaatcccttttgataaaagggtctttgcttctgattacaggagcactgtggaacgtctgtaaatatgtttttataattccatgtatagttggtgtacactcaaaacctgtccccggcagccagtgctctctgtatagggccataatggaattctgaagaaatcttggggagggaaggggagttggaacaaatgtctgttccctggaggccagtccagtgctcagacctttagactcattgtaagttgccactgccaacatgagaccaaagtgtgtgactagtcaatgaagtgcgacagcattaaagactgatgctaaacctca

SEQ ID NO: 424174 - DNA, 443 bp, Homo sapiens
cctggacaacgtggtgaaaccctgtctctactaaaaatacaaaaattagccaggtgtaatggtgggcacctgtaatcccagctactagggaggctgagaatcgcttgaacccgggaggtggaggttgcagtgagccaagatcgcaccactgcactccagcctgggcgacagagtgagattctgtctcaaaaaaaaaagaaaacacctcctctccttactcttgtttccagatcctgcccctgagctttcatgagctgttgaaccatctggaattcacaggcctgtcatgagagacacgatgagaagtccttaggtagatcactgattcacaggggagcaggcggaggcaagggtgagtcagtgcttggaactcagtcatccagatttggctctggaaacttctgaagctgtagcctttggggatccctgactgcgagtacagg

SEQ ID NO: 424175 - DNA, 2767 bp, Homo sapiens
ggcggccgttgacggcgaggccccgccccggatgtcgcgtgtcgctgaaagggcggcggcgattggccggcgccgcgggggcgggcggggcggaaggttctggagggggctggcgggctctggaagcttccgccggacgggtatatagagtccgggactggtcggcggcggagccgggggacggcgacagcgggtcggcgggccgcaggagggggtcatgggtaaagactactaccagacgttgggcctggcccgcggcgcgtcggacgaggagatcaagcgggcctaccgccgccaggcgctgcgctaccacccggacaagaacaaggagcccggcgccgaggagaagttcaaggagatcgctgaggcctacgacgtgctcagcgacccgcgcaagcgcgagatcttcgaccgctacggggaggaaggcctaaaggggagtggccccagtggcggtagcggcggtggtgccaatggtacctctttcagctacacattccatggagaccctcatgccatgtttgctgagttcttcggtggcagaaatccctttgacaccttttttgggcagcggaacggggaggaaggcatggacattgatgacccattctctggcttccctatgggcatgggtggcttcaccaacgtgaactttggccgctcccgctctgcccaagagcccgcccgaaagaagcaagatcccccagtcacccacgaccttcgagtctcccttgaagagatctacagcggctgtaccaagaagatgaaaatctcccacaagcggctaaaccccgacggaaagagcattcgaaacgaagacaaaatattgaccatcgaagtgaagaaggggtggaaagaaggaaccaaaatcactttccccaaggaaggagaccagacctccaacaacattccagctgatatcgtctttgttttaaaggacaagccccacaatatctttaagagagatggctctgatgtcatttatcctgccaggatcagcctccgggaggctctgtgtggctgcacagtgaacgtccccactctggacggcaggacgatacccgtcgtattcaaagatgttatcaggcctggcatgcggcgaaaagttcctggagaaggcctccccctccccaaaacacccgagaaacgtggggacctcattattgagtttgaagtgatcttccccgaaaggattccccagacatcaagaaccgtacttgagcaggttcttccaatatagctatctgagctccccaaggactgaccagggacctttccagagctcaaggatttctggacctttctaccagttgtggaccatgagagggtgggagggcccagggagggctttcgtactgctgaatgttttccagagcatatattacaatctttcaaagtcgcacactagacttcagtggtttttcgagctatagggcatcaggtggtgggaacagcaggaaaaggcattccagtctgccccactgggtctggcagccctcccgggatgggcccacatccacctccagtccctggccaggggtgagaggcagaccagcagatggacttgatccctctgtgtctttttgcttctggctggtagataatgtcaacctgcagtcttgattcccagaccctgtacactcctccttttctgttgtgtgatcagtttgtgctttattctgtatttgtctcccatgtcttgctcttctcctggagaattctgtcttctctttggccatctcaaattgagaacctaaactattcctgcagaactgcctggttggcgtccacaagcaatacctctcgttccagcaggaccaagggagccagcctccagtgagtgactccagcaagtgcagccacctctcccttgatggtctgggagcctggcctcagcaaggggccttcctgacctctggctccagtgaagctgaatgtcctcactttgtgggtcacactctttacatttctgtaaggcaatcttggcacacgtggggcttaccagtggcccaggtaattttttgtttcatggactatggactctttcaaagggatctgatccttttgaattttgcacagccctagatacaatcccttttgataaaagggtctttgcttctgattacaggagcactgtggaacgtctgtaaatatgtttttataattccatgtatagttggtgtacactcaaaacctgtccccggcagccagtgctctctgtatagggccataatggaattctgaagaaatcttggggagggaaggggagttggaacaaatgtctgttccctggaggccagtccagtgctcagacctttagactcattgtaagttgccactgccaacatgagaccaaagtgtgtgactagtcaatgaagtgcgacagcattaaagactgatgctaaacctcaaaaaaaaaaacagcttttttgtacacatacaatctaaatattacttctaaaatttcccaccgatctctttcaatttcctcgtaaaataaaaatttctgggggggggcctagaccccattttgccctttgggtgggtgcttttaaattacagtggccgttttttaaacccttgtgactcggaaaaacctttggttatcccaaattaatggcttttgaaaaattccccttttgccagttgcgtaatttcaaaagggcccctcactcatgatttttcccaaattttggcacccttgatgagctaatgggaatatttacccgctaaatttttgtaaaatcccgtataaatttttggtaaa

SEQ ID NO: 424176 - DNA, 2203 bp, Homo sapiens
gcctggtggcgaattcggcacgaggaccagacgttgggcctggcccgcggcgcgtcggacgaggagatcaagcgggcctaccgccgccaggcgctgcgctaccacccggacaagaacaaggagcccggcgccgaggagaagttcaaggagatcgctgaggcctacgacgtgctcagcgacccgcgcaagcgcgagatcttcgaccgctacggggaggaaggcctaaaggggagtggccccagtggcggtagcggcggtggtgccaatggtacctctttcagctacacattccatggagaccctcatgccatgtttgctgagttcttcggtggcagaaatccctttgacaccttttttgggcagcggaacggggaggaaggcatggacattgatgacccattctctggcttccctatgggcatgggtggcttcaccaacgtgaactttggccgctcccgctctgcccaagagcccgcccgaaagaagcaagatcccccagtcacccacgaccttcgagtctcccttgaagagatctacagcggctgtaccaagaagatgaaaatctcccacaagcggctaaaccccgacggaaagagcattcgaaacgaagacaaaatattgaccatcgaagtgaagaaggggtggaaagaaggaaccaaaatcactttccccaaggaaggagaccagacctccaacaacattccagctgatatcgtctttgttttaaaggacaagccccacaatatctttaagagagatggctctgatgtcatttatcctgccaggatcagcctccgggaggctctgtgtggctgcacagtgaacgtccccactctggacggcaggacgatacccgtcgtattcaaagatgttatcaggcctggcatgcggcgaaaagttcctggagaaggcctccccctccccaaaacacccgagaaacgtggggacctcattattgagtttgaagtgatcttccccgaaaggattccccagacatcaagaaccgtacttgagcaggttcttccaatatagctatctgagctccccaaggactgaccagggacctttccagagctcaaggatttctggacctttctaccagttgtggaccatgagagggtgggagggcccagggagggctttcgtactgctgaatgttttccagagcatatattacaatctttcaaagtcgcacactagacttcagtggtttttcgagctatagggcatcaggtggtgggaacagcaggaaaaggcattccagtctgccccactgggtctggcagccctcccgggatgggcccacatccacctccagtccctggccaggggtgagaggcagaccagcagatggacttgatccctctgtgtctttttgcttctggctggtagataatgtcaacctgcagtcttgattcccagaccctgtacactcctccttttctgttgtgtgatcagtttgtgctttattctgtatttgtctcccatgtcttgctcttctcctggagaattctgtcttctctttggccatctcaaattgagaacctaaactattcctgcagaactgcctggttggcgtccacaagcaatacctctcgttccagcaggaccaagggagccagcctccagtgagtgactccagcaagtgcagccacctctcccttgatggtctgggagcctggcctcagcaaggggccttcctgacctctggctccagtgaagctgaatgtcctcactttgtgggtcacactctttacatttctgtaaggcaatcttggcacacgtggggcttaccagtggcccaggtaattttttgtttcatggactatggactctttcaaagggatctgatccttttgaattttgcacagccctagatacaatcccttttgataaaagggtctttgcttctgattacaggagcactgtggaacgtctgtaaatatgtttttataattccatgtatagttggtgtacactcaaaacctgtccccggcagccagtgctctctgtatagggccataatggaattctgaagaaatcttggggagggaaggggagttggaacaaatgtctgttccctggaggccagtccagtgctcagacctttagactcattgtaagttgccactgccaacatgagaccaaagtgtgtgactagtcaatgaagtgcgacagcattaaagactgatgctaaacctca

SEQ ID NO: 424177 - DNA, 2030 bp, Homo sapiens
aggagactctgaggatcccccgtccgtcgaccgctacggggaggaaggcctaaaggggagtggccccagtggcggtagcggcggtggtgccaatggtacctctttcagctacacattccatggagaccctcatgccatgtttgctgagttcttcggtggcagaaatccctttgacaccttttttgggcagcggaacggggaggaaggcatggacattgatgacccattctctggcttccctatgggcatgggtggcttcaccaacgtgaactttggccgctcccgctctgcccaagagcccgcccgaaagaagcaagatcccccagtcacccacgaccttcgagtctcccttgaagagatctacagcggctgtaccaagaagatgaaaatctcccacaagcggctaaaccccgacggaaagagcattcgaaacgaagacaaaatattgaccatcgaagtgaagaaggggtggaaagaaggaaccaaaatcactttccccaaggaaggagaccagacctccaacaacattccagctgatatcgtctttgttttaaaggacaagccccacaatatctttaagagagatggctctgatgtcatttatcctgccaggatcagcctccgggaggctctgtgtggctgcacagtgaacgtccccactctggacggcaggacgatacccgtcgtattcaaagatgttatcaggcctggcatgcggcgaaaagttcctggagaaggcctccccctccccaaaacacccgagaaacgtggggacctcattattgagtttgaagtgatcttccccgaaaggattccccagacatcaagaaccgtacttgagcaggttcttccaatatagctatctgagctccccaaggactgaccagggacctttccagagctcaaggatttctggacctttctaccagttgtggaccatgagagggtgggagggcccagggagggctttcgtactgctgaatgttttccagagcatatattacaatctttcaaagtcgcacactagacttcagtggtttttcgagctatagggcatcaggtggtgggaacagcaggaaaaggcattccagtctgccccactgggtctggcagccctcccgggatgggcccacatccacctccagtccctggccaggggtgagaggcagaccagcagatggacttgatccctctgtgtctttttgcttctggctggtagataatgtcaacctgcagtcttgattcccagaccctgtacactcctccttttctgttgtgtgatcagtttgtgctttattctgtatttgtctcccatgtcttgctcttctcctggagaattctgtcttctctttggccatctcaaattgagaacctaaactattcctgcagaactgcctggttggcgtccacaagcaatacctctcgttccagcaggaccaagggagccagcctccagtgagtgactccagcaagtgcagccacctctcccttgatggtctgggagcctggcctcagcaaggggccttcctgacctctggctccagtgaagctgaatgtcctcactttgtgggtcacactctttacatttctgtaaggcaatcttggcacacgtggggcttaccagtggcccaggtaattttttgtttcatggactatggactctttcaaagggatctgatccttttgaattttgcacagccctagatacaatcccttttgataaaagggtctttgcttctgattacaggagcactgtggaacgtctgtaaatatgtttttataattccatgtatagttggtgtacactcaaaacctgtccccggcagccagtgctctctgtatagggccataatggaattctgaagaaatcttggggagggaaggggagttggaacaaatgtctgttccctggaggccagtccagtgctcagacctttagactcattgtaagttgccactgccaacatgagaccaaagtgtgtgactagtcaatgaagtgcgacagcattaaagactgatgctaaacctca

SEQ ID NO: 424178 - DNA, 2127 bp, Homo sapiens
cccccgtccgtcgaccgctcgtcggtcgaccgctgatctttataatagatacagccaaaatctgtcactcatggtgagaataagagtcaaagcttatagttaagcggtcgacggacgcgtccgtcgaccgctacggggaggaaggcctaaaggggagtggccccagtggcggtagcggcggtggtgccaatggtacctctttcagctacacattccatggagaccctcatgccatgtttgctgagttcttcggtggcagaaatccctttgacaccttttttgggcagcggaacggggaggaaggcatggacattgatgacccattctctggcttccctatgggcatgggtggcttcaccaacgtgaactttggccgctcccgctctgcccaagagcccgcccgaaagaagcaagatcccccagtcacccacgaccttcgagtctcccttgaagagatctacagcggctgtaccaagaagatgaaaatctcccacaagcggctaaaccccgacggaaagagcattcgaaacgaagacaaaatattgaccatcgaagtgaagaaggggtggaaagaaggaaccaaaatcactttccccaaggaaggagaccagacctccaacaacattccagctgatatcgtctttgttttaaaggacaagccccacaatatctttaagagagatggctctgatgtcatttatcctgccaggatcagcctccgggaggctctgtgtggctgcacagtgaacgtccccactctggacggcaggacgatacccgtcgtattcaaagatgttatcaggcctggcatgcggcgaaaagttcctggagaaggcctccccctccccaaaacacccgagaaacgtggggacctcattattgagtttgaagtgatcttccccgaaaggattccccagacatcaagaaccgtacttgagcaggttcttccaatatagctatctgagctccccaaggactgaccagggacctttccagagctcaaggatttctggacctttctaccagttgtggaccatgagagggtgggagggcccagggagggctttcgtactgctgaatgttttccagagcatatattacaatctttcaaagtcgcacactagacttcagtggtttttcgagctatagggcatcaggtggtgggaacagcaggaaaaggcattccagtctgccccactgggtctggcagccctcccgggatgggcccacatccacctccagtccctggccaggggtgagaggcagaccagcagatggacttgatccctctgtgtctttttgcttctggctggtagataatgtcaacctgcagtcttgattcccagaccctgtacactcctccttttctgttgtgtgatcagtttgtgctttattctgtatttgtctcccatgtcttgctcttctcctggagaattctgtcttctctttggccatctcaaattgagaacctaaactattcctgcagaactgcctggttggcgtccacaagcaatacctctcgttccagcaggaccaagggagccagcctccagtgagtgactccagcaagtgcagccacctctcccttgatggtctgggagcctggcctcagcaaggggccttcctgacctctggctccagtgaagctgaatgtcctcactttgtgggtcacactctttacatttctgtaaggcaatcttggcacacgtggggcttaccagtggcccaggtaattttttgtttcatggactatggactctttcaaagggatctgatccttttgaattttgcacagccctagatacaatcccttttgataaaagggtctttgcttctgattacaggagcactgtggaacgtctgtaaatatgtttttataattccatgtatagttggtgtacactcaaaacctgtccccggcagccagtgctctctgtatagggccataatggaattctgaagaaatcttggggagggaaggggagttggaacaaatgtctgttccctggaggccagtccagtgctcagacctttagactcattgtaagttgccactgccaacatgagaccaaagtgtgtgactagtcaatgaagtgcgacagcattaaagactgatgctaaacctca

SEQ ID NO: 424179 - DNA, 2258 bp, Homo sapiens
ggcggccgttgacggcgaggccccgccccggatgtcgcgtgtcgctgaaagggcggcggcgattggccggcgccgcgggggcgggcggggcggaaggttctggagggggctggcgggctctggaagcttccgccggacgggtatatagagtccgggactggtcggcggcggagccgggggacggcgacagcgggtcggcgggccgcaggagggggtcatgggtaaagactactaccagacgttgggcctggcccgcggcgcgtcggacgaggagatcaagcgggcctaccgccgccaggcgctgcgctaccacccggacaagaacaaggagcccggcgccgaggagaagttcaaggagatcgctgaggcctacgacgtgctcagcgacccgcgcaagcgcgagatcttcgaccgctacggggaggaaggcctaaaggggagtggccccagtggcggtagcggcggtggtgccaatggtacctctttcagctacacattccatggagaccctcatgccatgtttgctgagttcttcggtggcagaaatccctttgacaccttttttgggcagcggaacggggaggaaggcatggacattgatgacccattctctggcttccctatgggcatgggtggcttcaccaacgtgaactttggccgctcccgctctgcccaagagcccgcccgaaagaagcaagatcccccagtcacccacgaccttcgagtctcccttgaagagatctacagcggctgtaccaagaagatgaaaatctcccacaagcggctaaaccccgacggaaagagcattcgaaacgaagacaaaatattgaccatcgaagtgaagaaggggtggaaagaaggaaccaaaatcactttccccaaggaaggagaccagacctccaacaacattccagctgatatcgtctttgttttaaaggacaagccccacaatatctttaagagagatggctctgatgtcatttatcctgccaggatcagcctccgggaggctctgtgtggctgcacagtgaacgtccccactctggacggcaggacgatacccgtcgtattcaaagatgttatcaggcctggcatgcggcgaaaagttcctggagaaggcctccccctccccaaaacacccgagaaacgtggggacctcattattgagtttgaagtgatcttccccgaaaggattccccagacatcaagaaccgtacttgagcaggttcttccaatatagctatctgagctccccaaggactgaccagggacctttccagagctcaaggatttctggacctttctaccagttgtggaccatgagagggtgggagggcccagggagggctttcgtactgctgaatgttttccagagcatatattacaatctttcaaagtcgcacactagacttcagtggtttttcgagctatagggcatcaggtggtgggaacagcaggaaaaggcattccagtctgccccactgggtctggcagccctcccgggatgggcccacatccacctccagtccctggccaggggtgagaggcagaccagcagatggacttgatccctctgtgtctttttgcttctggctggtagataatgtcaacctgcagaactgcctggttggcgtccacaagcaatacctctcgttccagcaggaccaagggagccagcctccagtgagtgactccagcaagtgcagccacctctcccttgatggtctgggagcctggcctcagcaaggggccttcctgacctctggctccagtgaagctgaatgtcctcactttgtgggtcacactctttacatttctgtaaggcaatcttggcacacgtggggcttaccagtggcccaggtaattttttgtttcatggactatggactctttcaaagggatctgatccttttgaattttgcacagccctagatacaatcccttttgataaaagggtctttgcttctgattacaggagcactgtggaacgtctgtaaatatgtttttataattccatgtatagttggtgtacactcaaaacctgtccccggcagccagtgctctctgtatagggccataatggaattctgaagaaatcttggggagggaaggggagttggaacaaatgtctgttccctggaggccagtccagtgctcagacctttagactcattgtaagttgccactgccaacatgagaccaaagtgtgtgactagtcaatgaagtgcgacagcattaaagactgatgctaaacctca

SEQ ID NO: 424180 - DNA, 2022 bp, Homo sapiens
gcggccgcccaggtccggagagcggggccgcctcggagggcctaaaggggagtggccccagtggcggtagcggcggtggtgccaatggtacctctttcagctacacattccatggagaccctcatgccatgtttgctgagttcttcggtggcagaaatccctttgacaccttttttgggcagcggaacggggaggaaggcatggacattgatgacccattctctggcttccctatgggcatgggtggcttcaccaacgtgaactttggccgctcccgctctgcccaagagcccgcccgaaagaagcaagatcccccagtcacccacgaccttcgagtctcccttgaagagatctacagcggctgtaccaagaagatgaaaatctcccacaagcggctaaaccccgacggaaagagcattcgaaacgaagacaaaatattgaccatcgaagtgaagaaggggtggaaagaaggaaccaaaatcactttccccaaggaaggagaccagacctccaacaacattccagctgatatcgtctttgttttaaaggacaagccccacaatatctttaagagagatggctctgatgtcatttatcctgccaggatcagcctccgggaggctctgtgtggctgcacagtgaacgtccccactctggacggcaggacgatacccgtcgtattcaaagatgttatcaggcctggcatgcggcgaaaagttcctggagaaggcctccccctccccaaaacacccgagaaacgtggggacctcattattgagtttgaagtgatcttccccgaaaggattccccagacatcaagaaccgtacttgagcaggttcttccaatatagctatctgagctccccaaggactgaccagggacctttccagagctcaaggatttctggacctttctaccagttgtggaccatgagagggtgggagggcccagggagggctttcgtactgctgaatgttttccagagcatatattacaatctttcaaagtcgcacactagacttcagtggtttttcgagctatagggcatcaggtggtgggaacagcaggaaaaggcattccagtctgccccactgggtctggcagccctcccgggatgggcccacatccacctccagtccctggccaggggtgagaggcagaccagcagatggacttgatccctctgtgtctttttgcttctggctggtagataatgtcaacctgcagtcttgattcccagaccctgtacactcctccttttctgttgtgtgatcagtttgtgctttattctgtatttgtctcccatgtcttgctcttctcctggagaattctgtcttctctttggccatctcaaattgagaacctaaactattcctgcagaactgcctggttggcgtccacaagcaatacctctcgttccagcaggaccaagggagccagcctccagtgagtgactccagcaagtgcagccacctctcccttgatggtctgggagcctggcctcagcaaggggccttcctgacctctggctccagtgaagctgaatgtcctcactttgtgggtcacactctttacatttctgtaaggcaatcttggcacacgtggggcttaccagtggcccaggtaattttttgtttcatggactatggactctttcaaagggatctgatccttttgaattttgcacagccctagatacaatcccttttgataaaagggtctttgcttctgattacaggagcactgtggaacgtctgtaaatatgtttttataattccatgtatagttggtgtacactcaaaacctgtccccggcagccagtgctctctgtatagggccataatggaattctgaagaaatcttggggagggaaggggagttggaacaaatgtctgttccctggaggccagtccagtgctcagacctttagactcattgtaagttgccactgccaacatgagaccaaagtgtgtgactagtcaatgaagtgcgacagcattaaagactgatgctaaacctca

SEQ ID NO: 424181 - DNA, 2441 bp, Homo sapiens
ggcggccgttgacggcgaggccccgccccggatgtcgcgtgtcgctgaaagggcggcggcgattggccggcgccgcgggggcgggcggggcggaaggttctggagggggctggcgggctctggaagcttccgccggacgggtatatagagtccgggactggtcggcggcggagccgggggacggcgacagcgggtcggcgggccgcaggagggggtcatgggtaaagactactaccagacgttgggcctggcccgcggcgcgtcggacgaggagatcaagcgggcctaccgccgccaggcgctgcgctaccacccggacaagaacaaggagcccggcgccgaggagaagttcaaggagatcgctgaggcctacgacgtgctcagcgacccgcgcaagcgcgagatcttcgaccgctacggggaggaaggcctaaaggggagtggccccagtggcggtagcggcggtggtgccaatggtacctctttcagctacacattccatggagaccctcatgccatgtttgctgagttcttcggtggcagaaatccctttgacaccttttttgggcagcggaacggggaggaaggcatggacattgatgacccattctctggcttccctatgggcatgggtggcttcaccaacgtgaactttggccgctcccgctctgcccaagagcccgcccgaaagaagcaagatcccccagtcacccacgaccttcgagtctcccttgaagagatctacagcggctgtaccaagaagatgaaaatctcccacaagcggctaaaccccgacggaaagagcattcgaaacgaagacaaaatattgaccatcgaagtgaagaaggggtggaaagaaggaaccaaaatcactttccccaaggaaggagaccagacctccaacaacattccagctgatatcgtctttgttttaaaggacaagccccacaatatctttaagagagatggctctgatgtcatttatcctgccaggatcagcctccgggaggctctgtgtggctgcacagtgaacgtccccactctggacggcaggacgatacccgtcgtattcaaagatgttatcaggcctggcatgcggcgaaaagttcctggagaaggcctccccctccccaaaacacccgagaaacgtggggacctcattattgagtttgaagtgatcttccccgaaaggattccccagacatcaagaaccgtacttgagcaggttcttccaatatagctatctgagctccccaaggactgaccagggacctttccagagctcaaggatttctggacctttctaccagttgtggaccatgagagggtgggagggcccagggagggctttcgtactgctgaatgttttccagagcatatattacaatctttcaaagtcgcacactagacttcagtggtttttcgagctatagggcatcaggtggtgggaacagcaggaaaaggcattccagtctgccccactgggtctggcagccctcccgggatgggcccacatccacctccagtccctggccaggggtgagaggcagaccagcagatggacttgatccctctgtgtctttttgcttctggctggtagataatgtcaacctgcagtcttgattcccagaccctgtacactcctccttttctgttgtgtgatcagtttgtgctttattctgtatttgtctcccatgtcttgctcttctcctggagaattctgtcttctctttggccatctcaaattgagaacctaaactattcctgcagaactgcctggttggcgtccacaagcaatacctctcgttccagcaggaccaagggagccagcctccagtgagtgactccagcaagtgcagccacctctcccttgatggtctgggagcctggcctcagcaaggggccttcctgacctctggctccagtgaagctgaatgtcctcactttgtgggtcacactctttacatttctgtaaggcaatcttggcacacgtggggcttaccagtggcccaggtaattttttgtttcatggactatggactctttcaaagggatctgatccttttgaattttgcacagccctagatacaatcccttttgataaaagggtctttgcttctgattacaggagcactgtggaacgtctgtaaatatgtttttataattccatgtatagttggtgtacgccctaaccgcgtcctgcgactttcgtcctccagctaacagccgaacatctagatcgaccgcacagagcggggagggggcaggggtccacacaagagggccagattgtggtccgtgagtcaagatgcccatcacactcgccgaccgattccgtcccttcgtccagctccaaaccgggcggtaatggggtccaggaaggctaaagggaacacgcacagccaccgagggaggggtctcaccaaagaacacccacttaa

SEQ ID NO: 424182 - DNA, 2505 bp, Homo sapiens
ttcctgtgcccgttgatgattcaggctggcttctgggcttgatctggagctgactttttgtgcaaggatggtggcagtgaatgctaatgtgtgaggatttaaaaactccctatttatttttgtttttttttttcttctcttcctacgcaccattagccctaaaacgttgagagtaaacacttaccgaaagccgaccctggaccatgtgtctttagccatctcttggtgatgttgccaggaggatgggtcagtccaggagtggcagggcctaggtggcacctggaggtgaacacctaaccgcatgagtccttttccactgtcaggctacgcggaaatactgttggtaggggggcgtctctgctgttggcagtgagaggtagaaacttggggttcttccttgctctcccctgacagacaaaaaagttcctcccccatggcttccaagctgtttccccctgtaagggaagctcgagagagagtctgctgttcagccatctgactgcttctaaatccgcttttcaggcctaaaggggagtggccccagtggcggtagcggcggtggtgccaatggtacctctttcagctacacattccatggagaccctcatgccatgtttgctgagttcttcggtggcagaaatccctttgacaccttttttgggcagcggaacggggaggaaggcatggacattgatgacccattctctggcttccctatgggcatgggtggcttcaccaacgtgaactttggccgctcccgctctgcccaagagcccgcccgaaagaagcaagatcccccagtcacccacgaccttcgagtctcccttgaagagatctacagcggctgtaccaagaagatgaaaatctcccacaagcggctaaaccccgacggaaagagcattcgaaacgaagacaaaatattgaccatcgaagtgaagaaggggtggaaagaaggaaccaaaatcactttccccaaggaaggagaccagacctccaacaacattccagctgatatcgtctttgttttaaaggacaagccccacaatatctttaagagagatggctctgatgtcatttatcctgccaggatcagcctccgggaggctctgtgtggctgcacagtgaacgtccccactctggacggcaggacgatacccgtcgtattcaaagatgttatcaggcctggcatgcggcgaaaagttcctggagaaggcctccccctccccaaaacacccgagaaacgtggggacctcattattgagtttgaagtgatcttccccgaaaggattccccagacatcaagaaccgtacttgagcaggttcttccaatatagctatctgagctccccaaggactgaccagggacctttccagagctcaaggatttctggacctttctaccagttgtggaccatgagagggtgggagggcccagggagggctttcgtactgctgaatgttttccagagcatatattacaatctttcaaagtcgcacactagacttcagtggtttttcgagctatagggcatcaggtggtgggaacagcaggaaaaggcattccagtctgccccactgggtctggcagccctcccgggatgggcccacatccacctccagtccctggccaggggtgagaggcagaccagcagatggacttgatccctctgtgtctttttgcttctggctggtagataatgtcaacctgcagtcttgattcccagaccctgtacactcctccttttctgttgtgtgatcagtttgtgctttattctgtatttgtctcccatgtcttgctcttctcctggagaattctgtcttctctttggccatctcaaattgagaacctaaactattcctgcagaactgcctggttggcgtccacaagcaatacctctcgttccagcaggaccaagggagccagcctccagtgagtgactccagcaagtgcagccacctctcccttgatggtctgggagcctggcctcagcaaggggccttcctgacctctggctccagtgaagctgaatgtcctcactttgtgggtcacactctttacatttctgtaaggcaatcttggcacacgtggggcttaccagtggcccaggtaattttttgtttcatggactatggactctttcaaagggatctgatccttttgaattttgcacagccctagatacaatcccttttgataaaagggtctttgcttctgattacaggagcactgtggaacgtctgtaaatatgtttttataattccatgtatagttggtgtacactcaaaacctgtccccggcagccagtgctctctgtatagggccataatggaattctgaagaaatcttggggagggaaggggagttggaacaaatgtctgttccctggaggccagtccagtgctcagacctttagactcattgtaagttgccactgccaacatgagaccaaagtgtgtgactagtcaatgaagtgcgacagcattaaagactgatgctaaacctca

SEQ ID NO: 424183 - DNA, 2223 bp, Homo sapiens
cgctgtggaaaccaaggtaagcgacggttaggccagacgcgggggcggggtaagaagttgagtgacaggcaaggcagcatccacatgacaggcggcgccgaaggggtaaattctgagatcctgcccctgagctttcatgagctgttgaaccatctggaattcacaggcctgtcatgagagacacgatgagaagtccttaaaggtagatcactgattcacaggggagcaggcggaggcaaggcctaaaggggagtggccccagtggcggtagcggcggtggtgccaatggtacctctttcagctacacattccatggagaccctcatgccatgtttgctgagttcttcggtggcagaaatccctttgacaccttttttgggcagcggaacggggaggaaggcatggacattgatgacccattctctggcttccctatgggcatgggtggcttcaccaacgtgaactttggccgctcccgctctgcccaagagcccgcccgaaagaagcaagatcccccagtcacccacgaccttcgagtctcccttgaagagatctacagcggctgtaccaagaagatgaaaatctcccacaagcggctaaaccccgacggaaagagcattcgaaacgaagacaaaatattgaccatcgaagtgaagaaggggtggaaagaaggaaccaaaatcactttccccaaggaaggagaccagacctccaacaacattccagctgatatcgtctttgttttaaaggacaagccccacaatatctttaagagagatggctctgatgtcatttatcctgccaggatcagcctccgggaggctctgtgtggctgcacagtgaacgtccccactctggacggcaggacgatacccgtcgtattcaaagatgttatcaggcctggcatgcggcgaaaagttcctggagaaggcctccccctccccaaaacacccgagaaacgtggggacctcattattgagtttgaagtgatcttccccgaaaggattccccagacatcaagaaccgtacttgagcaggttcttccaatatagctatctgagctccccaaggactgaccagggacctttccagagctcaaggatttctggacctttctaccagttgtggaccatgagagggtgggagggcccagggagggctttcgtactgctgaatgttttccagagcatatattacaatctttcaaagtcgcacactagacttcagtggtttttcgagctatagggcatcaggtggtgggaacagcaggaaaaggcattccagtctgccccactgggtctggcagccctcccgggatgggcccacatccacctccagtccctggccaggggtgagaggcagaccagcagatggacttgatccctctgtgtctttttgcttctggctggtagataatgtcaacctgcagtcttgattcccagaccctgtacactcctccttttctgttgtgtgatcagtttgtgctttattctgtatttgtctcccatgtcttgctcttctcctggagaattctgtcttctctttggccatctcaaattgagaacctaaactattcctgcagaactgcctggttggcgtccacaagcaatacctctcgttccagcaggaccaagggagccagcctccagtgagtgactccagcaagtgcagccacctctcccttgatggtctgggagcctggcctcagcaaggggccttcctgacctctggctccagtgaagctgaatgtcctcactttgtgggtcacactctttacatttctgtaaggcaatcttggcacacgtggggcttaccagtggcccaggtaattttttgtttcatggactatggactctttcaaagggatctgatccttttgaattttgcacagccctagatacaatcccttttgataaaagggtctttgcttctgattacaggagcactgtggaacgtctgtaaatatgtttttataattccatgtatagttggtgtacactcaaaacctgtccccggcagccagtgctctctgtatagggccataatggaattctgaagaaatcttggggagggaaggggagttggaacaaatgtctgttccctggaggccagtccagtgctcagacctttagactcattgtaagttgccactgccaacatgagaccaaagtgtgtgactagtcaatgaagtgcgacagcattaaagactgatgctaaacctca

SEQ ID NO: 424184 - DNA, 2357 bp, Homo sapiens
ggcggccgttgacggcgaggccccgccccggatgtcgcgtgtcgctgaaagggcggcggcgattggccggcgccgcgggggcgggcggggcggaaggttctggagggggctggcgggctctggaagcttccgccggacgggtatatagagtccgggactggtcggcggcggagccgggggacggcgacagcgggtcggcgggccgcaggagggggtcatgggtaaagactactaccagacgttgggcctggcccgcggcgcgtcggacgaggagatcaagcgggcctaccgccgccaggcgctgcgctaccacccggacaagaacaaggagcccggcgccgaggagaagttcaaggagatcgctgaggcctacgacgtgctcagcgacccgcgcaagcgcgagatcttcgaccgctacggggaggaaggcctaaaggggagtggccccagtggcggtagcggcggtggtgccaatggtacctctttcagctacacattccatggagaccctcatgccatgtttgctgagttcttcggtggcagaaatccctttgacaccttttttgggcagcggaacggggaggaaggcatggacattgatgacccattctctggcttccctatgggcatgggtggcttcaccaacgtgaactttggccgctcccgctctgcccaagagcccgcccgaaagaagcaagatcccccagtcacccacgaccttcgagtctcccttgaagagatctacagcggctgtaccaagaagatgaaaatctcccacaagcggctaaaccccgacggaaagagcattcgaaacgaagacaaaatattgaccatcgaagtgaagaaggggtggaaagaaggaaccatcgtctttgttttaaaggacaagccccacaatatctttaagagagatggctctgatgtcatttatcctgccaggatcagcctccgggaggctctgtgtggctgcacagtgaacgtccccactctggacggcaggacgatacccgtcgtattcaaagatgttatcaggcctggcatgcggcgaaaagttcctggagaaggcctccccctccccaaaacacccgagaaacgtggggacctcattattgagtttgaagtgatcttccccgaaaggattccccagacatcaagaaccgtacttgagcaggttcttccaatatagctatctgagctccccaaggactgaccagggacctttccagagctcaaggatttctggacctttctaccagttgtggaccatgagagggtgggagggcccagggagggctttcgtactgctgaatgttttccagagcatatattacaatctttcaaagtcgcacactagacttcagtggtttttcgagctatagggcatcaggtggtgggaacagcaggaaaaggcattccagtctgccccactgggtctggcagccctcccgggatgggcccacatccacctccagtccctggccaggggtgagaggcagaccagcagatggacttgatccctctgtgtctttttgcttctggctggtagataatgtcaacctgcagtcttgattcccagaccctgtacactcctccttttctgttgtgtgatcagtttgtgctttattctgtatttgtctcccatgtcttgctcttctcctggagaattctgtcttctctttggccatctcaaattgagaacctaaactattcctgcagaactgcctggttggcgtccacaagcaatacctctcgttccagcaggaccaagggagccagcctccagtgagtgactccagcaagtgcagccacctctcccttgatggtctgggagcctggcctcagcaaggggccttcctgacctctggctccagtgaagctgaatgtcctcactttgtgggtcacactctttacatttctgtaaggcaatcttggcacacgtggggcttaccagtggcccaggtaattttttgtttcatggactatggactctttcaaagggatctgatccttttgaattttgcacagccctagatacaatcccttttgataaaagggtctttgcttctgattacaggagcactgtggaacgtctgtaaatatgtttttataattccatgtatagttggtgtacactcaaaacctgtccccggcagccagtgctctctgtatagggccataatggaattctgaagaaatcttggggagggaaggggagttggaacaaatgtctgttccctggaggccagtccagtgctcagacctttagactcattgtaagttgccactgccaacatgagaccaaagtgtgtgactagtcaatgaagtgcgacagcattaaagactgatgctaaacctca

SEQ ID NO: 424185 - DNA, 2052 bp, Homo sapiens
ggcggccgttgacggcgaggccccgccccggatgtcgcgtgtcgctgaaagggcggcggcgattggccggcgccgcgggggcgggcggggcggaaggttctggagggggctggcgggctctggaagcttccgccggacgggtatatagagtccgggactggtcggcggcggagccgggggacggcgacagcgggtcggcgggccgcaggagggggtcatgggtaaagactactaccagacgttgggcctggcccgcggcgcgtcggacgaggagatcaagcgggcctaccgccgccaggcgctgcgctaccacccggacaagaacaaggagcccggcgccgaggagaagttcaaggagatcgctgaggcctacgacgtgctcagcgacccgcgcaagcgcgagatcttcgaccgctacggggaggaaggcctaaaggggagtggccccagtggcggtagcggcggtggtgccaatggtacctctttcagctacacattccatggagaccctcatgccatgtttgctgagttcttcggtggcagaaatccctttgacaccttttttgggcagcggaacggggaggaaggcatggacattgatgacccattctctggcttccctatgggcatgggtggcttcaccaacgtgaactttggccgctcccgctctgcccaagagcccgcccgaaagaagcaagatcccccagtcacccacgaccttcgagtctcccttgaagagatctacagcggctgtaccaagaagatgaaaatctcccacaagcggctaaaccccgacggaaagagcattcgaaacgaagacaaaatattgaccatcgaagtgaagaaggggtggaaagaaggaaccaaaatcactttccccaaggaaggagaccagacctccaacaacattccagctgatatcgtctttgttttaaaggacaagccccacaatatctttaagagagatggctctgatgtcatttatcctgccaggatcagcctccgggaggctctgtgtggctgcacagtgaacgtccccactctggacggcaggacgatacccgtcgtattcaaagatgttatcaggcctggcatgcggcgaaaagttcctggagaaggcctccccctccccaaaacacccgagaaacgtggggacctcattattgagtttgaagtgatcttccccgaaaggattccccagacatcaagaaccgtacttgagcaggttcttccaatatagctatctgagctccccaaggactgaccagggacctttccagagctcaaggatttctggacctttctaccagttgtggaccatgagagggtgggagggcccagggagggctttcgtactgctgaatgttttccagagcatatattacaatctttcaaagtcgcacactagacttcagtggtttttcgagctatagggcatcaggtggtgggaacagcaggaaaaggcattcagcctccagtgagtgactccagcaagtgcagccacctctcccttgatggtctgggagcctggcctcagcaaggggccttcctgacctctggctccagtgaagctgaatgtcctcactttgtgggtcacactctttacatttctgtaaggcaatcttggcacacgtggggcttaccagtggcccaggtaattttttgtttcatggactatggactctttcaaagggatctgatccttttgaattttgcacagccctagatacaatcccttttgataaaagggtctttgcttctgattacaggagcactgtggaacgtctgtaaatatgtttttataattccatgtatagttggtgtacactcaaaacctgtccccggcagccagtgctctctgtatagggccataatggaattctgaagaaatcttggggagggaaggggagttggaacaaatgtctgttccctggaggccagtccagtgctcagacctttagactcattgtaagttgccactgccaacatgagaccaaagtgtgtgactagtcaatgaagtgcgacagcattaaagactgatgctaaacctca

SEQ ID NO: 424186 - DNA, 2330 bp, Homo sapiens
ggcggccgttgacggcgaggccccgccccggatgtcgcgtgtcgctgaaagggcggcggcgattggccggcgccgcgggggcgggcggggcggaaggttctggagggggctggcgggctctggaagcttccgccggacgggtatatagagtccgggactggtcggcggcggagccgggggacggcgacagcgggtcggcgggccgcaggagggggtcatgggtaaagactactaccagacgttgggcctggcccgcggcgcgtcggacgaggagatcaagcgggcctaccgccgccaggcgctgcgctaccacccggacaagaacaaggagatcgctgaggcctacgacgtgctcagcgacccgcgcaagcgcgagatcttcgaccgctacggggaggaaggcctaaaggggagtggccccagtggcggtagcggcggtggtgccaatggtacctctttcagctacacattccatggagaccctcatgccatgtttgctgagttcttcggtggcagaaatccctttgacaccttttttgggcagcggaacggggaggaaggcatggacattgatgacccattctctggcttccctatgggcatgggtggcttcaccaacgtgaactttggccgctcccgctctgcccaagagcccgcccgaaagaagcaagatcccccagtcacccacgaccttcgagtctcccttgaagagatctacagcggctgtaccaagaagatgaaaatctcccacaagcggctaaaccccgacggaaagagcattcgaaacgaagacaaaatattgaccatcgaagtgaagaaggggtggaaagaaggaaccatcgtctttgttttaaaggacaagccccacaatatctttaagagagatggctctgatgtcatttatcctgccaggatcagcctccgggaggctctgtgtggctgcacagtgaacgtccccactctggacggcaggacgatacccgtcgtattcaaagatgttatcaggcctggcatgcggcgaaaagttcctggagaaggcctccccctccccaaaacacccgagaaacgtggggacctcattattgagtttgaagtgatcttccccgaaaggattccccagacatcaagaaccgtacttgagcaggttcttccaatatagctatctgagctccccaaggactgaccagggacctttccagagctcaaggatttctggacctttctaccagttgtggaccatgagagggtgggagggcccagggagggctttcgtactgctgaatgttttccagagcatatattacaatctttcaaagtcgcacactagacttcagtggtttttcgagctatagggcatcaggtggtgggaacagcaggaaaaggcattccagtctgccccactgggtctggcagccctcccgggatgggcccacatccacctccagtccctggccaggggtgagaggcagaccagcagatggacttgatccctctgtgtctttttgcttctggctggtagataatgtcaacctgcagtcttgattcccagaccctgtacactcctccttttctgttgtgtgatcagtttgtgctttattctgtatttgtctcccatgtcttgctcttctcctggagaattctgtcttctctttggccatctcaaattgagaacctaaactattcctgcagaactgcctggttggcgtccacaagcaatacctctcgttccagcaggaccaagggagccagcctccagtgagtgactccagcaagtgcagccacctctcccttgatggtctgggagcctggcctcagcaaggggccttcctgacctctggctccagtgaagctgaatgtcctcactttgtgggtcacactctttacatttctgtaaggcaatcttggcacacgtggggcttaccagtggcccaggtaattttttgtttcatggactatggactctttcaaagggatctgatccttttgaattttgcacagccctagatacaatcccttttgataaaagggtctttgcttctgattacaggagcactgtggaacgtctgtaaatatgtttttataattccatgtatagttggtgtacactcaaaacctgtccccggcagccagtgctctctgtatagggccataatggaattctgaagaaatcttggggagggaaggggagttggaacaaatgtctgttccctggaggccagtccagtgctcagacctttagactcattgtaagttgccactgccaacatgagaccaaagtgtgtgactagtcaatgaagtgcgacagcattaaagactgatgctaaacctca

SEQ ID NO: 424187 - DNA, 1966 bp, Homo sapiens
ggcggccgttgacggcgaggccccgccccggatgtcgcgtgtcgctgaaagggcggcggcgattggccggcgccgcgggggcgggcggggcggaaggttctggagggggctggcgggctctggaagcttccgccggacgggtatatagagtccgggactggtcggcggcggagccgggggacggcgacagcgggtcggcgggccgcaggagggggtcatgggtaaagactactaccagacgttgggcctggcccgcggcgcgtcggacgaggagatcaagcgggcctaccgccgccaggcgctgcgctaccacccggacaagaacaaggagcccggcgccgaggagaagttcaaggagatcgctgaggcctacgacgtgctcagcgacccgcgcaagcgcgagatcttcgaccgctacggggaggaaggcctaaaggggagtggccccagtggcggtagcggcggtggtgccaatggtacctctttcagctacacattccatggagaccctcatgccatgtttgctgagttcttcggtggcagaaatccctttgacaccttttttgggcagcggaacggggaggaaggcatggacattgatgacccattctctggcttccctatgggcatgggtggcttcaccaacgtgaactttggccgctccctggagaaggcctccccctccccaaaacacccgagaaacgtggggacctcattattgagtttgaagtgatcttccccgaaaggattccccagacatcaagaaccgtacttgagcaggttcttccaatatagctatctgagctccccaaggactgaccagggacctttccagagctcaaggatttctggacctttctaccagttgtggaccatgagagggtgggagggcccagggagggctttcgtactgctgaatgttttccagagcatatattacaatctttcaaagtcgcacactagacttcagtggtttttcgagctatagggcatcaggtggtgggaacagcaggaaaaggcattccagtctgccccactgggtctggcagccctcccgggatgggcccacatccacctccagtccctggccaggggtgagaggcagaccagcagatggacttgatccctctgtgtctttttgcttctggctggtagataatgtcaacctgcagtcttgattcccagaccctgtacactcctccttttctgttgtgtgatcagtttgtgctttattctgtatttgtctcccatgtcttgctcttctcctggagaattctgtcttctctttggccatctcaaattgagaacctaaactattcctgcagaactgcctggttggcgtccacaagcaatacctctcgttccagcaggaccaagggagccagcctccagtgagtgactccagcaagtgcagccacctctcccttgatggtctgggagcctggcctcagcaaggggccttcctgacctctggctccagtgaagctgaatgtcctcactttgtgggtcacactctttacatttctgtaaggcaatcttggcacacgtggggcttaccagtggcccaggtaattttttgtttcatggactatggactctttcaaagggatctgatccttttgaattttgcacagccctagatacaatcccttttgataaaagggtctttgcttctgattacaggagcactgtggaacgtctgtaaatatgtttttataattccatgtatagttggtgtacactcaaaacctgtccccggcagccagtgctctctgtatagggccataatggaattctgaagaaatcttggggagggaaggggagttggaacaaatgtctgttccctggaggccagtccagtgctcagacctttagactcattgtaagttgccactgccaacatgagaccaaagtgtgtgactagtcaatgaagtgcgacagcattaaagactgatgctaaacctca

SEQ ID NO: 424188 - DNA, 1346 bp, Homo sapiens
cgaggatctgcataaacagggttcctgacctcaccgaaaagttcctggagaaggcctccccctccccaaaacacccgagaaacgtggggacctcattattgagtttgaagtgatcttccccgaaaggattccccagacatcaagaaccgtacttgagcaggttcttccaatatagctatctgagctccccaaggactgaccagggacctttccagagctcaaggatttctggacctttctaccagttgtggaccatgagagggtgggagggcccagggagggctttcgtactgctgaatgttttccagagcatatattacaatctttcaaagtcgcacactagacttcagtggtttttcgagctatagggcatcaggtggtgggaacagcaggaaaaggcattccagtctgccccactgggtctggcagccctcccgggatgggcccacatccacctccagtccctggccaggggtgagaggcagaccagcagatggacttgatccctctgtgtctttttgcttctggctggtagataatgtcaacctgcagtcttgattcccagaccctgtacactcctccttttctgttgtgtgatcagtttgtgctttattctgtatttgtctcccatgtcttgctcttctcctggagaattctgtcttctctttggccatctcaaattgagaacctaaactattcctgcagaactgcctggttggcgtccacaagcaatacctctcgttccagcaggaccaagggagccagcctccagtgagtgactccagcaagtgcagccacctctcccttgatggtctgggagcctggcctcagcaaggggccttcctgacctctggctccagtgaagctgaatgtcctcactttgtgggtcacactctttacatttctgtaaggcaatcttggcacacgtggggcttaccagtggcccaggtaattttttgtttcatggactatggactctttcaaagggatctgatccttttgaattttgcacagccctagatacaatcccttttgataaaagggtctttgcttctgattacaggagcactgtggaacgtctgtaaatatgtttttataattccatgtatagttggtgtacactcaaaacctgtccccggcagccagtgctctctgtatagggccataatggaattctgaagaaatcttggggagggaaggggagttggaacaaatgtctgttccctggaggccagtccagtgctcagacctttagactcattgtaagttgccactgccaacatgagaccaaagtgtgtgactagtcaatgaagtgcgacagcattaaagactgatgctaaacctca

SEQ ID NO: 424189 - DNA, 1376 bp, Homo sapiens
  misc_feature (48)..(49): n is a, c, g, or t
  misc_feature (56)..(56): n is a, c, g, or t
agagctggccgggattataaatgaacacatgctccttcttctgtgtgnntcagttngtgctttattctgtatttgtctcccatgtcttgctcttctcctggagaattctgtcttctctttggccattattgagtttgaagtgatcttccccgaaaggattccccagacatcaagaaccgtacttgagcaggttcttccaatatagctatctgagctccccaaggactgaccagggacctttccagagctcaaggatttctggacctttctaccagttgtggaccatgagagggtgggagggcccagggagggctttcgtactgctgaatgttttccagagcatatattacaatctttcaaagtcgcacactagacttcagtggtttttcgagctatagggcatcaggtggtgggaacagcaggaaaaggcattccagtctgccccactgggtctggcagccctcccgggatgggcccacatccacctccagtccctggccaggggtgagaggcagaccagcagatggacttgatccctctgtgtctttttgcttctggctggtagataatgtcaacctgcagtcttgattcccagaccctgtacactcctccttttctgttgtgtgatcagtttgtgctttattctgtatttgtctcccatgtcttgctcttctcctggagaattctgtcttctctttggccatctcaaattgagaacctaaactattcctgcagaactgcctggttggcgtccacaagcaatacctctcgttccagcaggaccaagggagccagcctccagtgagtgactccagcaagtgcagccacctctcccttgatggtctgggagcctggcctcagcaaggggccttcctgacctctggctccagtgaagctgaatgtcctcactttgtgggtcacactctttacatttctgtaaggcaatcttggcacacgtggggcttaccagtggcccaggtaattttttgtttcatggactatggactctttcaaagggatctgatccttttgaattttgcacagccctagatacaatcccttttgataaaagggtctttgcttctgattacaggagcactgtggaacgtctgtaaatatgtttttataattccatgtatagttggtgtacactcaaaacctgtccccggcagccagtgctctctgtatagggccataatggaattctgaagaaatcttggggagggaaggggagttggaacaaatgtctgttccctggaggccagtccagtgctcagacctttagactcattgtaagttgccactgccaacatgagaccaaagtgtgtgactagtcaatgaagtgcgacagcattaaagactgatgctaaacctca

SEQ ID NO: 424190 - DNA, 1324 bp, Homo sapiens
ataggctaggtacgaggctgggtttaaattcggccgaggctccccaaaacactcgagaaacgtggggacctcattattgagtttgaagtgatcttccccgaaaggattccccagacatcaagaaccgtacttgagcaggttcttccaatatagctatctgagctccccaaggactgaccagggacctttccagagctcaaggatttctggacctttctaccagttgtggaccatgagagggtgggagggcccagggagggctttcgtactgctgaatgttttccagagcatatattacaatctttcaaagtcgcacactagacttcagtggtttttcgagctatagggcatcaggtggtgggaacagcaggaaaaggcattccagtctgccccactgggtctggcagccctcccgggatgggcccacatccacctccagtccctggccaggggtgagaggcagaccagcagatggacttgatccctctgtgtctttttgcttctggctggtagataatgtcaacctgcagtcttgattcccagaccctgtacactcctccttttctgttgtgtgatcagtttgtgctttattctgtatttgtctcccatgtcttgctcttctcctggagaattctgtcttctctttggccatctcaaattgagaacctaaactattcctgcagaactgcctggttggcgtccacaagcaatacctctcgttccagcaggaccaagggagccagcctccagtgagtgactccagcaagtgcagccacctctcccttgatggtctgggagcctggcctcagcaaggggccttcctgacctctggctccagtgaagctgaatgtcctcactttgtgggtcacactctttacatttctgtaaggcaatcttggcacacgtggggcttaccagtggcccaggtaattttttgtttcatggactatggactctttcaaagggatctgatccttttgaattttgcacagccctagatacaatcccttttgataaaagggtctttgcttctgattacaggagcactgtggaacgtctgtaaatatgtttttataattccatgtatagttggtgtacactcaaaacctgtccccggcagccagtgctctctgtatagggccataatggaattctgaagaaatcttggggagggaaggggagttggaacaaatgtctgttccctggaggccagtccagtgctcagacctttagactcattgtaagttgccactgccaacatgagaccaaagtgtgtgactagtcaatgaagtgcgacagcattaaagactgatgctaaacctca

SEQ ID NO: 424191 - DNA, 1635 bp, Homo sapiens
ggcggccgttgacggcgaggccccgccccggatgtcgcgtgtcgctgaaagggcggcggcgattggccggcgccgcgggggcgggcggggcggaaggttctggagggggctggcgggctctggaagcttccgccggacgggtatatagagtccgggactggtcggcggcggagccgggggacggcgacagcgggtcggcgggccgcaggagggggtcatgggtaaagactactaccagacgttgggcctggcccgcggcgcgtcggacgaggagatcaagcgggcctaccgccgccaggcgctgcgctaccacccggacaagaacaaggagcccggcgccgaggagaagttcaaggagatcgctgaggcctacgacgtgctcagcgacccgcgcaagcgcgagatcttcgaccgctacggggaggaaggcctaaaggggagtggccccagtggcggtagcggcggtggtgccaatggtacctctttcagctacacattccatggagaccctcatgccatgtttgctgagttcttcggtggcagaaatccctttgacaccttttttgggcagcggaacggggaggaaggcatggacattgatgacccattctctggcttccctatgggcatgggtggcttcaccaacgtgaactttggccgctcccgctctgcccaagagcccgcccgaaagaagcaagatcccccagtcacccacgaccttcgagtctcccttgaagagatctacagcggctgtaccaagaagatgaaaatctcccacaagcggctaaaccccgacggaaagagcattcgaaacgaagacaaaatattgaccatcgaagtgaagaaggggtggaaagaaggaaccaaaatcactttccccaaggaaggagaccagacctccaacaacattccagctgatatcgtctttgttttaaaggacaagccccacaatatctttaagagagatggctctgatgtcatttatcctgccaggatcagcctccgggaggctctgtgtggctgcacagtgaacgtccccactctggacggcaggacgatacccgtcgtattcaaagatgttatcaggcctggcatgcggcgaaaagttcctggagaaggcctccccctccccaaaacacccgagaaacgtggggacctcattattgagtttgaagtgatcttccccgaaaggattccccagacatcaagaaccgtacttgagcaggttcttccaatatagctatctgagctccccaaggactgaccagggacctttccagagctcaaggatttctggacctttctaccagttgtggaccatgagagggtgggagggcccagggagggctttcgtactgctgaatgttttccagagcatatattacaatctttcaaagtcgcacactagacttcagtggtttttcgagctatagggcatcaggtggtgggaacagcaggaaaaggcattagtgctcagacctttagactcattgtaagttgccactgccaacatgagaccaaagtgtgtgactagtcaatgaagtgcgacagcattaaagactgatgctaaacctcaaaaaatatctccaggcgtgaccacatacccattttcccctttaactaagtcctttcact

SEQ ID NO: 424192 - DNA, 1214 bp, Homo sapiens
gcagagctcaaggatttctggaaaggtcccggtcagtcctggggagctcagatagctatatggaagaccagggacctttccagagctcaaggatttctggacctttctaccagttgtggaccatgagagggtgggagggcccagggagggctttcgtactgctgaatgttttccagagcatatattacaatctttcaaagtcgcacactagacttcagtggtttttcgagctatagggcatcaggtggtgggaacagcaggaaaaggcattccagtctgccccactgggtctggcagccctcccgggatgggcccacatccacctccagtccctggccaggggtgagaggcagaccagcagatggacttgatccctctgtgtctttttgcttctggctggtagataatgtcaacctgcagtcttgattcccagaccctgtacactcctccttttctgttgtgtgatcagtttgtgctttattctgtatttgtctcccatgtcttgctcttctcctggagaattctgtcttctctttggccatctcaaattgagaacctaaactattcctgcagaactgcctggttggcgtccacaagcaatacctctcgttccagcaggaccaagggagccagcctccagtgagtgactccagcaagtgcagccacctctcccttgatggtctgggagcctggcctcagcaaggggccttcctgacctctggctccagtgaagctgaatgtcctcactttgtgggtcacactctttacatttctgtaaggcaatcttggcacacgtggggcttaccagtggcccaggtaattttttgtttcatggactatggactctttcaaagggatctgatccttttgaattttgcacagccctagatacaatcccttttgataaaagggtctttgcttctgattacaggagcactgtggaacgtctgtaaatatgtttttataattccatgtatagttggtgtacactcaaaacctgtccccggcagccagtgctctctgtatagggccataatggaattctgaagaaatcttggggagggaaggggagttggaacaaatgtctgttccctggaggccagtccagtgctcagacctttagactcattgtaagttgccactgccaacatgagaccaaagtgtgtgactagtcaatgaagtgcgacagcattaaagactgatgctaaacctca

SEQ ID NO: 424193 - DNA, 1266 bp, Homo sapiens
caccttttcaaggacaacttcgcacctctcaggttcgtcacaaatattggactacctacctggggacactggggaactcacgatcagtccgttcgcatgttaacatgcgaacggactgaccagggacctttccagagctcaaggatttctggacctttctaccagttgtggaccatgagagggtgggagggcccagggagggctttcgtactgctgaatgttttccagagcatatattacaatctttcaaagtcgcacactagacttcagtggtttttcgagctatagggcatcaggtggtgggaacagcaggaaaaggcattccagtctgccccactgggtctggcagccctcccgggatgggcccacatccacctccagtccctggccaggggtgagaggcagaccagcagatggacttgatccctctgtgtctttttgcttctggctggtagataatgtcaacctgcagtcttgattcccagaccctgtacactcctccttttctgttgtgtgatcagtttgtgctttattctgtatttgtctcccatgtcttgctcttctcctggagaattctgtcttctctttggccatctcaaattgagaacctaaactattcctgcagaactgcctggttggcgtccacaagcaatacctctcgttccagcaggaccaagggagccagcctccagtgagtgactccagcaagtgcagccacctctcccttgatggtctgggagcctggcctcagcaaggggccttcctgacctctggctccagtgaagctgaatgtcctcactttgtgggtcacactctttacatttctgtaaggcaatcttggcacacgtggggcttaccagtggcccaggtaattttttgtttcatggactatggactctttcaaagggatctgatccttttgaattttgcacagccctagatacaatcccttttgataaaagggtctttgcttctgattacaggagcactgtggaacgtctgtaaatatgtttttataattccatgtatagttggtgtacactcaaaacctgtccccggcagccagtgctctctgtatagggccataatggaattctgaagaaatcttggggagggaaggggagttggaacaaatgtctgttccctggaggccagtccagtgctcagacctttagactcattgtaagttgccactgccaacatgagaccaaagtgtgtgactagtcaatgaagtgcgacagcattaaagactgatgctaaacctca

SEQ ID NO: 424194 - DNA, 1196 bp, Homo sapiens
  misc_feature (43)..(43): n is a, c, g, or t
aattcgcggccgcgtcgacacggactgcgagaagacgacagangggggaccagggacctttccagagctcaaggatttctggacctttctaccagttgtggaccatgagagggtgggagggcccagggagggctttcgtactgctgaatgttttccagagcatatattacaatctttcaaagtcgcacactagacttcagtggtttttcgagctatagggcatcaggtggtgggaacagcaggaaaaggcattccagtctgccccactgggtctggcagccctcccgggatgggcccacatccacctccagtccctggccaggggtgagaggcagaccagcagatggacttgatccctctgtgtctttttgcttctggctggtagataatgtcaacctgcagtcttgattcccagaccctgtacactcctccttttctgttgtgtgatcagtttgtgctttattctgtatttgtctcccatgtcttgctcttctcctggagaattctgtcttctctttggccatctcaaattgagaacctaaactattcctgcagaactgcctggttggcgtccacaagcaatacctctcgttccagcaggaccaagggagccagcctccagtgagtgactccagcaagtgcagccacctctcccttgatggtctgggagcctggcctcagcaaggggccttcctgacctctggctccagtgaagctgaatgtcctcactttgtgggtcacactctttacatttctgtaaggcaatcttggcacacgtggggcttaccagtggcccaggtaattttttgtttcatggactatggactctttcaaagggatctgatccttttgaattttgcacagccctagatacaatcccttttgataaaagggtctttgcttctgattacaggagcactgtggaacgtctgtaaatatgtttttataattccatgtatagttggtgtacactcaaaacctgtccccggcagccagtgctctctgtatagggccataatggaattctgaagaaatcttggggagggaaggggagttggaacaaatgtctgttccctggaggccagtccagtgctcagacctttagactcattgtaagttgccactgccaacatgagaccaaagtgtgtgactagtcaatgaagtgcgacagcattaaagactgatgctaaacctca

SEQ ID NO: 424195 - DNA, 1479 bp, Homo sapiens
ggcggccgttgacggcgaggccccgccccggatgtcgcgtgtcgctgaaagggcggcggcgattggccggcgccgcgggggcgggcggggcggaaggttctggagggggctggcgggctctggaagcttccgccggacgggtatatagagtccgggactggtcggcggcggagccgggggacggcgacagcgggtcggcgggccgcaggagggggtcatgggtaaagactactaccagacgttgggcctggcccgcggcgcgtcggacgaggagatcaagcgggcctaccgccgccaggcgctgcgctaccacccggacaagaacaaggagcccggcgccgaggagaagttcaaggagatcgctgaggcctacgacgtgctcagcgacccgcgcaagcgcgagatcttcgaccgctacggggaggaaggcctaaaggggagtggccccagtggcggtagcggcggtggtgccaatggtacctctttcagctacacattccatggagaccctcatgccatgtttgctgagttcttcggtggcagaaatccctttgacaccttttttgggcagcggaacggggaggaaggcatggacattgatgacccattctctggcttccctatgggcatgggtggcttcaccaacgtgaactttggccgctcccgctctgcccaagagcccgcccgaaagaagcaagatcccccagtcacccacgaccttcgagtctcccttgaagagatctacagcggctgtaccaagaagatgaaaatctcccacaagcggctaaaccccgacggaaagagcattcgaaacgaagacaaaatattgaccatcgaagtgaagaaggggtggaaagaaggaaccaaaatcactttccccaaggaaggagaccagacctccaacaacattccagctgatatcgtctttgttttaaaggacaagccccacaatatctttaagagagatggctctgatgtcatttatcctgccaggatcagcctccgggaggctctgtgtggctgcacagtgaacgtccccactctggacggcaggacgatacccgtcgtattcaaagatgttatcaggcctggcatgcggcgaaaagttcctggagaaggcctccccctccccaaaacacccgagaaacgtggggacctcattattgagtttgaagtgatcttccccgaaaggattccccagacatcaagaaccgtacttgagcaggttcttccaatatagctatctgagctccccaaggactgaccagggacctttccagagctcaaggatttctggacctttctaccagttgtggaccatgagagggtgggagggcccagggagggctttcgtactgctgaatgttttccagtgctcagacctttagactcattgtaagttgccactgccaacatgagaccaaagtgtgtgactagtcaatgaagtgcgacagcattaaagactgatgctaaacctca

SEQ ID NO: 424196 - DNA, 1529 bp, Homo sapiens
ggcggccgttgacggcgaggccccgccccggatgtcgcgtgtcgctgaaagggcggcggcgattggccggcgccgcgggggcgggcggggcggaaggttctggagggggctggcgggctctggaagcttccgccggacgggtatatagagtccgggactggtcggcggcggagccgggggacggcgacagcgggtcggcgggccgcaggagggggtcatgggtaaagactactaccagacgttgggcctggcccgcggcgcgtcggacgaggagatcaagcgggcctaccgccgccaggcgctgcgctaccacccggacaagaacaaggagcccggcgccgaggagaagttcaaggagatcgctgaggcctacgacgtgctcagcgacccgcgcaagcgcgagatcttcgaccgctacggggaggaaggcctaaaggggagtggccccagtggcggtagcggcggtggtgccaatggtacctctttcagctacacattccatggagaccctcatgccatgtttgctgagttcttcggtggcagaaatccctttgacaccttttttgggcagcggaacggggaggaaggcatggacattgatgacccattctctggcttccctatgggcatgggtggcttcaccaacgtgaactttggccgctcccgctctgcccaagagcccgcccgaaagaagcaagatcccccagtcacccacgaccttcgagtctcccttgaagagatctacagcggctgtaccaagaagatgaaaatctcccacaagcggctaaaccccgacggaaagagcattcgaaacgaagacaaaatattgaccatcgaagtgaagaaggggtggaaagaaggaaccaaaatcactttccccaaggaaggagaccagacctccaacaacattccagctgatatcgtctttgttttaaaggacaagccccacaatatctttaagagagatggctctgatgtcatttatcctgccaggatcagcctccgggaggctctgtgtggctgcacagtgaacgtccccactctggacggcaggacgatacccgtcgtattcaaagatgttatcaggcctggcatgcggcgaaaagttcctggagaaggcctccccctccccaaaacacccgagaaacgtggggacctcattattgagtttgaagtgatcttccccgaaaggattccccagacatcaagaaccgtacttgagcaggttcttccaatatagctatctgagctccccaaggactgaccagggacctttccagagctcaaggatttctggacctttctaccagttgtggaccatgagaagttcttttgccccttttgggctttctcactgctgatgccttccgctccctttttccatctttcaaggggtacactaactccagggggttcagccttaagtatatcgtggtggcaccataagtactgcttggcatggttgaggcttccacaaatgctttaccctctggctttctattagatgtcacaatcgtgactgcaattct

SEQ ID NO: 424197 - DNA, 1324 bp, Homo sapiens
ggcggccgttgacggcgaggccccgccccggatgtcgcgtgtcgctgaaagggcggcggcgattggccggcgccgcgggggcgggcggggcggaaggttctggagggggctggcgggctctggaagcttccgccggacgggtatatagagtccgggactggtcggcggcggagccgggggacggcgacagcgggtcggcgggccgcaggagggggtcatgggtaaagactactaccagacgttgggcctggcccgcggcgcgtcggacgaggagatcaagcgggcctaccgccgccaggcgctgcgctaccacccggacaagaacaaggagcccggcgccgaggagaagttcaaggagatcgctgaggcctacgacgtgctcagcgacccgcgcaagcgcgagatcttcgaccgctacggggaggaaggcctaaaggggagtggccccagtggcggtagcggcggtggtgccaatggtacctctttcagctacacattccatggagaccctcatgccatgtttgctgagttcttcggtggcagaaatccctttgacaccttttttgggcagcggaacggggaggaaggcatggacattgatgacccattctctggcttccctatgggcatgggtggcttcaccaacgtgaactttggccgctcccgctctgcccaagagcccgcccgaaagaagcaagatcccccagtcacccacgaccttcgagtctcccttgaagagatctacagcggctgtaccaagaagatgaaaatctcccacaagcggctaaaccccgacggaaagagcattcgaaacgaagacaaaatattgaccatcgaagtgaagaaggggtggaaagaaggaaccaaaatcactttccccaaggaaggagaccagacctccaacaacattccagctgatatcgtctttgttttaaaggacaagccccacaatatctttaagagagatggctctgatgtcatttatcctgccaggatcagcctccgggaggctctgtgtggctgcacagtgaacgtccccactctggacggcaggacgatacccgtcgtattcaaagatgttatcaggcctggcatgcggcgaaaagttcctggagaaggcctccccctccccaaaacacccgagaaacgtggggacctgaaatcttggggagggaaggggagttggaacaaatgtctgttccctggaggccagtccagtgctcagacctttagactcattgtaagttgccactgccaacatgagaccaaagtgtgtgactagtcaatgaagtgcgacagcattaaagactgatgctaaacctca

SEQ ID NO: 424198 - DNA, 1000 bp, Homo sapiens
ggcggccgttgacggcgaggccccgccccggatgtcgcgtgtcgctgaaagggcggcggcgattggccggcgccgcgggggcgggcggggcggaaggttctggagggggctggcgggctctggaagcttccgccggacgggtatatagagtccgggactggtcggcggcggagccgggggacggcgacagcgggtcggcgggccgcaggagggggtcatgggtaaagactactaccagacgttgggcctggcccgcggcgcgtcggacgaggagatcaagcgggcctaccgccgccaggcgctgcgctaccacccggacaagaacaaggagcccggcgccgaggagaagttcaaggagatcgctgaggcctacgacgtgctcagcgacccgcgcaagcgcgagatcttcgaccgctacggggaggaaggcctaaaggggagtggccccagtggcggtagcggcggtggtgccaatggtacctctttcagctacacattccatggagaccctcatgccatgtttgctgagttcttcggtggcagaaatccctttgacaccttttttgggcagcggaacggggaggaaggcatggacattgatgacccattctctggcttccctatgggcatgggtggcttcaccaacgtgaactttggccgctcccgctctgcccaagagcccgcccgaaagaagcaagatcccccagtcacccacgaccttcgagtctcccttgaagagatctacagcggctgtaccaagaagatgaaaatctcccacaagcggtcgacggacgagcggtcgacggacgagcggtcgacggacgagcggtcgacggacgagcggtcgacggacgcgtccgtcgaccgctagttctatagggctccaaagcctgacctcttttttgtcaaatagagtgctgcctcctaattctgagagaaatagagtcatttggttcaagactcaacttctgcggtggaaccgtacacagatgtttctaac

SEQ ID NO: 424199 - DNA, 664 bp, Homo sapiens
gcggccgcctactactactactactactactgctcgaattcaagcttctaacgatgtacggggacatgtatagttggtgtacactcaaaacctgtccccggcagccagtgctctctgtatagggccataatggaattctgaagaaatcttggggagggaaggggagttggaacaaatgtctgttccctggaggccagtccagtgctcagacctttagactcattgtaagttgccactgccaacatgagaccaaagtgtgtgactagtcaatgaagtgcgacagcattaaagactgatgctaaacctcaaaaaaaaaaacagcttttttgtacacatacaatctaaatattacttctaaaatttcccaccgatctctttcaatttcctcgtaaaataaaaatttctgggggggggcctagaccccattttgccctttgggtgggtgcttttaaattacagtggccgttttttaaacccttgtgactcggaaaaacctttggttatcccaaattaatggcttttgaaaaattccccttttgccagttgcgtaatttcaaaagggcccctcactcatgatttttcccaaattttggcacccttgatgagctaatgggaatatttacccgctaaatttttgtaaaatcccgtataaatttttggtaaa

SEQ ID NO: 424200 - DNA, 1163 bp, Homo sapiens
ggcggccgttgacggcgaggccccgccccggatgtcgcgtgtcgctgaaagggcggcggcgattggccggcgccgcgggggcgggcggggcggaaggttctggagggggctggcgggctctggaagcttccgccggacgggtatatagagtccgggactggtcggcggcggagccgggggacggcgacagcgggtcggcgggccgcaggagggggtcatgggtaaagactactaccagacgttgggcctggcccgcggcgcgtcggacgaggagatcaagcgggcctaccgccgccaggcgctgcgctaccacccggacaagaacaaggagcccggcgccgaggagaagttcaaggagatcgctgaggcctacgacgtgctcagcgacccgcgcaagcgcgagatcttcgaccgctacggggaggaaggcctaaaggggagtggccccagtggcggtagcggcggtggtgccaatggtacctctttcagctacacattccatggagaccctcatgccatgtttgctgagttcttcggtggcagaaatccctttgacaccttttttgggcagcggaacggggaggaaggcatggacattgatgacccattctctggcttccctatgggcatgggtggcttcaccaacgtgaactttggccgctcccgctctgcccaagagcccgcccgaaagaagcaagatcccccagtcacccacgaccttcgagtctcccttgaagagatctacagcggctgtaccaagaagatgaaaatctcccacaagcggctaaaccccgacggaaagagcattcgaaacgaagacaaaatattgaccatcgaagtgaagaaggggtggaaagaaggaaccaaaatcactttccccaaggaaggagaccagacctccaacaacattccagctgatatcgtctttgttttaaaggacaagccccacaatatctttaagagagatggctctgatgtcatttatcctgccaggatcagcctccgggaggctctgtgtggctgcacagtgaacgtccccactctggacggcaggacgatacccgtcgtattcaaagatgttatcaggcctggcatgcggcgaaaagttccgttgaagccgtccaacggaactttcggcgcagccgcctgctccatcggcttcg

SEQ ID NO: 424201 - DNA, 734 bp, Homo sapiens
ggcggccgttgacggcgaggccccgccccggatgtcgcgtgtcgctgaaagggcggcggcgattggccggcgccgcgggggcgggcggggcggaaggttctggagggggctggcgggctctggaagcttccgccggacgggtatatagagtccgggactggtcggcggcggagccgggggacggcgacagcgggtcggcgggccgcaggagggggtcatgggtaaagactactaccagacgttgggcctggcccgcggcgcgtcggacgaggagatcaagcgggcctaccgccgccaggcgctgcgctaccacccggacaagaacaaggagcccggcgccgaggagaagttcaaggagatcgctgaggcctacgacgtgctcagcgacccgcgcaagcgcgagatcttcgaccgctacggggaggaaggcctaaaggggagtggccccagtggcggtagcggcggtggtgccaatggtacctctttcagctacacattccatggagaccctcacactaaggacgctgatgttatctgccgtgccagaaatacgccttgacaccttgcagggcgactggagcggagagccagtcatgcacagggatgacccgattctactcagtgtaccaacagacacgtggggagtcaacaacgttgtacctttgaccgcatacgcgcgcatgcatgcacacgagcacacgatcgttaggtcgtcatagattctcgacacatga

SEQ ID NO: 424202 - DNA, 6836 bp, Homo sapiens
tgggcatgactctctctcttgagtaggcacacactcccttttctcgggtgtgtactttttgctttgtgatacatctctgcactttcagtattttccaactcatccttaaattccttctcacaacagtgtcaagagcctggacgccagccaggattgaggtcctacgggtgtttggggacctccccaagcccacgagtatcaatggcagtatcaattgtctgtgacagtgattaaggagcaaaacacttggaacccacaagactcccagaaggtgaagttaagagctcccagactcataaggttattagaacagcaaactggcaccccaaagaactttacggagacttgcaacctatcaacaagttggatgagggattaaaagccttcaacaaccaacaaccccaagcatcaaactgaaggaaacattctaaccttcacagacagactggaggctggatggggacctggctgaagacatctggagaatgaaagttaagtaccagcttgcatttttgtgcccctagattatttttgcattttaaaataagaagcatcaaattgcgtgtctctgtgtaaaagttctagcaatttgttttaaggtgaacttattttggcttagggactacaaaaagagaaggtaattcctagggaaggaagaagagaaagaaatgaaaattagagaataagattattttgaatgacttcaggtagcgaggagtgtgtgtttgtgagtgtgtatttgagagacttggctcatgcctgtgggtcttctcttctagtatcagtgaggggagggattactgaagaagaaggggggaaaaaaaaagaaagaaatctgagctttctgggaggaaattcaaaggaaccaagagaaattaacttcgttctgcaaggactaaaatacagcaagaggagagaggtcaagcgagaagcgtgcgggaagcacatgccctggggaggcatagaagccacactggcagagcggccagcacaggtagccagcagaggcattcttggggctatttgaaaaagtttggtctgtgaacaaaacagtttccctggtgactgcaaatccattgctagctgcctctttctcgtctgcccatcactctggtgtggtacccagaagttgacttctggttctgtagaaagagctaggggaggtatgatgtgcttaaagatcctaagaataagcctggcgattttggctgggtgggcactctgttctgccaactctgagctgggctggacacgcaagaaatccttggttgagagggaacacctgaatcaggtgctgttggaaggagaacgttgttggctgggggccaaggttcgaagacccagagcttctccacagcatcacctctttggagtctaccccagcagggctgggaactacctaaggccctaccccgtgggggagcaagaaatccatcatacaggacgcagcaaaccagacactgaaggaaatgctgtgagccttgttcccccagacctgactgaaaatccagcaggactgaggggtgcagttgaagagccggctgccccatgggtaggggatagtcctattgggcaatctgagctgctgggagatgatgacgcttatctcggcaatcaaagatccaaggagtctctaggtgaggccgggattcagaaaggctcagccatggctgccactactaccaccgccattttcacaaccctgaacgaacccaaaccagagacccaaaggaggggctgggccaagtccaggcagcgtcgccaagtgtggaagaggcgggcggaagatgggcagggagactccggtatctcttcacatttccaaccttggcccaagcattcccttaaacacagggtcaaaaagagtccaccggaggaaagcaaccaaaatggtggagagggctcctaccgagaagcagagacctttaactcccaagtaggactgcccatcttatacttctctgggaggcgggagcggctgctgctgcgtccagaagtgctggctgagattccccgggaggcgttcacagtggaagcctgggttaaaccggagggaggacagaacaacccagccatcatcgcaggtgtgtttgataactgctcccacactgtcagtgacaaaggctgggccctggggatccgctcagggaaggacaagggaaagcgggatgctcgcttcttcttctccctctgcaccgaccgcgtgaagaaagccaccatcttgattagccacagtcgctaccaaccaggcacatggacccatgtggcagccacttacgatggacggcacatggccctgtatgtggatggcactcaggtggctagcagtctagaccagtctggtcccctgaacagccccttcatggcatcttgccgctctttgctcctggggggagacagctctgaggatgggcactatttccgtggacacctgggcacactggttttctggtcgaccgccctgccacaaagccattttcagcacagttctcagcattcaagtggggaggaggaagcgactgacttggtcctgacagcgagctttgagcctgtgaacacagagtgggttccctttagagatgagaagtacccacgacttgaggttctccagggctttgagccagagcctgagattctgtcgcctttgcagcccccactctgtgggcaaacagtctgtgacaatgtggaattgatctcccagtacaatggatactggccccttcggggagagaaggtgatacgctaccaggtggtgaacatctgtgatgatgagggcctaaaccccattgtgagtgaggagcagattcgtctgcagcacgaggcactgaatgaggccttcagccgctacaacatcagctggcagctgagcgtccaccaggtccacaattccaccctgcgacaccgggttgtgcttgtgaactgtgagcccagcaagattggcaatgaccattgtgaccccgagtgtgagcacccactcacaggctatgatgggggtgactgccgcctgcagggccgctgctactcctggaaccgcagggatgggctctgtcacgtggagtgtaacaacatgctgaacgactttgacgacggagactgctgcgacccccaggtggctgatgtgcgcaagacctgctttgaccctgactcacccaagagggcatacatgagtgtgaaggagctgaaggaggccctgcagctgaacagtactcacttcctcaacatctactttgccagctcagtgcgggaagaccttgcaggtgctgccacctggccttgggacaaggacgctgtcactcacctgggtggcattgtcctcagcccagcatattatgggatgcctggccacaccgacaccatgatccatgaagtgggacatgttctgggactctaccatgtctttaaaggagtcagtgaaagagaatcctgcaatgacccctgcaaggagacagtgccatccatggaaacgggagacctctgtgccgacaccgcccccactcccaagagtgagctgtgccgggaaccagagcccactagtgacacctgtggcttcactcgcttcccaggggctccgttcaccaactacatgagctacacggatgataactgcactgacaacttcactcctaaccaagtggcccgaatgcattgctatttggacctagtctatcagcagtggactgaaagcagaaagcccacccccatccccattccacctatggtcatcggacagaccaacaagtccctcactatccactggctgcctcctattagtggagttgtatatgacagggcctcaggcagcttgtgtggcgcttgcactgaagatgggacctttcgtcagtatgtgcacacagcttcctcccggcgggtgtgtgactcctcaggttattggaccccagaggaggctgtggggcctcctgatgtggatcagccctgcgagccaagcttacaggcctggagccctgaggtccacctgtaccacatgaacatgacggtcccctgccccacagaaggctgtagcttggagctgctcttccaacacccggtccaagccgacaccctcaccctgtgggtcacttccttcttcatggagtcctcgcaggtcctctttgacacagagatcttgctggaaaacaaggagtcagtgcacctgggccccttagacactttctgtgacatcccactcaccatcaaactgcacgtggatgggaaggtgtcgggggtgaaagtctacacctttgatgagaggatagagattgatgcagcactcctgacttctcagccccacagtcccttgtgctctggctgcaggcctgtgaggtaccaggttctccgcgatcccccatttgccagtggtttgcccgtggtggtgacacattctcacaggaagttcacggacgtggaggtcacacctggacagatgtatcagtaccaagttctagctgaagctggaggagaactgggagaagcttcgcctcctctgaaccacattcatggagctccttattgtggagatgggaaggtgtcagagagactgggagaagagtgtgatgatggagaccttgtgagcggagatggctgctccaaggtgtgtgagctggaggaaggtttcaactgtgtaggagagccaagcctttgctacatgtatgagggagatggcatatgtgaaccttttgagagaaaaaccagcattgtagactgtggcatctacactcccaaaggatacttggatcaatgggctacccgggcttactcctctcatgaagacaagaagaagtgtcctgtttccttggtaactggagaacctcattccctaatttgcacatcataccatccagatttacccaaccaccgtcccctaactggctggtttccctgtgttgccagtgaaaatgaaactcaggatgacaggagtgaacagccagaaggtagcctgaagaaagaggatgaggtttggctcaaagtgtgtttcaatagaccaggagaggccagagcaatttttatttttttgacaactgatggcctagttcccggagagcatcagcagccgacagtgactctctacctgaccgatgtccgtggaagcaaccactctcttggaacctatggactgtcatgccagcataatccactgattatcaatgtgacccatcaccagaatgtccttttccaccataccacctcagtgctgctgaatttctcatccccacgggtcggcatctcagctgtggctctaaggacatcctcccgcattggtctttcggctcccagtaactgcatctcagaggacgaggggcagaatcatcagggacagagctgtatccatcggccctgtgggaagcaggacagctgtccgtcattgctgcttgatcatgctgatgtggtgaactgtacctctataggcccaggtctcatgaagtgtgctatcacttgtcaaaggggatttgcccttcaggccagcagtgggcagtacatcaggcccatgcagaaggaaattctgctcacatgttcttctgggcactgggaccagaatgtgagctgccttcccgtggactgcggtgttcccgacccgtctttggtgaactatgcaaacttctcctgctcagagggaaccaaatttctgaaacgctgctcaatctcttgtgtcccaccagccaagctgcaaggactgagcccatggctgacatgtcttgaagatggtctctggtctctccctgaagtctactgcaagttggagtgtgatgctccccctattattctgaatgccaacttgctcctgcctcactgcctccaggacaaccacgacgtgggcaccatctgcaaatatgaatgcaaaccagggtactatgtggcagaaagtgcagagggtaaagtcaggaacaagctcctgaagatacaatgcctggaaggtggaatctgggagcaaggcagctgcattcctgtggtgtgtgagccaccccctcctgtgtttgaaggcatgtatgaatgtaccaatggcttcagcctggacagccagtgtgtgctcaactgtaaccaggaacgtgaaaagcttcccatcctctgcactaaagagggcctgtggacccaggagtttaagttgtgtgagaatctgcaaggagaatgcccaccacccccctcagagctgaattctgtggagtacaaatgtgaacaaggatatgggattggtgcagtgtgttccccattgtgtgtaatcccccccagtgaccccgtgatgctacctgagaatatcactgctgacactctggagcactggatggaacctgtcaaagtccagagcattgtgtgcactggccggcgtcaatggcacccagaccccgtcttagtccactgcatccagtcatgtgagcccttccaagcagatggttggtgtgacactatcaacaaccgagcctactgccactatgacgggggagactgctgctcttccacactctcctccaagaaggtcattccatttgctgctgactgtgacctggatgagtgcacctgccgggaccccaaggcagaagaaaatcagtaactgtgggaacaagcccctccctccactgcctcagaggcagtaagaaagagaggccgacccaggaggaaacaaagggtgaatgaagaagaacaatcatgaaatggaagaaggaggaagagcatgaaggatcttataagaaatgcaagaggatattgataggtgtgaactagttcatcaagtagcccaagtaggagagaatcataggcaaaagtttctttaaagtggcagttgattaacatggaaggggaaatatgatagatatataaggaccctccacctgcccgggcggccgctc

SEQ ID NO: 424203 - DNA, 6232 bp, Homo sapiens
aggttattacctgtgcgaagaggtgaatttcgaggaaagagcaatccaagggactagagaaagtgtcatggagaagctgggatttgagctttaaaagacacaggtagcgaggagtgtgtgtttgtgagtgtgtatttgagagacttggctcatgcctgtgggtcttctcttctagtatcagtgaggggagggattactgaagaagaaggggggaaaaaaaaagaaagaaatctgagctttctgggaggaaattcaaaggaaccaagagaaattaacttcgttctgcaaggactaaaatacagcaagaggagagaggtcaagcgagaagcgtgcgggaagcacatgccctggggaggcatagaagccacactggcagagcggccagcacaggtagccagcagaggcattcttggggctatttgaaaaagtttggtctgtgaacaaaacagtttccctggtgactgcaaatccattgctagctgcctctttctcgtctgcccatcactctggtgtggtacccagaagttgacttctggttctgtagaaagagctaggggaggtatgatgtgcttaaagatcctaagaataagcctggcgattttggctgggtgggcactctgttctgccaactctgagctgggctggacacgcaagaaatccttggttgagagggaacacctgaatcaggtgctgttggaaggagaacgttgttggctgggggccaaggttcgaagacccagagcttctccacagcatcacctctttggagtctaccccagcagggctgggaactacctaaggccctaccccgtgggggagcaagaaatccatcatacaggacgcagcaaaccagacactgaaggaaatgctgtgagccttgttcccccagacctgactgaaaatccagcaggactgaggggtgcagttgaagagccggctgccccatgggtaggggatagtcctattgggcaatctgagctgctgggagatgatgacgcttatctcggcaatcaaagatccaaggagtctctaggtgaggccgggattcagaaaggctcagccatggctgccactactaccaccgccattttcacaaccctgaacgaacccaaaccagagacccaaaggaggggctgggccaagtccaggcagcgtcgccaagtgtggaagaggcgggcggaagatgggcagggagactccggtatctcttcacatttccaaccttggcccaagcattcccttaaacacagggtcaaaaagagtccaccggaggaaagcaaccaaaatggtggagagggctcctaccgagaagcagagacctttaactcccaagtaggactgcccatcttatacttctctgggaggcgggagcggctgctgctgcgtccagaagtgctggctgagattccccgggaggcgttcacagtggaagcctgggttaaaccggagggaggacagaacaacccagccatcatcgcaggtgtgtttgataactgctcccacactgtcagtgacaaaggctgggccctggggatccgctcagggaaggacaagggaaagcgggatgctcgcttcttcttctccctctgcaccgaccgcgtgaagaaagccaccatcttgattagccacagtcgctaccaaccaggcacatggacccatgtggcagccacttacgatggacggcacatggccctgtatgtggatggcactcaggtggctagcagtctagaccagtctggtcccctgaacagccccttcatggcatcttgccgctctttgctcctggggggagacagctctgaggatgggcactatttccgtggacacctgggcacactggttttctggtcgaccgccctgccacaaagccattttcagcacagttctcagcattcaagtggggaggaggaagcgactgacttggtcctgacagcgagctttgagcctgtgaacacagagtgggttccctttagagatgagaagtacccacgacttgaggttctccagggctttgagccagagcctgagattctgtcgcctttgcagcccccactctgtgggcaaacagtctgtgacaatgtggaattgatctcccagtacaatggatactggccccttcggggagagaaggtgatacgctaccaggtggtgaacatctgtgatgatgagggcctaaaccccattgtgagtgaggagcagattcgtctgcagcacgaggcactgaatgaggccttcagccgctacaacatcagctggcagctgagcgtccaccaggtccacaattccaccctgcgacaccgggttgtgcttgtgaactgtgagcccagcaagattggcaatgaccattgtgaccccgagtgtgagcacccactcacaggctatgatgggggtgactgccgcctgcagggccgctgctactcctggaaccgcagggatgggctctgtcacgtggagtgtaacaacatgctgaacgactttgacgacggagactgctgcgacccccaggtggctgatgtgcgcaagacctgctttgaccctgactcacccaagagggcatacatgagtgtgaaggagctgaaggaggccctgcagctgaacagtactcacttcctcaacatctactttgccagctcagtgcgggaagaccttgcaggtgctgccacctggccttgggacaaggacgctgtcactcacctgggtggcattgtcctcagcccagcatattatgggatgcctggccacaccgacaccatgatccatgaagtgggacatgttctgggactctaccatgtctttaaaggagtcagtgaaagagaatcctgcaatgacccctgcaaggagacagtgccatccatggaaacgggagacctctgtgccgacaccgcccccactcccaagagtgagctgtgccgggaaccagagcccactagtgacacctgtggcttcactcgcttcccaggggctccgttcaccaactacatgagctacacggatgataactgcactgacaacttcactcctaaccaagtggcccgaatgcattgctatttggacctagtctatcagcagtggactgaaagcagaaagcccacccccatccccattccacctatggtcatcggacagaccaacaagtccctcactatccactggctgcctcctattagtggagttgtatatgacagggcctcaggcagcttgtgtggcgcttgcactgaagatgggacctttcgtcagtatgtgcacacagcttcctcccggcgggtgtgtgactcctcaggttattggaccccagaggaggctgtggggcctcctgatgtggatcagccctgcgagccaagcttacaggcctggagccctgaggtccacctgtaccacatgaacatgacggtcccctgccccacagaaggctgtagcttggagctgctcttccaacacccggtccaagccgacaccctcaccctgtgggtcacttccttcttcatggagtcctcgcaggtcctctttgacacagagatcttgctggaaaacaaggagtcagtgcacctgggccccttagacactttctgtgacatcccactcaccatcaaactgcacgtggatgggaaggtgtcgggggtgaaagtctacacctttgatgagaggatagagattgatgcagcactcctgacttctcagccccacagtcccttgtgctctggctgcaggcctgtgaggtaccaggttctccgcgatcccccatttgccagtggtttgcccgtggtggtgacacattctcacaggaagttcacggacgtggaggtcacacctggacagatgtatcagtaccaagttctagctgaagctggaggagaactgggagaagcttcgcctcctctgaaccacattcatggagctccttattgtggagatgggaaggtgtcagagagactgggagaagagtgtgatgatggagaccttgtgagcggagatggctgctccaaggtgtgtgagctggaggaaggtttcaactgtgtaggagagccaagcctttgctacatgtatgagggagatggcatatgtgaaccttttgagagaaaaaccagcattgtagactgtggcatctacactcccaaaggatacttggatcaatgggctacccgggcttactcctctcatgaagacaagaagaagtgtcctgtttccttggtaactggagaacctcattccctaatttgcacatcataccatccagatttacccaaccaccgtcccctaactggctggtttccctgtgttgccagtgaaaatgaaactcaggatgacaggagtgaacagccagaaggtagcctgaagaaagaggatgaggtttggctcaaagtgtgtttcaatagaccaggagaggccagagcaatttttatttttttgacaactgatggcctagttcccggagagcatcagcagccgacagtgactctctacctgaccgatgtccgtggaagcaaccactctcttggaacctatggactgtcatgccagcataatccactgattatcaatgtgacccatcaccagaatgtccttttccaccataccacctcagtgctgctgaatttctcatccccacgggtcggcatctcagctgtggctctaaggacatcctcccgcattggtctttcggctcccagtaactgcatctcagaggacgaggggcagaatcatcagggacagagctgtatccatcggccctgtgggaagcaggacagctgtccgtcattgctgcttgatcatgctgatgtggtgaactgtacctctataggcccaggtctcatgaagtgtgctatcacttgtcaaaggggatttgcccttcaggccagcagtgggcagtacatcaggcccatgcagaaggaaattctgctcacatgttcttctgggcactgggaccagaatgtgagctgccttcccgtggactgcggtgttcccgacccgtctttggtgaactatgcaaacttctcctgctcagagggaaccaaatttctgaaacgctgctcaatctcttgtgtcccaccagccaagctgcaaggactgagcccatggctgacatgtcttgaagatggtctctggtctctccctgaagtctactgcaagttggagtgtgatgctccccctattattctgaatgccaacttgctcctgcctcactgcctccaggacaaccacgacgtgggcaccatctgcaaatatgaatgcaaaccagggtactatgtggcagaaagtgcagagggtaaagtcaggaacaagctcctgaagatacaatgcctggaaggtggaatctgggagcaaggcagctgcattcctgtggtgtgtgagccaccccctcctgtgtttgaaggcatgtatgaatgtaccaatggcttcagcctggacagccagtgtgtgctcaactgtaaccaggaacgtgaaaagcttcccatcctctgcactaaagagggcctgtggacccaggagtttaagttgtgtgagaatctgcaaggagaatgcccaccacccccctcagagctgaattctgtggagtacaaatgtgaacaaggatatgggattggtgcagtgtgttccccattgtgtgtaatcccccccagtgaccccgtgatgctacctgagaatatcactgctgacactctggagcactggatggaacctgtcaaagtccagagcattgtgtgcactggccggcgtcaatggcacccagaccccgtcttagtccactgcatccagtcatgtgagcccttccaagcagatggttggtgtgacactatcaacaaccgagcctactgccactatgacgggggagactgctgctcttccacactctcctccaagaaggtcattccatttgctgctgactgtgacctggatgagtgcacctgccgggaccccaaggcagaagaaaatcagtaactgtgggaacaagcccctccctccactgcctcagaggcagtaagaaagagaggccgacccaggaggaaacaaagggtgaatgaagaagaacaatcatgaaatggaagaaggaggaagagcatgaaggatcttataagaaatgcaagaggatattgataggtgtgaactagttcatcaagtagcccaagtaggagagaatcataggcaaaagtttctttaaagtggcagttgattaacatggaaggggaaatatgatagatatataaggaccctccacctgcccgggcggccgctc

SEQ ID NO: 424204 - DNA, 7619 bp, Homo sapiens
tgggcatgactctctctcttgagtaggcacacactcccttttctcgggtgtgtactttttgctttgtgatacatctctgcactttcagtattttccaactcatccttaaattccttctcacaacagtgtcaagagcctggacgccagccaggattgaggtcctacgggtgtttggggacctccccaagcccacgagtatcaatggcagtatcaattgtctgtgacagtgattaaggagcaaaacacttggaacccacaagactcccagaaggtgaagttaagagctcccagactcataaggttattagaacagcaaactggcaccccaaagaactttacggagacttgcaacctatcaacaagttggatgagggattaaaagccttcaacaaccaacaaccccaagcatcaaactgaaggaaacattctaaccttcacagacagactggaggctggatggggacctggctgaagacatctggagaatgaaagttaagtaccagcttgcatttttgtgcccctagattatttttgcattttaaaataagaagcatcaaattgcgtgtctctgtgtaaaagttctagcaatttgttttaaggtgaacttattttggcttagggactacaaaaagagaaggtaattcctagggaaggaagaagagaaagaaatgaaaattagagaataagattattttgaatgacttcaggtagcgaggagtgtgtgtttgtgagtgtgtatttgagagacttggctcatgcctgtgggtcttctcttctagtatcagtgaggggagggattactgaagaagaaggggggaaaaaaaaagaaagaaatctgagctttctgggaggaaattcaaaggaaccaagagaaattaacttcgttctgcaaggactaaaatacagcaagaggagagaggtcaagcgagaagcgtgcgggaagcacatgccctggggaggcatagaagccacactggcagagcggccagcacaggtagccagcagaggcattcttggggctatttgaaaaagtttggtctgtgaacaaaacagtttccctggtgactgcaaatccattgctagctgcctctttctcgtctgcccatcactctggtgtggtacccagaagttgacttctggttctgtagaaagagctaggggaggtatgatgtgcttaaagatcctaagaataagcctggcgattttggctgggtgggcactctgttctgccaactctgagctgggctggacacgcaagaaatccttggttgagagggaacacctgaatcaggtgctgttggaaggagaacgttgttggctgggggccaaggttcgaagacccagagcttctccacagcatcacctctttggagtctaccccagcagggctgggaactacctaaggccctaccccgtgggggagcaagaaatccatcatacaggacgcagcaaaccagacactgaaggaaatgctgtgagccttgttcccccagacctgactgaaaatccagcaggactgaggggtgcagttgaagagccggctgccccatgggtaggggatagtcctattgggcaatctgagctgctgggagatgatgacgcttatctcggcaatcaaagatccaaggagtctctaggtgaggccgggattcagaaaggctcagccatggctgccactactaccaccgccattttcacaaccctgaacgaacccaaaccagagacccaaaggaggggctgggccaagtccaggcagcgtcgccaagtgtggaagaggcgggcggaagatgggcagggagactccggtatctcttcacatttccaaccttggcccaagcattcccttaaacacagggtcaaaaagagtccaccggaggaaagcaaccaaaatggtggagagggctcctaccgagaagcagagacctttaactcccaagtaggactgcccatcttatacttctctgggaggcgggagcggctgctgctgcgtccagaagtgctggctgagattccccgggaggcgttcacagtggaagcctgggttaaaccggagggaggacagaacaacccagccatcatcgcaggtgtgtttgataactgctcccacactgtcagtgacaaaggctgggccctggggatccgctcagggaaggacaagggaaagcgggatgctcgcttcttcttctccctctgcaccgaccgcgtgaagaaagccaccatcttgattagccacagtcgctaccaaccaggcacatggacccatgtggcagccacttacgatggacggcacatggccctgtatgtggatggcactcaggtggctagcagtctagaccagtctggtcccctgaacagccccttcatggcatcttgccgctctttgctcctggggggagacagctctgaggatgggcactatttccgtggacacctgggcacactggttttctggtcgaccgccctgccacaaagccattttcagcacagttctcagcattcaagtggggaggaggaagcgactgacttggtcctgacagcgagctttgagcctgtgaacacagagtgggttccctttagagatgagaagtacccacgacttgaggttctccagggctttgagccagagcctgagattctgtcgcctttgcagcccccactctgtgggcaaacagtctgtgacaatgtggaattgatctcccagtacaatggatactggccccttcggggagagaaggtgatacgctaccaggtggtgaacatctgtgatgatgagggcctaaaccccattgtgagtgaggagcagattcgtctgcagcacgaggcactgaatgaggccttcagccgctacaacatcagctggcagctgagcgtccaccaggtccacaattccaccctgcgacaccgggttgtgcttgtgaactgtgagcccagcaagattggcaatgaccattgtgaccccgagtgtgagcacccactcacaggctatgatgggggtgactgccgcctgcagggccgctgctactcctggaaccgcagggatgggctctgtcacgtggagtgtaacaacatgctgaacgactttgacgacggagactgctgcgacccccaggtggctgatgtgcgcaagacctgctttgaccctgactcacccaagagggcatacatgagtgtgaaggagctgaaggaggccctgcagctgaacagtactcacttcctcaacatctactttgccagctcagtgcgggaagaccttgcaggtgctgccacctggccttgggacaaggacgctgtcactcacctgggtggcattgtcctcagcccagcatattatgggatgcctggccacaccgacaccatgatccatgaagtgggacatgttctgggactctaccatgtctttaaaggagtcagtgaaagagaatcctgcaatgacccctgcaaggagacagtgccatccatggaaacgggagacctctgtgccgacaccgcccccactcccaagagtgagctgtgccgggaaccagagcccactagtgacacctgtggcttcactcgcttcccaggggctccgttcaccaactacatgagctacacggatgataactgcactgacaacttcactcctaaccaagtggcccgaatgcattgctatttggacctagtctatcagcagtggactgaaagcagaaagcccacccccatccccattccacctatggtcatcggacagaccaacaagtccctcactatccactggctgcctcctattagtggagttgtatatgacagggcctcaggcagcttgtgtggcgcttgcactgaagatgggacctttcgtcagtatgtgcacacagcttcctcccggcgggtgtgtgactcctcaggttattggaccccagaggaggctgtggggcctcctgatgtggatcagccctgcgagccaagcttacaggcctggagccctgaggtccacctgtaccacatgaacatgacggtcccctgccccacagaaggctgtagcttggagctgctcttccaacacccggtccaagccgacaccctcaccctgtgggtcacttccttcttcatggagtcctcgcaggtcctctttgacacagagatcttgctggaaaacaaggagtcagtgcacctgggccccttagacactttctgtgacatcccactcaccatcaaactgcacgtggatgggaaggtgtcgggggtgaaagtctacacctttgatgagaggatagagattgatgcagcactcctgacttctcagccccacagtcccttgtgctctggctgcaggcctgtgaggtaccaggttctccgcgatcccccatttgccagtggtttgcccgtggtggtgacacattctcacaggaagttcacggacgtggaggtcacacctggacagatgtatcagtaccaagttctagctgaagctggaggagaactgggagaagcttcgcctcctctgaaccacattcatggagctccttattgtggagatgggaaggtgtcagagagactgggagaagagtgtgatgatggagaccttgtgagcggagatggctgctccaaggtgtgtgagctggaggaaggtttcaactgtgtaggagagccaagcctttgctacatgtatgagggagatggcatatgtgaaccttttgagagaaaaaccagcattgtagactgtggcatctacactcccaaaggatacttggatcaatgggctacccgggcttactcctctcatgaagacaagaagaagtgtcctgtttccttggtaactggagaacctcattccctaatttgcacatcataccatccagatttacccaaccaccgtcccctaactggctggtttccctgtgttgccagtgaaaatgaaactcaggatgacaggagtgaacagccagaaggtagcctgaagaaagaggatgaggtttggctcaaagtgtgtttcaatagaccaggagaggccagagcaatttttatttttttgacaactgatggcctagttcccggagagcatcagcagccgacagtgactctctacctgaccgatgtccgtggaagcaaccactctcttggaacctatggactgtcatgccagcataatccactgattatcaatgtgacccatcaccagaatgtccttttccaccataccacctcagtgctgctgaatttctcatccccacgggtcggcatctcagctgtggctctaaggacatcctcccgcattggtctttcggctcccagtaactgcatctcagaggacgaggggcagaatcatcagggacagagctgtatccatcggccctgtgggaagcaggacagctgtccgtcattgctgcttgatcatgctgatgtggtgaactgtacctctataggcccaggtctcatgaagtgtgctatcacttgtcaaaggggatttgcccttcaggccagcagtgggcagtacatcaggcccatgcagaaggaaattctgctcacatgttcttctgggcactgggaccagaatgtgagctgccttcccgtggactgcggtgttcccgacccgtctttggtgaactatgcaaacttctcctgctcagagggaaccaaatttctgaaacgctgctcaatctcttgtgtcccaccagccaagctgcaaggactgagcccatggctgacatgtcttgaagatggtctctggtctctccctgaagtctactgcaagttggagtgtgatgctccccctattattctgaatgccaacttgctcctgcctcactgcctccaggacaaccacgacgtgggcaccatctgcaaatatgaatgcaaaccagggtactatgtggcagaaagtgcagagggtaaagtcaggaacaagctcctgaagatacaatgcctggaaggtggaatctgggagcaaggcagctgcattcctgtggtgtgtgagccaccccctcctgtgtttgaaggcatgtatgaatgtaccaatggcttcagcctggacagccagtgtgtgctcaactgtaaccaggaacgtgaaaagcttcccatcctctgcactaaagagggcctgtggacccaggagtttaagttgtgtgagaatctgcaaggagaatgcccaccacccccctcagagctgaattctgtggagtacaaatgtgaacaaggatatgggattggtgcagtgtgttccccattgtgtgtaatcccccccagtgaccccgtgatgctacctgagaatatcactgctgacactctggagcactggatggaacctgtcaaagtccagagcattgtgtgcactggccggcgtcaatggcacccagaccccgtcttagtccactgcatccagtcatgtgagcccttccaagcagatggttggtgtgacactatcaacaaccgagcctactgccactatgacgggggagactgctgctcttccacactctcctccaagaaggtcattccatttgctgctgactgtgacctggatgagtgcacctgccgggaccccaaggcagaagaaaatcagtaactgtgggaacaagcccctccctccactgcctcagaggcagtaagaaagagaggccgacccaggaggaaacaaagggtgaatgaagaagaacaatcatgaaatggaagaaggaggaagagcatgaaggatcttataagaaatgcaagaggatattgataggtgtgaactagttcatcaagtagcccaagtaggagagaatcataggcaaaagtttctttaaagtggcagttgattaacatggaaggggaaatatgatagatatataaggaccctcctccctcatttatattctattaaatcctatcctcaactcttgccctgctctccgctccaccccctgccaactactcagtcccacccaacttgtaaaccaataccaaaatactagaggagaagttggcagggatactgttaatacccattttgaatggattgccatctttcagagcttgtctgctctcaactggctctttttctttttgtgtagtttcccttaaataatgaagttagttattaattctttataagtatttaaacataattatataaatatattatatatattatattttttgctgtttactaagctaaaaattattcattgttccacacatgctgctgtgaagttcacattcaagatgaatgttgagactttgaggacagaaaggcaacttattttcccatctttctatggatgcggattggcaggttgaatgggaagtacagaaggagagagagtaattagatggaattctggatgctagcatgtaaagctaatcatctttttttttatgacctgggagctgggcccattttatgaccaaggagatggggagttggaatggtggtactaagaggcataggaagttgagtgtgaataccattggtgatgggtccaggagaactagactatggttcttgaatatctgtccacacaagaatatactaacttttgtcaacttctcagaactcccaactggagtcggtgagacctaggattttctgcacttccacacatgcctgttccaagtgtggctgtcagccagtcaacaagtttgtactatggcccattctctga

SEQ ID NO: 424205 - DNA, 7107 bp, Homo sapiens
tgggcatgactctctctcttgagtaggcacacactcccttttctcgggtgtgtactttttgctttgtgatacatctctgcactttcagtattttccaactcatccttaaattccttctcacaacagtgtcaagagcctggacgccagccaggattgaggtcctacgggtgtttggggacctccccaagcccacgagtatcaatggcagtatcaattgtctgtgacagtgattaaggagcaaaacacttggaacccacaagactcccagaaggtgaagttaagagctcccagactcataaggttattagaacagcaaactggcaccccaaagaactttacggagacttgcaacctatcaacaagttggatgagggattaaaagccttcaacaaccaacaaccccaagcatcaaactgaaggaaacattctaaccttcacagacagactggaggctggatggggacctggctgaagacatctggagaatgaaagttaagtaccagcttgcatttttgtgcccctagattatttttgcattttaaaataagaagcatcaaattgcgtgtctctgtgtaaaagttctagcaatttgttttaaggtgaacttattttggcttagggactacaaaaagagaaggtaattcctagggaaggaagaagagaaagaaatgaaaattagagaataagattattttgaatgacttcaggtagcgaggagtgtgtgtttgtgagtgtgtatttgagagacttggctcatgcctgtgggtcttctcttctagtatcagtgaggggagggattactgaagaagaaggggggaaaaaaaaagaaagaaatctgagctttctgggaggaaattcaaaggaaccaagagaaattaacttcgttctgcaaggactaaaatacagcaagaggagagaggtcaagcgagaagcgtgcgggaagcacatgccctggggaggcatagaagccacactggcagagcggccagcacaggtagccagcagaggcattcttggggctatttgaaaaagtttggtctgtgaacaaaacagtttccctggtgactgcaaatccattgctagctgcctctttctcgtctgcccatcactctggtgtggtacccagaagttgacttctggttctgtagaaagagctaggggaggtatgatgtgcttaaagatcctaagaataagcctggcgattttggctgggtgggcactctgttctgccaactctgagctgggctggacacgcaagaaatccttggttgagagggaacacctgaatcaggtgctgttggaaggagaacgttgttggctgggggccaaggttcgaagacccagagcttctccacagcatcacctctttggagtctaccccagcagggctgggaactacctaaggccctaccccgtgggggagcaagaaatccatcatacaggacgcagcaaaccagacactgaaggaaatgctgtgagccttgttcccccagacctgactgaaaatccagcaggactgaggggtgcagttgaagagccggctgccccatgggtaggggatagtcctattgggcaatctgagctgctgggagatgatgacgcttatctcggcaatcaaagatccaaggagtctctaggtgaggccgggattcagaaaggctcagccatggctgccactactaccaccgccattttcacaaccctgaacgaacccaaaccagagacccaaaggaggggctgggccaagtccaggcagcgtcgccaagtgtggaagaggcgggcggaagatgggcagggagactccggtatctcttcacatttccaaccttggcccaagcattcccttaaacacagggtcaaaaagagtccaccggaggaaagcaaccaaaatggtggagagggctcctaccgagaagcagagacctttaactcccaagtaggactgcccatcttatacttctctgggaggcgggagcggctgctgctgcgtccagaagtgctggctgagattccccgggaggcgttcacagtggaagcctgggttaaaccggagggaggacagaacaacccagccatcatcgcaggtgtgtttgataactgctcccacactgtcagtgacaaaggctgggccctggggatccgctcagggaaggacaagggaaagcgggatgctcgcttcttcttctccctctgcaccgaccgcgtgaagaaagccaccatcttgattagccacagtcgctaccaaccaggcacatggacccatgtggcagccacttacgatggacggcacatggccctgtatgtggatggcactcaggtggctagcagtctagaccagtctggtcccctgaacagccccttcatggcatcttgccgctctttgctcctggggggagacagctctgaggatgggcactatttccgtggacacctgggcacactggttttctggtcgaccgccctgccacaaagccattttcagcacagttctcagcattcaagtggggaggaggaagcgactgacttggtcctgacagcgagctttgagcctgtgaacacagagtgggttccctttagagatgagaagtacccacgacttgaggttctccagggctttgagccagagcctgagattctgtcgcctttgcagcccccactctgtgggcaaacagtctgtgacaatgtggaattgatctcccagtacaatggatactggccccttcggggagagaaggtgatacgctaccaggtggtgaacatctgtgatgatgagggcctaaaccccattgtgagtgaggagcagattcgtctgcagcacgaggcactgaatgaggccttcagccgctacaacatcagctggcagctgagcgtccaccaggtccacaattccaccctgcgacaccgggttgtgcttgtgaactgtgagcccagcaagattggcaatgaccattgtgaccccgagtgtgagcacccactcacaggctatgatgggggtgactgccgcctgcagggccgctgctactcctggaaccgcagggatgggctctgtcacgtggagtgtaacaacatgctgaacgactttgacgacggagactgctgcgacccccaggtggctgatgtgcgcaagacctgctttgaccctgactcacccaagagggcatacatgagtgtgaaggagctgaaggaggccctgcagctgaacagtactcacttcctcaacatctactttgccagctcagtgcgggaagaccttgcaggtgctgccacctggccttgggacaaggacgctgtcactcacctgggtggcattgtcctcagcccagcatattatgggatgcctggccacaccgacaccatgatccatgaagtgggacatgttctgggactctaccatgtctttaaaggagtcagtgaaagagaatcctgcaatgacccctgcaaggagacagtgccatccatggaaacgggagacctctgtgccgacaccgcccccactcccaagagtgagctgtgccgggaaccagagcccactagtgacacctgtggcttcactcgcttcccaggggctccgttcaccaactacatgagctacacggatgataactgcactgacaacttcactcctaaccaagtggcccgaatgcattgctatttggacctagtctatcagcagtggactgaaagcagaaagcccacccccatccccattccacctatggtcatcggacagaccaacaagtccctcactatccactggctgcctcctattagtggagttgtatatgacagggcctcaggcagcttgtgtggcgcttgcactgaagatgggacctttcgtcagtatgtgcacacagcttcctcccggcgggtgtgtgactcctcaggttattggaccccagaggaggctgtggggcctcctgatgtggatcagccctgcgagccaagcttacaggcctggagccctgaggtccacctgtaccacatgaacatgacggtcccctgccccacagaaggctgtagcttggagctgctcttccaacacccggtccaagccgacaccctcaccctgtgggtcacttccttcttcatggagtcctcgcaggtcctctttgacacagagatcttgctggaaaacaaggagtcagtgcacctgggccccttagacactttctgtgacatcccactcaccatcaaactgcacgtggatgggaaggtgtcgggggtgaaagtctacacctttgatgagaggatagagattgatgcagcactcctgacttctcagccccacagtcccttgtgctctggctgcaggcctgtgaggtaccaggttctccgcgatcccccatttgccagtggtttgcccgtggtggtgacacattctcacaggaagttcacggacgtggaggtcacacctggacagatgtatcagtaccaagttctagctgaagctggaggagaactgggagaagcttcgcctcctctgaaccacattcatggagctccttattgtggagatgggaaggtgtcagagagactgggagaagagtgtgatgatggagaccttgtgagcggagatggctgctccaaggtgtgtgagctggaggaaggtttcaactgtgtaggagagccaagcctttgctacatgtatgagggagatggcatatgtgaaccttttgagagaaaaaccagcattgtagactgtggcatctacactcccaaaggatacttggatcaatgggctacccgggcttactcctctcatgaagacaagaagaagtgtcctgtttccttggtaactggagaacctcattccctaatttgcacatcataccatccagatttacccaaccaccgtcccctaactggctggtttccctgtgttgccagtgaaaatgaaactcaggatgacaggagtgaacagccagaaggtagcctgaagaaagaggatgaggtttggctcaaagtgtgtttcaatagaccaggagaggccagagcaatttttatttttttgacaactgatggcctagttcccggagagcatcagcagccgacagtgactctctacctgaccgatgtccgtggaagcaaccactctcttggaacctatggactgtcatgccagcataatccactgattatcaatgtgacccatcaccagaatgtccttttccaccataccacctcagtgctgctgaatttctcatccccacgggtcggcatctcagctgtggctctaaggacatcctcccgcattggtctttcggctcccagtaactgcatctcagaggacgaggggcagaatcatcagggacagagctgtatccatcggccctgtgggaagcaggacagctgtccgtcattgctgcttgatcatgctgatgtggtgaactgtacctctataggcccaggtctcatgaagtgtgctatcacttgtcaaaggggatttgcccttcaggccagcagtgggcagtacatcaggcccatgcagaaggaaattctgctcacatgttcttctgggcactgggaccagaatgtgagctgccttcccgtggactgcggtgttcccgacccgtctttggtgaactatgcaaacttctcctgctcagagggaaccaaatttctgaaacgctgctcaatctcttgtgtcccaccagccaagctgcaaggactgagcccatggctgacatgtcttgaagatggtctctggtctctccctgaagtctactgcaagttggagtgtgatgctccccctattattctgaatgccaacttgctcctgcctcactgcctccaggacaaccacgacgtgggcaccatctgcaaatatgaatgcaaaccagggtactatgtggcagaaagtgcagagggtaaagtcaggaacaagctcctgaagatacaatgcctggaaggtggaatctgggagcaaggcagctgcattcctgtggtgtgtgagccaccccctcctgtgtttgaaggcatgtatgaatgtaccaatggcttcagcctggacagccagtgtgtgctcaactgtaaccaggaacgtgaaaagcttcccatcctctgcactaaagagggcctgtggacccaggagtttaagttgtgtgagaatctgcaaggagaatgcccaccacccccctcagagctgaattctgtggagtacaaatgtgaacaaggatatgggattggtgcagtgtgttccccattgtgtgtaatcccccccagtgaccccgtgatgctacctgagaatatcactgctgacactctggagcactggatggaacctgtcaaagtccagagcattgtgtgcactggccggcgtcaatggcacccagaccccgtcttagtccactgcatccagtcatgtgagcccttccaagcagatggttggtgtgacactatcaacaaccgagcctactgccactatgacgggggagactgctgctcttccacactctcctccaagaaggtcattccatttgctgctgactgtgacctggatgagtgcacctgccgggaccccaaggcagaagaaaatcagtaactgtgggaacaagcccctccctccactgcctcagaggcagtaagaaagagaggccgacccaggaggaaacaaagggtgaatgaagaagaacaatcatgaaatggaagaaggaggaagagcatgaaggatcttataagaaatgcaagaggatattgataggtgtgaactagttcatcaagtagcccaagtaggagagaatcataggcaaaagtttctttaaagtggcagttgattaacatggaaggggaaatatgatagatatataaggaccctcctccctcatttatattctattaaatcctatcctcaactcttgccctgctctccgctccaccccctgccaactactcagtcccacccacctcgtccacccattgcctgtccctagagtaaaggtcgttcggagcctggggaataacccgggtgggtgtgaagggcattttcactaaggggtaggttcctcctgtgggtggttttatttgagcgtaggttccctcaaagaaagaagtgcgttatgtatgttatataagtattttgaagttataatatagatatataatatagac

SEQ ID NO: 424206 - DNA, 6696 bp, Homo sapiens
tgggcatgactctctctcttgagtaggcacacactcccttttctcgggtgtgtactttttgctttgtgatacatctctgcactttcagtattttccaactcatccttaaattccttctcacaacagtgtcaagagcctggacgccagccaggattgaggtcctacgggtgtttggggacctccccaagcccacgagtatcaatggcagtatcaattgtctgtgacagtgattaaggagcaaaacacttggaacccacaagactcccagaaggtgaagttaagagctcccagactcataaggttattagaacagcaaactggcaccccaaagaactttacggagacttgcaacctatcaacaagttggatgagggattaaaagccttcaacaaccaacaaccccaagcatcaaactgaaggaaacattctaaccttcacagacagactggaggctggatggggacctggctgaagacatctggagaatgaaagttaagtaccagcttgcatttttgtgcccctagattatttttgcattttaaaataagaagcatcaaattgcgtgtctctgtgtaaaagttctagcaatttgttttaaggtgaacttattttggcttagggactacaaaaagagaaggtaattcctagggaaggaagaagagaaagaaatgaaaattagagaataagattattttgaatgacttcaggtagcgaggagtgtgtgtttgtgagtgtgtatttgagagacttggctcatgcctgtgggtcttctcttctagtatcagtgaggggagggattactgaagaagaaggggggaaaaaaaaagaaagaaatctgagctttctgggaggaaattcaaaggaaccaagagaaattaacttcgttctgcaaggactaaaatacagcaagaggagagaggtcaagcgagaagcgtgcgggaagcacatgccctggggaggcatagaagccacactggcagagcggccagcacaggtagccagcagaggcattcttggggctatttgaaaaagtttggtctgtgaacaaaacagtttccctggtgactgcaaatccattgctagctgcctctttctcgtctgcccatcactctggtgtggtacccagaagttgacttctggttctgtagaaagagctaggggaggtatgatgtgcttaaagatcctaagaataagcctggcgattttggctgggtgggcactctgttctgccaactctgagctgggctggacacgcaagaaatccttggttgagagggaacacctgaatcaggtgctgttggaaggagaacgttgttggctgggggccaaggttcgaagacccagagcttctccacagcatcacctctttggagtctaccccagcagggctgggaactacctaaggccctaccccgtgggggagcaagaaatccatcatacaggacgcagcaaaccagacactgaaggaaatgctgtgagccttgttcccccagacctgactgaaaatccagcaggactgaggggtgcagttgaagagccggctgccccatgggtaggggatagtcctattgggcaatctgagctgctgggagatgatgacgcttatctcggcaatcaaagatccaaggagtctctaggtgaggccgggattcagaaaggctcagccatggctgccactactaccaccgccattttcacaaccctgaacgaacccaaaccagagacccaaaggaggggctgggccaagtccaggcagcgtcgccaagtgtggaagaggcgggcggaagatgggcagggagactccggtatctcttcacatttccaaccttggcccaagcattcccttaaacacagggtcaaaaagagtccaccggaggaaagcaaccaaaatggtggagagggctcctaccgagaagcagagacctttaactcccaagtaggactgcccatcttatacttctctgggaggcgggagcggctgctgctgcgtccagaagtgctggctgagattccccgggaggcgttcacagtggaagcctgggttaaaccggagggaggacagaacaacccagccatcatcgcaggtgtgtttgataactgctcccacactgtcagtgacaaaggctgggccctggggatccgctcagggaaggacaagggaaagcgggatgctcgcttcttcttctccctctgcaccgaccgcgtgaagaaagccaccatcttgattagccacagtcgctaccaaccaggcacatggacccatgtggcagccacttacgatggacggcacatggccctgtatgtggatggcactcaggtggctagcagtctagaccagtctggtcccctgaacagccccttcatggcatcttgccgctctttgctcctggggggagacagctctgaggatgggcactatttccgtggacacctgggcacactggttttctggtcgaccgccctgccacaaagccattttcagcacagttctcagcattcaagtggggaggaggaagcgactgacttggtcctgacagcgagctttgagcctgtgaacacagagtgggttccctttagagatgagaagtacccacgacttgaggttctccagggctttgagccagagcctgagattctgtcgcctttgcagcccccactctgtgggcaaacagtctgtgacaatgtggaattgatctcccagtacaatggatactggccccttcggggagagaaggtgatacgctaccaggtggtgaacatctgtgatgatgagggcctaaaccccattgtgagtgaggagcagattcgtctgcagcacgaggcactgaatgaggccttcagccgctacaacatcagctggcagctgagcgtccaccaggtccacaattccaccctgcgacaccgggttgtgcttgtgaactgtgagcccagcaagattggcaatgaccattgtgaccccgagtgtgagcacccactcacaggctatgatgggggtgactgccgcctgcagggccgctgctactcctggaaccgcagggatgggctctgtcacgtggagtgtaacaacatgctgaacgactttgacgacggagactgctgcgacccccaggtggctgatgtgcgcaagacctgctttgaccctgactcacccaagagggcatacatgagtgtgaaggagctgaaggaggccctgcagctgaacagtactcacttcctcaacatctactttgccagctcagtgcgggaagaccttgcaggtgctgccacctggccttgggacaaggacgctgtcactcacctgggtggcattgtcctcagcccagcatattatgggatgcctggccacaccgacaccatgatccatgaagtgggacatgttctgggactctaccatgtctttaaaggagtcagtgaaagagaatcctgcaatgacccctgcaaggagacagtgccatccatggaaacgggagacctctgtgccgacaccgcccccactcccaagagtgagctgtgccgggaaccagagcccactagtgacacctgtggcttcactcgcttcccaggggctccgttcaccaactacatgagctacacggatgataactgcactgacaacttcactcctaaccaagtggcccgaatgcattgctatttggacctagtctatcagcagtggactgaaagcagaaagcccacccccatccccattccacctatggtcatcggacagaccaacaagtccctcactatccactggctgcctcctattagtggagttgtatatgacagggcctcaggcagcttgtgtggcgcttgcactgaagatgggacctttcgtcagtatgtgcacacagcttcctcccggcgggtgtgtgactcctcaggttattggaccccagaggaggctgtggggcctcctgatgtggatcagccctgcgagccaagcttacaggcctggagccctgaggtccacctgtaccacatgaacatgacggtcccctgccccacagaaggctgtagcttggagctgctcttccaacacccggtccaagccgacaccctcaccctgtgggtcacttccttcttcatggagtcctcgcaggtcctctttgacacagagatcttgctggaaaacaaggagtcagtgcacctgggccccttagacactttctgtgacatcccactcaccatcaaactgcacgtggatgggaaggtgtcgggggtgaaagtctacacctttgatgagaggatagagattgatgcagcactcctgacttctcagccccacagtcccttgtgctctggctgcaggcctgtgaggtaccaggttctccgcgatcccccatttgccagtggtttgcccgtggtggtgacacattctcacaggaagttcacggacgtggaggtcacacctggacagatgtatcagtaccaagttctagctgaagctggaggagaactgggagaagcttcgcctcctctgaaccacattcatggagctccttattgtggagatgggaaggtgtcagagagactgggagaagagtgtgatgatggagaccttgtgagcggagatggctgctccaaggtgtgtgagctggaggaaggtttcaactgtgtaggagagccaagcctttgctacatgtatgagggagatggcatatgtgaaccttttgagagaaaaaccagcattgtagactgtggcatctacactcccaaaggatacttggatcaatgggctacccgggcttactcctctcatgaagacaagaagaagtgtcctgtttccttggtaactggagaacctcattccctaatttgcacatcataccatccagatttacccaaccaccgtcccctaactggctggtttccctgtgttgccagtgaaaatgaaactcaggatgacaggagtgaacagccagaaggtagcctgaagaaagaggatgaggtttggctcaaagtgtgtttcaatagaccaggagaggccagagcaatttttatttttttgacaactgatggcctagttcccggagagcatcagcagccgacagtgactctctacctgaccgatgtccgtggaagcaaccactctcttggaacctatggactgtcatgccagcataatccactgattatcaatgtgacccatcaccagaatgtccttttccaccataccacctcagtgctgctgaatttctcatccccacgggtcggcatctcagctgtggctctaaggacatcctcccgcattggtctttcggctcccagtaactgcatctcagaggacgaggggcagaatcatcagggacagagctgtatccatcggccctgtgggaagcaggacagctgtccgtcattgctgcttgatcatgctgatgtggtgaactgtacctctataggcccaggtctcatgaagtgtgctatcacttgtcaaaggggatttgcccttcaggccagcagtgggcagtacatcaggcccatgcagaaggaaattctgctcacatgttcttctgggcactgggaccagaatgtgagctgccttcccgtggactgcggtgttcccgacccgtctttggtgaactatgcaaacttctcctgctcagagggaaccaaatttctgaaacgctgctcaatctcttgtgtcccaccagccaagctgcaaggactgagcccatggctgacatgtcttgaagatggtctctggtctctccctgaagtctactgcaagttggagtgtgatgctccccctattattctgaatgccaacttgctcctgcctcactgcctccaggacaaccacgacgtgggcaccatctgcaaatatgaatgcaaaccagggtactatgtggcagaaagtgcagagggtaaagtcaggaacaagctcctgaagatacaatgcctggaaggtggaatctgggagcaaggcagctgcattcctgtggtgtgtgagccaccccctcctgtgtttgaaggcatgtatgaatgtaccaatggcttcagcctggacagccagtgtgtgctcaactgtaaccaggaacgtgaaaagcttcccatcctctgcactaaagagggcctgtggacccaggagtttaagttgtgtgagaatctgcaaggagaatgcccaccacccccctcagagctgaattctgtggagtacaaatgtgaacaaggatatgggattggtgcagtgtgttccccattgtgtgtaatcccccccagtgaccccgtgatgctacctgagaatatcactgctgacactctggagcactggatggaacctgtcaaagtccagagcattgtgtgcactggccggcgtcaatggcacccagaccccgtcttagtccactgcatccagtcatgtgagcccttccaagcagatggttggtgtgacactatcaacaaccgagcctactgccactatgacgggggagactgctgctcttccacactctcctccaagaaggtcattccatttgctgctgactgtgacctggatgagtgcacctgccgggaccccaaggcagaagaaaatcagtaactgtgggaacaagcccctccctccactgcctcagaggcagtaagaaagagaggccgacccaggaggaaacaaagggtgaatgaagaagaacaatcatgaaatctactaaaacgtgtgtgacacggggattctctaaattcggcctgggggcgtgt

SEQ ID NO: 424207 - DNA, 6037 bp, Homo sapiens
tgggcatgactctctctcttgagtaggcacacactcccttttctcgggtgtgtactttttgctttgtgatacatctctgcactttcagtattttccaactcatccttaaattccttctcacaacagtgtcaagagcctggacgccagccaggattgaggtcctacgggtgtttggggacctccccaagcccacgagtatcaatggcagtatcaattgtctgtgacagtgattaaggagcaaaacacttggaacccacaagactcccagaaggtgaagttaagagctcccagactcataaggttattagaacagcaaactggcaccccaaagaactttacggagacttgcaacctatcaacaagttggatgagggattaaaagccttcaacaaccaacaaccccaagcatcaaactgaaggaaacattctaaccttcacagacagactggaggctggatggggacctggctgaagacatctggagaatgaaagttaagtaccagcttgcatttttgtgcccctagattatttttgcattttaaaataagaagcatcaaattgcgtgtctctgtgtaaaagttctagcaatttgttttaaggtgaacttattttggcttagggactacaaaaagagaaggtaattcctagggaaggaagaagagaaagaaatgaaaattagagaataagattattttgaatgacttcaggtagcgaggagtgtgtgtttgtgagtgtgtatttgagagacttggctcatgcctgtgggtcttctcttctagtatcagtgaggggagggattactgaagaagaaggggggaaaaaaaaagaaagaaatctgagctttctgggaggaaattcaaaggaaccaagagaaattaacttcgttctgcaaggactaaaatacagcaagaggagagaggtcaagcgagaagcgtgcgggaagcacatgccctggggaggcatagaagccacactggcagagcggccagcacaggtagccagcagaggcattcttggggctatttgaaaaagtttggtctgtgaacaaaacagtttccctggtgactgcaaatccattgctagctgcctctttctcgtctgcccatcactctggtgtggtacccagaagttgacttctggttctgtagaaagagctaggggaggtatgatgtgcttaaagatcctaagaataagcctggcgattttggctgggtgggcactctgttctgccaactctgagctgggctggacacgcaagaaatccttggttgagagggaacacctgaatcaggtgctgttggaaggagaacgttgttggctgggggccaaggttcgaagacccagagcttctccacagcatcacctctttggagtctaccccagcagggctgggaactacctaaggccctaccccgtgggggagcaagaaatccatcatacaggacgcagcaaaccagacactgaaggaaatgctgtgagccttgttcccccagacctgactgaaaatccagcaggactgaggggtgcagttgaagagccggctgccccatgggtaggggatagtcctattgggcaatctgagctgctgggagatgatgacgcttatctcggcaatcaaagatccaaggagtctctaggtgaggccgggattcagaaaggctcagccatggctgccactactaccaccgccattttcacaaccctgaacgaacccaaaccagagacccaaaggaggggctgggccaagtccaggcagcgtcgccaagtgtggaagaggcgggcggaagatgggcagggagactccggtatctcttcacatttccaaccttggcccaagcattcccttaaacacagggtcaaaaagagtccaccggaggaaagcaaccaaaatggtggagagggctcctaccgagaagcagagacctttaactcccaagtaggactgcccatcttatacttctctgggaggcgggagcggctgctgctgcgtccagaagtgctggctgagattccccgggaggcgttcacagtggaagcctgggttaaaccggagggaggacagaacaacccagccatcatcgcaggtgtgtttgataactgctcccacactgtcagtgacaaaggctgggccctggggatccgctcagggaaggacaagggaaagcgggatgctcgcttcttcttctccctctgcaccgaccgcgtgaagaaagccaccatcttgattagccacagtcgctaccaaccaggcacatggacccatgtggcagccacttacgatggacggcacatggccctgtatgtggatggcactcaggtggctagcagtctagaccagtctggtcccctgaacagccccttcatggcatcttgccgctctttgctcctggggggagacagctctgaggatgggcactatttccgtggacacctgggcacactggttttctggtcgaccgccctgccacaaagccattttcagcacagttctcagcattcaagtggggaggaggaagcgactgacttggtcctgacagcgagctttgagcctgtgaacacagagtgggttccctttagagatgagaagtacccacgacttgaggttctccagggctttgagccagagcctgagattctgtcgcctttgcagcccccactctgtgggcaaacagtctgtgacaatgtggaattgatctcccagtacaatggatactggccccttcggggagagaaggtgatacgctaccaggtggtgaacatctgtgatgatgagggcctaaaccccattgtgagtgaggagcagattcgtctgcagcacgaggcactgaatgaggccttcagccgctacaacatcagctggcagctgagcgtccaccaggtccacaattccaccctgcgacaccgggttgtgcttgtgaactgtgagcccagcaagattggcaatgaccattgtgaccccgagtgtgagcacccactcacaggctatgatgggggtgactgccgcctgcagggccgctgctactcctggaaccgcagggatgggctctgtcacgtggagtgtaacaacatgctgaacgactttgacgacggagactgctgcgacccccaggtggctgatgtgcgcaagacctgctttgaccctgactcacccaagagggcatacatgagtgtgaaggagctgaaggaggccctgcagctgaacagtactcacttcctcaacatctactttgccagctcagtgcgggaagaccttgcaggtgctgccacctggccttgggacaaggacgctgtcactcacctgggtggcattgtcctcagcccagcatattatgggatgcctggccacaccgacaccatgatccatgaagtgggacatgttctgggactctaccatgtctttaaaggagtcagtgaaagagaatcctgcaatgacccctgcaaggagacagtgccatccatggaaacgggagacctctgtgccgacaccgcccccactcccaagagtgagctgtgccgggaaccagagcccactagtgacacctgtggcttcactcgcttcccaggggctccgttcaccaactacatgagctacacggatgataactgcactgacaacttcactcctaaccaagtggcccgaatgcattgctatttggacctagtctatcagcagtggactgaaagcagaaagcccacccccatccccattccacctatggtcatcggacagaccaacaagtccctcactatccactggctgcctcctattagtggagttgtatatgacagggcctcaggcagcttgtgtggcgcttgcactgaagatgggacctttcgtcagtatgtgcacacagcttcctcccggcgggtgtgtgactcctcaggttattggaccccagaggaggctgtggggcctcctgatgtggatcagccctgcgagccaagcttacaggcctggagccctgaggtccacctgtaccacatgaacatgacggtcccctgccccacagaaggctgtagcttggagctgctcttccaacacccggtccaagccgacaccctcaccctgtgggtcacttccttcttcatggagtcctcgcaggtcctctttgacacagagatcttgctggaaaacaaggagtcagtgcacctgggccccttagacactttctgtgacatcccactcaccatcaaactgcacgtggatgggaaggtgtcgggggtgaaagtctacacctttgatgagaggatagagattgatgcagcactcctgacttctcagccccacagtcccttgtgctctggctgcaggcctgtgaggtaccaggttctccgcgatcccccatttgccagtggtttgcccgtggtggtgacacattctcacaggaagttcacggacgtggaggtcacacctggacagatgtatcagtaccaagttctagctgaagctggaggagaactgggagaagcttcgcctcctctgaaccacattcatggagctccttattgtggagatgggaaggtgtcagagagactgggagaagagtgtgatgatggagaccttgtgagcggagatggctgctccaaggtgtgtgagctggaggaaggtttcaactgtgtaggagagccaagcctttgctacatgtatgagggagatggcatatgtgaaccttttgagagaaaaaccagcattgtagactgtggcatctacactcccaaaggatacttggatcaatgggctacccgggcttactcctctcatgaagacaagaagaagtgtcctgtttccttggtaactggagaacctcattccctaatttgcacatcataccatccagatttacccaaccaccgtcccctaactggctggtttccctgtgttgccagtgaaaatgaaactcaggatgacaggagtgaacagccagaaggtagcctgaagaaagaggatgaggtttggctcaaagtgtgtttcaatagaccaggagaggccagagcaatttttatttttttgacaactgatggcctagttcccggagagcatcagcagccgacagtgactctctacctgaccgatgtccgtggaagcaaccactctcttggaacctatggactgtcatgccagcataatccactgattatcaatgtgacccatcaccagaatgtccttttccaccataccacctcagtgctgctgaatttctcatccccacgggtcggcatctcagctgtggctctaaggacatcctcccgcattggtctttcggctcccagtaactgcatctcagaggacgaggggcagaatcatcagggacagagctgtatccatcggccctgtgggaagcaggacagctgtccgtcattgctgcttgatcatgctgatgtggtgaactgtacctctataggcccaggtctcatgaagtgtgctatcacttgtcaaaggggatttgcccttcaggccagcagtgggcagtacatcaggcccatgcagaaggaaattctgctcacatgttcttctgggcactgggaccagaatgtgagctgccttcccgtggactgcggtgttcccgacccgtctttggtgaactatgcaaacttctcctgctcagagggaaccaaatttctgaaacgctgctcaatctcttgtgtcccaccagccaagctgcaaggactgagcccatggctgacatgtcttgaagatggtctctggtctctccctgaagtctactgcaagttggagtgtgatgctccccctattattctgaatgccaacttgctcctgcctcactgcctccaggacaaccacgacgtgggcaccatctgcaaatatgaatgcaaaccagggtactatgtggcagaaagtgcagagggtaaagtcaggaacaagctcctgaagatacaatgcctggaaggtggaatctgggagcaaggcagctgcattcctgtggtgtgtgagccaccccctcctgtgtttgaaggcatgtatgaaggtccatggttcgccgggccggggggcaatggaccgaagggaggtccccgg

SEQ ID NO: 424208 - DNA, 4988 bp, Homo sapiens
tgggcatgactctctctcttgagtaggcacacactcccttttctcgggtgtgtactttttgctttgtgatacatctctgcactttcagtattttccaactcatccttaaattccttctcacaacagtgtcaagagcctggacgccagccaggattgaggtcctacgggtgtttggggacctccccaagcccacgagtatcaatggcagtatcaattgtctgtgacagtgattaaggagcaaaacacttggaacccacaagactcccagaaggtgaagttaagagctcccagactcataaggttattagaacagcaaactggcaccccaaagaactttacggagacttgcaacctatcaacaagttggatgagggattaaaagccttcaacaaccaacaaccccaagcatcaaactgaaggaaacattctaaccttcacagacagactggaggctggatggggacctggctgaagacatctggagaatgaaagttaagtaccagcttgcatttttgtgcccctagattatttttgcattttaaaataagaagcatcaaattgcgtgtctctgtgtaaaagttctagcaatttgttttaaggtgaacttattttggcttagggactacaaaaagagaaggtaattcctagggaaggaagaagagaaagaaatgaaaattagagaataagattattttgaatgacttcaggtagcgaggagtgtgtgtttgtgagtgtgtatttgagagacttggctcatgcctgtgggtcttctcttctagtatcagtgaggggagggattactgaagaagaaggggggaaaaaaaaagaaagaaatctgagctttctgggaggaaattcaaaggaaccaagagaaattaacttcgttctgcaaggactaaaatacagcaagaggagagaggtcaagcgagaagcgtgcgggaagcacatgccctggggaggcatagaagccacactggcagagcggccagcacaggtagccagcagaggcattcttggggctatttgaaaaagtttggtctgtgaacaaaacagtttccctggtgactgcaaatccattgctagctgcctctttctcgtctgcccatcactctggtgtggtacccagaagttgacttctggttctgtagaaagagctaggggaggtatgatgtgcttaaagatcctaagaataagcctggcgattttggctgggtgggcactctgttctgccaactctgagctgggctggacacgcaagaaatccttggttgagagggaacacctgaatcaggtgctgttggaaggagaacgttgttggctgggggccaaggttcgaagacccagagcttctccacagcatcacctctttggagtctaccccagcagggctgggaactacctaaggccctaccccgtgggggagcaagaaatccatcatacaggacgcagcaaaccagacactgaaggaaatgctgtgagccttgttcccccagacctgactgaaaatccagcaggactgaggggtgcagttgaagagccggctgccccatgggtaggggatagtcctattgggcaatctgagctgctgggagatgatgacgcttatctcggcaatcaaagatccaaggagtctctaggtgaggccgggattcagaaaggctcagccatggctgccactactaccaccgccattttcacaaccctgaacgaacccaaaccagagacccaaaggaggggctgggccaagtccaggcagcgtcgccaagtgtggaagaggcgggcggaagatgggcagggagactccggtatctcttcacatttccaaccttggcccaagcattcccttaaacacagggtcaaaaagagtccaccggaggaaagcaaccaaaatggtggagagggctcctaccgagaagcagagacctttaactcccaagtaggactgcccatcttatacttctctgggaggcgggagcggctgctgctgcgtccagaagtgctggctgagattccccgggaggcgttcacagtggaagcctgggttaaaccggagggaggacagaacaacccagccatcatcgcaggtgtgtttgataactgctcccacactgtcagtgacaaaggctgggccctggggatccgctcagggaaggacaagggaaagcgggatgctcgcttcttcttctccctctgcaccgaccgcgtgaagaaagccaccatcttgattagccacagtcgctaccaaccaggcacatggacccatgtggcagccacttacgatggacggcacatggccctgtatgtggatggcactcaggtggctagcagtctagaccagtctggtcccctgaacagccccttcatggcatcttgccgctctttgctcctggggggagacagctctgaggatgggcactatttccgtggacacctgggcacactggttttctggtcgaccgccctgccacaaagccattttcagcacagttctcagcattcaagtggggaggaggaagcgactgacttggtcctgacagcgagctttgagcctgtgaacacagagtgggttccctttagagatgagaagtacccacgacttgaggttctccagggctttgagccagagcctgagattctgtcgcctttgcagcccccactctgtgggcaaacagtctgtgacaatgtggaattgatctcccagtacaatggatactggccccttcggggagagaaggtgatacgctaccaggtggtgaacatctgtgatgatgagggcctaaaccccattgtgagtgaggagcagattcgtctgcagcacgaggcactgaatgaggccttcagccgctacaacatcagctggcagctgagcgtccaccaggtccacaattccaccctgcgacaccgggttgtgcttgtgaactgtgagcccagcaagattggcaatgaccattgtgaccccgagtgtgagcacccactcacaggctatgatgggggtgactgccgcctgcagggccgctgctactcctggaaccgcagggatgggctctgtcacgtggagtgtaacaacatgctgaacgactttgacgacggagactgctgcgacccccaggtggctgatgtgcgcaagacctgctttgaccctgactcacccaagagggcatacatgagtgtgaaggagctgaaggaggccctgcagctgaacagtactcacttcctcaacatctactttgccagctcagtgcgggaagaccttgcaggtgctgccacctggccttgggacaaggacgctgtcactcacctgggtggcattgtcctcagcccagcatattatgggatgcctggccacaccgacaccatgatccatgaagtgggacatgttctgggactctaccatgtctttaaaggagtcagtgaaagagaatcctgcaatgacccctgcaaggagacagtgccatccatggaaacgggagacctctgtgccgacaccgcccccactcccaagagtgagctgtgccgggaaccagagcccactagtgacacctgtggcttcactcgcttcccaggggctccgttcaccaactacatgagctacacggatgataactgcactgacaacttcactcctaaccaagtggcccgaatgcattgctatttggacctagtctatcagcagtggactgaaagcagaaagcccacccccatccccattccacctatggtcatcggacagaccaacaagtccctcactatccactggctgcctcctattagtggagttgtatatgacagggcctcaggcagcttgtgtggcgcttgcactgaagatgggacctttcgtcagtatgtgcacacagcttcctcccggcgggtgtgtgactcctcaggttattggaccccagaggaggctgtggggcctcctgatgtggatcagccctgcgagccaagcttacaggcctggagccctgaggtccacctgtaccacatgaacatgacggtcccctgccccacagaaggctgtagcttggagctgctcttccaacacccggtccaagccgacaccctcaccctgtgggtcacttccttcttcatggagtcctcgcaggtcctctttgacacagagatcttgctggaaaacaaggagtcagtgcacctgggccccttagacactttctgtgacatcccactcaccatcaaactgcacgtggatgggaaggtgtcgggggtgaaagtctacacctttgatgagaggatagagattgatgcagcactcctgacttctcagccccacagtcccttgtgctctggctgcaggcctgtgaggtaccaggttctccgcgatcccccatttgccagtggtttgcccgtggtggtgacacattctcacaggaagttcacggacgtggaggtcacacctggacagatgtatcagtaccaagttctagctgaagctggaggagaactgggagaagcttcgcctcctctgaaccacattcatggagctccttattgtggagatgggaaggtgtcagagagactgggagaagagtgtgatgatggagaccttgtgagcggagatggctgctccaaggtgtgtgagctggaggaaggtttcaactgtgtaggagagccaagcctttgctacatgtatgagggagatggcatatgtgaaccttttgagagaaaaaccagcattgtagactgtggcatctacactcccaaaggatacttggatcaatgggctacccgggcttactcctctcatgaagacaagaagaagtgtcctgtttccttggtaactggagaacctcattccctaatttgcacatcataccatccagatttacccagcggccgccatggtggaggggagggcaggctttttgagtaagagttcccctagtggacgtgggcttagggagagctagacgaggacagcatgagcaaaggtggggaggctgggcgatctgagggtcaatggagaagggcag

SEQ ID NO: 424209 - DNA, 4082 bp, Homo sapiens
tgggcatgactctctctcttgagtaggcacacactcccttttctcgggtgtgtactttttgctttgtgatacatctctgcactttcagtattttccaactcatccttaaattccttctcacaacagtgtcaagagcctggacgccagccaggattgaggtcctacgggtgtttggggacctccccaagcccacgagtatcaatggcagtatcaattgtctgtgacagtgattaaggagcaaaacacttggaacccacaagactcccagaaggtgaagttaagagctcccagactcataaggttattagaacagcaaactggcaccccaaagaactttacggagacttgcaacctatcaacaagttggatgagggattaaaagccttcaacaaccaacaaccccaagcatcaaactgaaggaaacattctaaccttcacagacagactggaggctggatggggacctggctgaagacatctggagaatgaaagttaagtaccagcttgcatttttgtgcccctagattatttttgcattttaaaataagaagcatcaaattgcgtgtctctgtgtaaaagttctagcaatttgttttaaggtgaacttattttggcttagggactacaaaaagagaaggtaattcctagggaaggaagaagagaaagaaatgaaaattagagaataagattattttgaatgacttcaggtagcgaggagtgtgtgtttgtgagtgtgtatttgagagacttggctcatgcctgtgggtcttctcttctagtatcagtgaggggagggattactgaagaagaaggggggaaaaaaaaagaaagaaatctgagctttctgggaggaaattcaaaggaaccaagagaaattaacttcgttctgcaaggactaaaatacagcaagaggagagaggtcaagcgagaagcgtgcgggaagcacatgccctggggaggcatagaagccacactggcagagcggccagcacaggtagccagcagaggcattcttggggctatttgaaaaagtttggtctgtgaacaaaacagtttccctggtgactgcaaatccattgctagctgcctctttctcgtctgcccatcactctggtgtggtacccagaagttgacttctggttctgtagaaagagctaggggaggtatgatgtgcttaaagatcctaagaataagcctggcgattttggctgggtgggcactctgttctgccaactctgagctgggctggacacgcaagaaatccttggttgagagggaacacctgaatcaggtgctgttggaaggagaacgttgttggctgggggccaaggttcgaagacccagagcttctccacagcatcacctctttggagtctaccccagcagggctgggaactacctaaggccctaccccgtgggggagcaagaaatccatcatacaggacgcagcaaaccagacactgaaggaaatgctgtgagccttgttcccccagacctgactgaaaatccagcaggactgaggggtgcagttgaagagccggctgccccatgggtaggggatagtcctattgggcaatctgagctgctgggagatgatgacgcttatctcggcaatcaaagatccaaggagtctctaggtgaggccgggattcagaaaggctcagccatggctgccactactaccaccgccattttcacaaccctgaacgaacccaaaccagagacccaaaggaggggctgggccaagtccaggcagcgtcgccaagtgtggaagaggcgggcggaagatgggcagggagactccggtatctcttcacatttccaaccttggcccaagcattcccttaaacacagggtcaaaaagagtccaccggaggaaagcaaccaaaatggtggagagggctcctaccgagaagcagagacctttaactcccaagtaggactgcccatcttatacttctctgggaggcgggagcggctgctgctgcgtccagaagtgctggctgagattccccgggaggcgttcacagtggaagcctgggttaaaccggagggaggacagaacaacccagccatcatcgcaggtgtgtttgataactgctcccacactgtcagtgacaaaggctgggccctggggatccgctcagggaaggacaagggaaagcgggatgctcgcttcttcttctccctctgcaccgaccgcgtgaagaaagccaccatcttgattagccacagtcgctaccaaccaggcacatggacccatgtggcagccacttacgatggacggcacatggccctgtatgtggatggcactcaggtggctagcagtctagaccagtctggtcccctgaacagccccttcatggcatcttgccgctctttgctcctggggggagacagctctgaggatgggcactatttccgtggacacctgggcacactggttttctggtcgaccgccctgccacaaagccattttcagcacagttctcagcattcaagtggggaggaggaagcgactgacttggtcctgacagcgagctttgagcctgtgaacacagagtgggttccctttagagatgagaagtacccacgacttgaggttctccagggctttgagccagagcctgagattctgtcgcctttgcagcccccactctgtgggcaaacagtctgtgacaatgtggaattgatctcccagtacaatggatactggccccttcggggagagaaggtgatacgctaccaggtggtgaacatctgtgatgatgagggcctaaaccccattgtgagtgaggagcagattcgtctgcagcacgaggcactgaatgaggccttcagccgctacaacatcagctggcagctgagcgtccaccaggtccacaattccaccctgcgacaccgggttgtgcttgtgaactgtgagcccagcaagattggcaatgaccattgtgaccccgagtgtgagcacccactcacaggctatgatgggggtgactgccgcctgcagggccgctgctactcctggaaccgcagggatgggctctgtcacgtggagtgtaacaacatgctgaacgactttgacgacggagactgctgcgacccccaggtggctgatgtgcgcaagacctgctttgaccctgactcacccaagagggcatacatgagtgtgaaggagctgaaggaggccctgcagctgaacagtactcacttcctcaacatctactttgccagctcagtgcgggaagaccttgcaggtgctgccacctggccttgggacaaggacgctgtcactcacctgggtggcattgtcctcagcccagcatattatgggatgcctggccacaccgacaccatgatccatgaagtgggacatgttctgggactctaccatgtctttaaaggagtcagtgaaagagaatcctgcaatgacccctgcaaggagacagtgccatccatggaaacgggagacctctgtgccgacaccgcccccactcccaagagtgagctgtgccgggaaccagagcccactagtgacacctgtggcttcactcgcttcccaggggctccgttcaccaactacatgagctacacgggtatcaccactgtcttgttttgttttctgttaagaatacatgggggcctttgagagctgggagggtggaggtgtgggagctgatgggagaatgattaagtggtcatttgtgtcggagagttgaagtgtatttattataaggtattattattttttcatgtctttgaagaacttgaagaaatactgacatattaaggtactttgttcactgaattctcctctactagatattttaaaatatacttctatcctcgatagtaaaaaaggcacagagccaaaagccctcttgtgatccccttgacttctagaatgtggttattcttatttttgcccgcattcttagacatttactctgaagaagagtccaatggaaataaaggaaaagagtttatgggtcaaggtggcccattgtactgtttttgaagttggtcaacaaggtggcttggttaatttaggctcagcatgttttactgtatgttactaaaaa

SEQ ID NO: 424210 - DNA, 2524 bp, Homo sapiens
ctccataatgtgggcccatccccataatgtgtgcccatctccataatgtgtgcccatcaccagaatgtccttttccaccataccacctcagtgctgctgaatttctcatccccacgggtcggcatctcagctgtggctctaaggacatcctcccgcattggtctttcggctcccagtaactgcatctcagaggacgaggggcagaatcatcagggacagagctgtatccatcggccctgtgggaagcaggacagctgtccgtcattgctgcttgatcatgctgatgtggtgaactgtacctctataggcccaggtctcatgaagtgtgctatcacttgtcaaaggggatttgcccttcaggccagcagtgggcagtacatcaggcccatgcagaaggaaattctgctcacatgttcttctgggcactgggaccagaatgtgagctgccttcccgtggactgcggtgttcccgacccgtctttggtgaactatgcaaacttctcctgctcagagggaaccaaatttctgaaacgctgctcaatctcttgtgtcccaccagccaagctgcaaggactgagcccatggctgacatgtcttgaagatggtctctggtctctccctgaagtctactgcaagttggagtgtgatgctccccctattattctgaatgccaacttgctcctgcctcactgcctccaggacaaccacgacgtgggcaccatctgcaaatatgaatgcaaaccagggtactatgtggcagaaagtgcagagggtaaagtcaggaacaagctcctgaagatacaatgcctggaaggtggaatctgggagcaaggcagctgcattcctgtggtgtgtgagccaccccctcctgtgtttgaaggcatgtatgaatgtaccaatggcttcagcctggacagccagtgtgtgctcaactgtaaccaggaacgtgaaaagcttcccatcctctgcactaaagagggcctgtggacccaggagtttaagttgtgtgagaatctgcaaggagaatgcccaccacccccctcagagctgaattctgtggagtacaaatgtgaacaaggatatgggattggtgcagtgtgttccccattgtgtgtaatcccccccagtgaccccgtgatgctacctgagaatatcactgctgacactctggagcactggatggaacctgtcaaagtccagagcattgtgtgcactggccggcgtcaatggcacccagaccccgtcttagtccactgcatccagtcatgtgagcccttccaagcagatggttggtgtgacactatcaacaaccgagcctactgccactatgacgggggagactgctgctcttccacactctcctccaagaaggtcattccatttgctgctgactgtgacctggatgagtgcacctgccgggaccccaaggcagaagaaaatcagtaactgtgggaacaagcccctccctccactgcctcagaggcagtaagaaagagaggccgacccaggaggaaacaaagggtgaatgaagaagaacaatcatgaaatggaagaaggaggaagagcatgaaggatcttataagaaatgcaagaggatattgataggtgtgaactagttcatcaagtagcccaagtaggagagaatcataggcaaaagtttctttaaagtggcagttgattaacatggaaggggaaatatgatagatatataaggaccctcctccctcatttatattctattaaatcctatcctcaactcttgccctgctctccgctccaccccctgccaactactcagtcccacccaacttgtaaaccaataccaaaatactagaggagaagttggcagggatactgttaatacccattttgaatggattgccatctttcagagcttgtctgctctcaactggctctttttctttttgtgtagtttcccttaaataatgaagttagttattaattctttataagtatttaaacataattatataaatatattatatatattatattttttgctgtttactaagctaaaaattattcattgttccacacatgctgctgtgaagttcacattcaagatgaatgttgagactttgaggacagaaaggcaacttattttcccatctttctatggatgcggattggcaggttgaatgggaagtacagaaggagagagagtaattagatggaattctggatgctagcatgtaaagctaatcatctttttttttatgacctgggagctgggcccattttatgaccaaggagatggggagttggaatggtggtactaagaggcataggaagttgagtgtgaataccattggtgatgggtccaggagaactagactatggttcttgaatatctgtccacacaagaatatactaacttttgtcaacttctcagaactcccaactggagtcggtgagacctaggattttctgcacttccacacatgcctgttccaagtgtggctgtcagccagtcaacaagtttgtactatggcccattctctga

SEQ ID NO: 424211 - DNA, 2105 bp, Homo sapiens
tacacacaatggggtacacactgcaccaatcccatatccttgttcacatttgtactccacagaattcagctctgaggggggtggtgggcattctccttgcaaatttctgaaacgctgctcaatctcttgtgtcccaccagccaagctgcaaggactgagcccatggctgacatgtcttgaagatggtctctggtctctccctgaagtctactgcaagttggagtgtgatgctccccctattattctgaatgccaacttgctcctgcctcactgcctccaggacaaccacgacgtgggcaccatctgcaaatatgaatgcaaaccagggtactatgtggcagaaagtgcagagggtaaagtcaggaacaagctcctgaagatacaatgcctggaaggtggaatctgggagcaaggcagctgcattcctgtggtgtgtgagccaccccctcctgtgtttgaaggcatgtatgaatgtaccaatggcttcagcctggacagccagtgtgtgctcaactgtaaccaggaacgtgaaaagcttcccatcctctgcactaaagagggcctgtggacccaggagtttaagttgtgtgagaatctgcaaggagaatgcccaccacccccctcagagctgaattctgtggagtacaaatgtgaacaaggatatgggattggtgcagtgtgttccccattgtgtgtaatcccccccagtgaccccgtgatgctacctgagaatatcactgctgacactctggagcactggatggaacctgtcaaagtccagagcattgtgtgcactggccggcgtcaatggcacccagaccccgtcttagtccactgcatccagtcatgtgagcccttccaagcagatggttggtgtgacactatcaacaaccgagcctactgccactatgacgggggagactgctgctcttccacactctcctccaagaaggtcattccatttgctgctgactgtgacctggatgagtgcacctgccgggaccccaaggcagaagaaaatcagtaactgtgggaacaagcccctccctccactgcctcagaggcagtaagaaagagaggccgacccaggaggaaacaaagggtgaatgaagaagaacaatcatgaaatggaagaaggaggaagagcatgaaggatcttataagaaatgcaagaggatattgataggtgtgaactagttcatcaagtagcccaagtaggagagaatcataggcaaaagtttctttaaagtggcagttgattaacatggaaggggaaatatgatagatatataaggaccctcctccctcatttatattctattaaatcctatcctcaactcttgccctgctctccgctccaccccctgccaactactcagtcccacccaacttgtaaaccaataccaaaatactagaggagaagttggcagggatactgttaatacccattttgaatggattgccatctttcagagcttgtctgctctcaactggctctttttctttttgtgtagtttcccttaaataatgaagttagttattaattctttataagtatttaaacataattatataaatatattatatatattatattttttgctgtttactaagctaaaaattattcattgttccacacatgctgctgtgaagttcacattcaagatgaatgttgagactttgaggacagaaaggcaacttattttcccatctttctatggatgcggattggcaggttgaatgggaagtacagaaggagagagagtaattagatggaattctggatgctagcatgtaaagctaatcatctttttttttatgacctgggagctgggcccattttatgaccaaggagatggggagttggaatggtggtactaagaggcataggaagttgagtgtgaataccattggtgatgggtccaggagaactagactatggttcttgaatatctgtccacacaagaatatactaacttttgtcaacttctcagaactcccaactggagtcggtgagacctaggattttctgcacttccacacatgcctgttccaagtgtggctgtcagccagtcaacaagtttgtactatggcccattctctga

SEQ ID NO: 424212 - DNA, 331 bp, Homo sapiens
agtggtcacaaaccctttggtttccacagggaggtcacacctggacagatgtatcagtaccaagttctagctgaagctggaggagaactgggagaagcttcgcctcctctgaaccacattcatggagctccttattgtggagatgggaaggtgtcagagtgagtattttggtgtgtgtgtgtgtgtgtgtgtgtgtgtgtgtgagagagagagagagagagagagagagggagagagagagagcaggcactgtgttctctaaacagaagtctcgggagtgtgacttgttgtggatatgtagggagcgaggccacatttgattcttgtgttg

SEQ ID NO: 424213 - DNA, 6184 bp, Homo sapiens
tcggtaacctctctgcctcccatattctccccagagatggcttctccgtcagcaggtagcgaggagtgtgtgtttgtgagtgtgtatttgagagacttggctcatgcctgtgggtcttctcttctagtatcagtgaggggagggattactgaagaagaaggggggaaaaaaaaagaaagaaatctgagctttctgggaggaaattcaaaggaaccaagagaaattaacttcgttctgcaaggactaaaatacagcaagaggagagaggtcaagcgagaagcgtgcgggaagcacatgccctggggaggcatagaagccacactggcagagcggccagcacaggtagccagcagaggcattcttggggctatttgaaaaagtttggtctgtgaacaaaacagtttccctggtgactgcaaatccattgctagctgcctctttctcgtctgcccatcactctggtgtggtacccagaagttgacttctggttctgtagaaagagctaggggaggtatgatgtgcttaaagatcctaagaataagcctggcgattttggctgggtgggcactctgttctgccaactctgagctgggctggacacgcaagaaatccttggttgagagggaacacctgaatcaggtgctgttggaaggagaacgttgttggctgggggccaaggttcgaagacccagagcttctccacagcatcacctctttggagtctaccccagcagggctgggaactacctaaggccctaccccgtgggggagcaagaaatccatcatacaggacgcagcaaaccagacactgaaggaaatgctgtgagccttgttcccccagacctgactgaaaatccagcaggactgaggggtgcagttgaagagccggctgccccatgggtaggggatagtcctattgggcaatctgagctgctgggagatgatgacgcttatctcggcaatcaaagatccaaggagtctctaggtgaggccgggattcagaaaggctcagccatggctgccactactaccaccgccattttcacaaccctgaacgaacccaaaccagagacccaaaggaggggctgggccaagtccaggcagcgtcgccaagtgtggaagaggcgggcggaagatgggcagggagactccggtatctcttcacatttccaaccttggcccaagcattcccttaaacacagggtcaaaaagagtccaccggaggaaagcaaccaaaatggtggagagggctcctaccgagaagcagagacctttaactcccaagtaggactgcccatcttatacttctctgggaggcgggagcggctgctgctgcgtccagaagtgctggctgagattccccgggaggcgttcacagtggaagcctgggttaaaccggagggaggacagaacaacccagccatcatcgcaggtgtgtttgataactgctcccacactgtcagtgacaaaggctgggccctggggatccgctcagggaaggacaagggaaagcgggatgctcgcttcttcttctccctctgcaccgaccgcgtgaagaaagccaccatcttgattagccacagtcgctaccaaccaggcacatggacccatgtggcagccacttacgatggacggcacatggccctgtatgtggatggcactcaggtggctagcagtctagaccagtctggtcccctgaacagccccttcatggcatcttgccgctctttgctcctggggggagacagctctgaggatgggcactatttccgtggacacctgggcacactggttttctggtcgaccgccctgccacaaagccattttcagcacagttctcagcattcaagtggggaggaggaagcgactgacttggtcctgacagcgagctttgagcctgtgaacacagagtgggttccctttagagatgagaagtacccacgacttgaggttctccagggctttgagccagagcctgagattctgtcgcctttgcagcccccactctgtgggcaaacagtctgtgacaatgtggaattgatctcccagtacaatggatactggccccttcggggagagaaggtgatacgctaccaggtggtgaacatctgtgatgatgagggcctaaaccccattgtgagtgaggagcagattcgtctgcagcacgaggcactgaatgaggccttcagccgctacaacatcagctggcagctgagcgtccaccaggtccacaattccaccctgcgacaccgggttgtgcttgtgaactgtgagcccagcaagattggcaatgaccattgtgaccccgagtgtgagcacccactcacaggctatgatgggggtgactgccgcctgcagggccgctgctactcctggaaccgcagggatgggctctgtcacgtggagtgtaacaacatgctgaacgactttgacgacggagactgctgcgacccccaggtggctgatgtgcgcaagacctgctttgaccctgactcacccaagagggcatacatgagtgtgaaggagctgaaggaggccctgcagctgaacagtactcacttcctcaacatctactttgccagctcagtgcgggaagaccttgcaggtgctgccacctggccttgggacaaggacgctgtcactcacctgggtggcattgtcctcagcccagcatattatgggatgcctggccacaccgacaccatgatccatgaagtgggacatgttctgggactctaccatgtctttaaaggagtcagtgaaagagaatcctgcaatgacccctgcaaggagacagtgccatccatggaaacgggagacctctgtgccgacaccgcccccactcccaagagtgagctgtgccgggaaccagagcccactagtgacacctgtggcttcactcgcttcccaggggctccgttcaccaactacatgagctacacggatgataactgcactgacaacttcactcctaaccaagtggcccgaatgcattgctatttggacctagtctatcagcagtggactgaaagcagaaagcccacccccatccccattccacctatggtcatcggacagaccaacaagtccctcactatccactggctgcctcctattagtggagttgtatatgacagggcctcaggcagcttgtgtggcgcttgcactgaagatgggacctttcgtcagtatgtgcacacagcttcctcccggcgggtgtgtgactcctcaggttattggaccccagaggaggctgtggggcctcctgatgtggatcagccctgcgagccaagcttacaggcctggagccctgaggtccacctgtaccacatgaacatgacggtcccctgccccacagaaggctgtagcttggagctgctcttccaacacccggtccaagccgacaccctcaccctgtgggtcacttccttcttcatggagtcctcgcaggtcctctttgacacagagatcttgctggaaaacaaggagtcagtgcacctgggccccttagacactttctgtgacatcccactcaccatcaaactgcacgtggatgggaaggtgtcgggggtgaaagtctacacctttgatgagaggatagagattgatgcagcactcctgacttctcagccccacagtcccttgtgctctggctgcaggcctgtgaggtaccaggttctccgcgatcccccatttgccagtggtttgcccgtggtggtgacacattctcacaggaagttcacggacgtggaggtcacacctggacagatgtatcagtaccaagttctagctgaagctggaggagaactgggagaagcttcgcctcctctgaaccacattcatggagctccttattgtggagatgggaaggtgtcagagagactgggagaagagtgtgatgatggagaccttgtgagcggagatggctgctccaaggtgtgtgagctggaggaaggtttcaactgtgtaggagagccaagcctttgctacatgtatgagggagatggcatatgtgaaccttttgagagaaaaaccagcattgtagactgtggcatctacactcccaaaggatacttggatcaatgggctacccgggcttactcctctcatgaagacaagaagaagtgtcctgtttccttggtaactggagaacctcattccctaatttgcacatcataccatccagatttacccaaccaccgtcccctaactggctggtttccctgtgttgccagtgaaaatgaaactcaggatgacaggagtgaacagccagaaggtagcctgaagaaagaggatgaggtttggctcaaagtgtgtttcaatagaccaggagaggccagagcaatttttatttttttgacaactgatggcctagttcccggagagcatcagcagccgacagtgactctctacctgaccgatgtccgtggaagcaaccactctcttggaacctatggactgtcatgccagcataatccactgattatcaatgtgacccatcaccagaatgtccttttccaccataccacctcagtgctgctgaatttctcatccccacgggtcggcatctcagctgtggctctaaggacatcctcccgcattggtctttcggctcccagtaactgcatctcagaggacgaggggcagaatcatcagggacagagctgtatccatcggccctgtgggaagcaggacagctgtccgtcattgctgcttgatcatgctgatgtggtgaactgtacctctataggcccaggtctcatgaagtgtgctatcacttgtcaaaggggatttgcccttcaggccagcagtgggcagtacatcaggcccatgcagaaggaaattctgctcacatgttcttctgggcactgggaccagaatgtgagctgccttcccgtggactgcggtgttcccgacccgtctttggtgaactatgcaaacttctcctgctcagagggaaccaaatttctgaaacgctgctcaatctcttgtgtcccaccagccaagctgcaaggactgagcccatggctgacatgtcttgaagatggtctctggtctctccctgaagtctactgcaagttggagtgtgatgctccccctattattctgaatgccaacttgctcctgcctcactgcctccaggacaaccacgacgtgggcaccatctgcaaatatgaatgcaaaccagggtactatgtggcagaaagtgcagagggtaaagtcaggaacaagctcctgaagatacaatgcctggaaggtggaatctgggagcaaggcagctgcattcctgtggtgtgtgagccaccccctcctgtgtttgaaggcatgtatgaatgtaccaatggcttcagcctggacagccagtgtgtgctcaactgtaaccaggaacgtgaaaagcttcccatcctctgcactaaagagggcctgtggacccaggagtttaagttgtgtgagaatctgcaaggagaatgcccaccacccccctcagagctgaattctgtggagtacaaatgtgaacaaggatatgggattggtgcagtgtgttccccattgtgtgtaatcccccccagtgaccccgtgatgctacctgagaatatcactgctgacactctggagcactggatggaacctgtcaaagtccagagcattgtgtgcactggccggcgtcaatggcacccagaccccgtcttagtccactgcatccagtcatgtgagcccttccaagcagatggttggtgtgacactatcaacaaccgagcctactgccactatgacgggggagactgctgctcttccacactctcctccaagaaggtcattccatttgctgctgactgtgacctggatgagtgcacctgccgggaccccaaggcagaagaaaatcagtaactgtgggaacaagcccctccctccactgcctcagaggcagtaagaaagagaggccgacccaggaggaaacaaagggtgaatgaagaagaacaatcatgaaatggaagaaggaggaagagcatgaaggatcttataagaaatgcaagaggatattgataggtgtgaactagttcatcaagtagcccaagtaggagagaatcataggcaaaagtttctttaaagtggcagttgattaacatggaaggggaaatatgatagatatataaggaccctccacctgcccgggcggccgctc

SEQ ID NO: 424214 - DNA, 7246 bp, Homo sapiens
  misc_feature (6976)..(6976): n is a, c, g, or t
tgggcatgactctctctcttgagtaggcacacactcccttttctcgggtgtgtactttttgctttgtgatacatctctgcactttcagtattttccaactcatccttaaattccttctcacaacagtgtcaagagcctggacgccagccaggattgaggtcctacgggtgtttggggacctccccaagcccacgagtatcaatggcagtatcaattgtctgtgacagtgattaaggagcaaaacacttggaacccacaagactcccagaaggtgaagttaagagctcccagactcataaggttattagaacagcaaactggcaccccaaagaactttacggagacttgcaacctatcaacaagttggatgagggattaaaagccttcaacaaccaacaaccccaagcatcaaactgaaggaaacattctaaccttcacagacagactggaggctggatggggacctggctgaagacatctggagaatgaaagttaagtaccagcttgcatttttgtgcccctagattatttttgcattttaaaataagaagcatcaaattgcgtgtctctgtgtaaaagttctagcaatttgttttaaggtgaacttattttggcttagggactacaaaaagagaaggtaattcctagggaaggaagaagagaaagaaatgaaaattagagaataagattattttgaatgacttcaggtagcgaggagtgtgtgtttgtgagtgtgtatttgagagacttggctcatgcctgtgggtcttctcttctagtatcagtgaggggagggattactgaagaagaaggggggaaaaaaaaagaaagaaatctgagctttctgggaggaaattcaaaggaaccaagagaaattaacttcgttctgcaaggactaaaatacagcaagaggagagaggtcaagcgagaagcgtgcgggaagcacatgccctggggaggcatagaagccacactggcagagcggccagcacaggtagccagcagaggcattcttggggctatttgaaaaagtttggtctgtgaacaaaacagtttccctggtgactgcaaatccattgctagctgcctctttctcgtctgcccatcactctggtgtggtacccagaagttgacttctggttctgtagaaagagctaggggaggtatgatgtgcttaaagatcctaagaataagcctggcgattttggctgggtgggcactctgttctgccaactctgagctgggctggacacgcaagaaatccttggttgagagggaacacctgaatcaggtgctgttggaaggagaacgttgttggctgggggccaaggttcgaagacccagagcttctccacagcatcacctctttggagtctaccccagcagggctgggaactacctaaggccctaccccgtgggggagcaagaaatccatcatacaggacgcagcaaaccagacactgaaggaaatgctgtgagccttgttcccccagacctgactgaaaatccagcaggactgaggggtgcagttgaagagccggctgccccatgggtaggggatagtcctattgggcaatctgagctgctgggagatgatgacgcttatctcggcaatcaaagatccaaggagtctctaggtgaggccgggattcagaaaggctcagccatggctgccactactaccaccgccattttcacaaccctgaacgaacccaaaccagagacccaaaggaggggctgggccaagtccaggcagcgtcgccaagtgtggaagaggcgggcggaagatgggcagggagactccggtatctcttcacatttccaaccttggcccaagcattcccttaaacacagggtcaaaaagagtccaccggaggaaagcaaccaaaatggtggagagggctcctaccgagaagcagagacctttaactcccaagtaggactgcccatcttatacttctctgggaggcgggagcggctgctgctgcgtccagaagtgctggctgagattccccgggaggcgttcacagtggaagcctgggttaaaccggagggaggacagaacaacccagccatcatcgcaggtgtgtttgataactgctcccacactgtcagtgacaaaggctgggccctggggatccgctcagggaaggacaagggaaagcgggatgctcgcttcttcttctccctctgcaccgaccgcgtgaagaaagccaccatcttgattagccacagtcgctaccaaccaggcacatggacccatgtggcagccacttacgatggacggcacatggccctgtatgtggatggcactcaggtggctagcagtctagaccagtctggtcccctgaacagccccttcatggcatcttgccgctctttgctcctggggggagacagctctgaggatgggcactatttccgtggacacctgggcacactggttttctggtcgaccgccctgccacaaagccattttcagcacagttctcagcattcaagtggggaggaggaagcgactgacttggtcctgacagcgagctttgagcctgtgaacacagagtgggttccctttagagatgagaagtacccacgacttgaggttctccagggctttgagccagagcctgagattctgtcgcctttgcagcccccactctgtgggcaaacagtctgtgacaatgtggaattgatctcccagtacaatggatactggccccttcggggagagaaggtgatacgctaccaggtggtgaacatctgtgatgatgagggcctaaaccccattgtgagtgaggagcagattcgtctgcagcacgaggcactgaatgaggccttcagccgctacaacatcagctggcagctgagcgtccaccaggtccacaattccaccctgcgacaccgggttgtgcttgtgaactgtgagcccagcaagattggcaatgaccattgtgaccccgagtgtgagcacccactcacaggctatgatgggggtgactgccgcctgcagggccgctgctactcctggaaccgcagggatgggctctgtcacgtggagtgtaacaacatgctgaacgactttgacgacggagactgctgcgacccccaggtggctgatgtgcgcaagacctgctttgaccctgactcacccaagagggcatacatgagtgtgaaggagctgaaggaggccctgcagctgaacagtactcacttcctcaacatctactttgccagctcagtgcgggaagaccttgcaggtgctgccacctggccttgggacaaggacgctgtcactcacctgggtggcattgtcctcagcccagcatattatgggatgcctggccacaccgacaccatgatccatgaagtgggacatgttctgggactctaccatgtctttaaaggagtcagtgaaagagaatcctgcaatgacccctgcaaggagacagtgccatccatggaaacgggagacctctgtgccgacaccgcccccactcccaagagtgagctgtgccgggaaccagagcccactagtgacacctgtggcttcactcgcttcccaggggctccgttcaccaactacatgagctacacggatgataactgcactgacaacttcactcctaaccaagtggcccgaatgcattgctatttggacctagtctatcagcagtggactgaaagcagaaagcccacccccatccccattccacctatggtcatcggacagaccaacaagtccctcactatccactggctgcctcctattagtggagttgtatatgacagggcctcaggcagcttgtgtggcgcttgcactgaagatgggacctttcgtcagtatgtgcacacagcttcctcccggcgggtgtgtgactcctcaggttattggaccccagaggaggctgtggggcctcctgatgtggatcagccctgcgagccaagcttacaggcctggagccctgaggtccacctgtaccacatgaacatgacggtcccctgccccacagaaggctgtagcttggagctgctcttccaacacccggtccaagccgacaccctcaccctgtgggtcacttccttcttcatggagtcctcgcaggtcctctttgacacagagatcttgctggaaaacaaggagtcagtgcacctgggccccttagacactttctgtgacatcccactcaccatcaaactgcacgtggatgggaaggtgtcgggggtgaaagtctacacctttgatgagaggatagagattgatgcagcactcctgacttctcagccccacagtcccttgtgctctggctgcaggcctgtgaggtaccaggttctccgcgatcccccatttgccagtggtttgcccgtggtggtgacacattctcacaggaagttcacggacgtggaggtcacacctggacagatgtatcagtaccaagttctagctgaagctggaggagaactgggagaagcttcgcctcctctgaaccacattcatggagctccttattgtggagatgggaaggtgtcagagagactgggagaagagtgtgatgatggagaccttgtgagcggagatggctgctccaaggtgtgtgagctggaggaaggtttcaactgtgtaggagagccaagcctttgctacatgtatgagggagatggcatatgtgaaccttttgagagaaaaaccagcattgtagactgtggcatctacactcccaaaggatacttggatcaatgggctacccgggcttactcctctcatgaagacaagaagaagtgtcctgtttccttggtaactggagaacctcattccctaatttgcacatcataccatccagatttacccaaccaccgtcccctaactggctggtttccctgtgttgccagtgaaaatgaaactcaggatgacaggagtgaacagccagaaggtagcctgaagaaagaggatgaggtttggctcaaagtgtgtttcaatagaccaggagaggccagagcaatttttatttttttgacaactgatggcctagttcccggagagcatcagcagccgacagtgactctctacctgaccgatgtccgtggaagcaaccactctcttggaacctatggactgtcatgccagcataatccactgattatcaatgtgacccatcaccagaatgtccttttccaccataccacctcagtgctgctgaatttctcatccccacgggtcggcatctcagctgtggctctaaggacatcctcccgcattggtctttcggctcccagtaactgcatctcagaggacgaggggcagaatcatcagggacagagctgtatccatcggccctgtgggaagcaggacagctgtccgtcattgctgcttgatcatgctgatgtggtgaactgtacctctataggcccaggtctcatgaagtgtgctatcacttgtcaaaggggatttgcccttcaggccagcagtgggcagtacatcaggcccatgcagaaggaaattctgctcacatgttcttctgggcactgggaccagaatgtgagctgccttcccgtggactgcggtgttcccgacccgtctttggtgaactatgcaaacttctcctgctcagagggaaccaaatttctgaaacgctgctcaatctcttgtgtcccaccagccaagctgcaaggactgagcccatggctgacatgtcttgaagatggtctctggtctctccctgaagtctactgcaagttggagtgtgatgctccccctattattctgaatgccaacttgctcctgcctcactgcctccaggacaaccacgacgtgggcaccatctgcaaatatgaatgcaaaccagggtactatgtggcagaaagtgcagagggtaaagtcaggaacaagctcctgaagatacaatgcctggaaggtggaatctgggagcaaggcagctgcattcctgtggtgtgtgagccaccccctcctgtgtttgaaggcatgtatgaatgtaccaatggcttcagcctggacagccagtgtgtgctcaactgtaaccaggaacgtgaaaagcttcccatcctctgcactaaagagggcctgtggacccaggagtttaagttgtgtgagaatctgcaaggagaatgcccaccacccccctcagagctgaattctgtggagtacaaatgtgaacaaggatatgggattggtgcagtgtgttccccattgtgtgtaatcccccccagtgaccccgtgatgctacctgagaatatcactgctgacactctggagcactggatggaacctgtcaaagtccagagcattgtgtgcactggccggcgtcaatggcacccagaccccgtcttagtccactgcatccagtcatgtgagcccttccaagcagatggttggtgtgacactatcaacaaccgagcctactgccactatgacgggggagactgctgctcttccacactctcctccaagaaggtcattccatttgctgctgactgtgacctggatgagtgcacctgccgggaccccaaggcagaagaaaatcagtaactgtgggaacaagcccctccctccactgcctcagaggcagtaagaaagagaggccgacccaggaggaaacaaagggtgaatgaagaagaacaatcatgaaatggaagaaggaggaagagcatgaaggatcttataagaaatgcaagaggatattgataggtgtgaactagttcatcaagtagcccaagtaggagagaatcataggcaaaagtttctttaaagtggcagttgagagcagacaagctctttcttattatggcagggagtggggattggtcctactttctttctctggaaaggaaagcctccaagactccatgtgcttgggcagcttgagaaggcgttcagcaccacgcctagcaggcagaccttgaagcctcacctttagtctatctgcagaggtattcagttcctggcacaggggactagggcatntagagtatatgaggaggcattatggctgtgcaggagccttcatttcagcttcaattaatagggaagaatttatgatagctctatagatgctgaaaaggtatttcgtaagatttaaaatccatcccttattaacactcttagtaaattaagtctggaaagaaacaccctaatctagataaaggtctgtttcagaaacccacagtgatggcattctaaaagatcagaccgcccaggcattcccattaaagtcaggaaactagccaagggcat

SEQ ID NO: 424215 - DNA, 6535 bp, Homo sapiens
tgggcatgactctctctcttgagtaggcacacactcccttttctcgggtgtgtactttttgctttgtgatacatctctgcactttcagtattttccaactcatccttaaattccttctcacaacagtgtcaagagcctggacgccagccaggattgaggtcctacgggtgtttggggacctccccaagcccacgagtatcaatggcagtatcaattgtctgtgacagtgattaaggagcaaaacacttggaacccacaagactcccagaaggtgaagttaagagctcccagactcataaggttattagaacagcaaactggcaccccaaagaactttacggagacttgcaacctatcaacaagttggatgagggattaaaagccttcaacaaccaacaaccccaagcatcaaactgaaggaaacattctaaccttcacagacagactggaggctggatggggacctggctgaagacatctggagaatgaaagttaagtaccagcttgcatttttgtgcccctagattatttttgcattttaaaataagaagcatcaaattgcgtgtctctgtgtaaaagttctagcaatttgttttaaggtgaacttattttggcttagggactacaaaaagagaaggtaattcctagggaaggaagaagagaaagaaatgaaaattagagaataagattattttgaatgacttcaggtagcgaggagtgtgtgtttgtgagtgtgtatttgagagacttggctcatgcctgtgggtcttctcttctagtatcagtgaggggagggattactgaagaagaaggggggaaaaaaaaagaaagaaatctgagctttctgggaggaaattcaaaggaaccaagagaaattaacttcgttctgcaaggactaaaatacagcaagaggagagaggtcaagcgagaagcgtgcgggaagcacatgccctggggaggcatagaagccacactggcagagcggccagcacaggtagccagcagaggcattcttggggctatttgaaaaagtttggtctgtgaacaaaacagtttccctggtgactgcaaatccattgctagctgcctctttctcgtctgcccatcactctggtgtggtacccagaagttgacttctggttctgtagaaagagctaggggaggtatgatgtgcttaaagatcctaagaataagcctggcgattttggctgggtgggcactctgttctgccaactctgagctgggctggacacgcaagaaatccttggttgagagggaacacctgaatcaggtgctgttggaaggagaacgttgttggctgggggccaaggttcgaagacccagagcttctccacagcatcacctctttggagtctaccccagcagggctgggaactacctaaggccctaccccgtgggggagcaagaaatccatcatacaggacgcagcaaaccagacactgaaggaaatgctgtgagccttgttcccccagacctgactgaaaatccagcaggactgaggggtgcagttgaagagccggctgccccatgggtaggggatagtcctattgggcaatctgagctgctgggagatgatgacgcttatctcggcaatcaaagatccaaggagtctctaggtgaggccgggattcagaaaggctcagccatggctgccactactaccaccgccattttcacaaccctgaacgaacccaaaccagagacccaaaggaggggctgggccaagtccaggcagcgtcgccaagtgtggaagaggcgggcggaagatgggcagggagactccggtatctcttcacatttccaaccttggcccaagcattcccttaaacacagggtcaaaaagagtccaccggaggaaagcaaccaaaatggtggagagggctcctaccgagaagcagagacctttaactcccaagtaggactgcccatcttatacttctctgggaggcgggagcggctgctgctgcgtccagaagtgctggctgagattccccgggaggcgttcacagtggaagcctgggttaaaccggagggaggacagaacaacccagccatcatcgcaggtgtgtttgataactgctcccacactgtcagtgacaaaggctgggccctggggatccgctcagggaaggacaagggaaagcgggatgctcgcttcttcttctccctctgcaccgaccgcgtgaagaaagccaccatcttgattagccacagtcgctaccaaccaggcacatggacccatgtggcagccacttacgatggacggcacatggccctgtatgtggatggcactcaggtggctagcagtctagaccagtctggtcccctgaacagccccttcatggcatcttgccgctctttgctcctggggggagacagctctgaggatgggcactatttccgtggacacctgggcacactggttttctggtcgaccgccctgccacaaagccattttcagcacagttctcagcattcaagtggggaggaggaagcgactgacttggtcctgacagcgagctttgagcctgtgaacacagagtgggttccctttagagatgagaagtacccacgacttgaggttctccagggctttgagccagagcctgagattctgtcgcctttgcagcccccactctgtgggcaaacagtctgtgacaatgtggaattgatctcccagtacaatggatactggccccttcggggagagaaggtgatacgctaccaggtggtgaacatctgtgatgatgagggcctaaaccccattgtgagtgaggagcagattcgtctgcagcacgaggcactgaatgaggccttcagccgctacaacatcagctggcagctgagcgtccaccaggtccacaattccaccctgcgacaccgggttgtgcttgtgaactgtgagcccagcaagattggcaatgaccattgtgaccccgagtgtgagcacccactcacaggctatgatgggggtgactgccgcctgcagggccgctgctactcctggaaccgcagggatgggctctgtcacgtggagtgtaacaacatgctgaacgactttgacgacggagactgctgcgacccccaggtggctgatgtgcgcaagacctgctttgaccctgactcacccaagagggcatacatgagtgtgaaggagctgaaggaggccctgcagctgaacagtactcacttcctcaacatctactttgccagctcagtgcgggaagaccttgcaggtgctgccacctggccttgggacaaggacgctgtcactcacctgggtggcattgtcctcagcccagcatattatgggatgcctggccacaccgacaccatgatccatgaagtgggacatgttctgggactctaccatgtctttaaaggagtcagtgaaagagaatcctgcaatgacccctgcaaggagacagtgccatccatggaaacgggagacctctgtgccgacaccgcccccactcccaagagtgagctgtgccgggaaccagagcccactagtgacacctgtggcttcactcgcttcccaggggctccgttcaccaactacatgagctacacggatgataactgcactgacaacttcactcctaaccaagtggcccgaatgcattgctatttggacctagtctatcagcagtggactgaaagcagaaagcccacccccatccccattccacctatggtcatcggacagaccaacaagtccctcactatccactggctgcctcctattagtggagttgtatatgacagggcctcaggcagcttgtgtggcgcttgcactgaagatgggacctttcgtcagtatgtgcacacagcttcctcccggcgggtgtgtgactcctcaggttattggaccccagaggaggctgtggggcctcctgatgtggatcagccctgcgagccaagcttacaggcctggagccctgaggtccacctgtaccacatgaacatgacggtcccctgccccacagaaggctgtagcttggagctgctcttccaacacccggtccaagccgacaccctcaccctgtgggtcacttccttcttcatggagtcctcgcaggtcctctttgacacagagatcttgctggaaaacaaggagtcagtgcacctgggccccttagacactttctgtgacatcccactcaccatcaaactgcacgtggatgggaaggtgtcgggggtgaaagtctacacctttgatgagaggatagagattgatgcagcactcctgacttctcagccccacagtcccttgtgctctggctgcaggcctgtgaggtaccaggttctccgcgatcccccatttgccagtggtttgcccgtggtggtgacacattctcacaggaagttcacggacgtggaggtcacacctggacagatgtatcagtaccaagttctagctgaagctggaggagaactgggagaagcttcgcctcctctgaaccacattcatggagctccttattgtggagatgggaaggtgtcagagagactgggagaagagtgtgatgatggagaccttgtgagcggagatggctgctccaaggtgtgtgagctggaggaaggtttcaactgtgtaggagagccaagcctttgctacatgtatgagggagatggcatatgtgaaccttttgagagaaaaaccagcattgtagactgtggcatctacactcccaaaggatacttggatcaatgggctacccgggcttactcctctcatgaagacaagaagaagtgtcctgtttccttggtaactggagaacctcattccctaatttgcacatcataccatccagatttacccaaccaccgtcccctaactggctggtttccctgtgttgccagtgaaaatgaaactcaggatgacaggagtgaacagccagaaggtagcctgaagaaagaggatgaggtttggctcaaagtgtgtttcaatagaccaggagaggccagagcaatttttatttttttgacaactgatggcctagttcccggagagcatcagcagccgacagtgactctctacctgaccgatgtccgtggaagcaaccactctcttggaacctatggactgtcatgccagcataatccactgattatcaatgtgacccatcaccagaatgtccttttccaccataccacctcagtgctgctgaatttctcatccccacgggtcggcatctcagctgtggctctaaggacatcctcccgcattggtctttcggctcccagtaactgcatctcagaggacgaggggcagaatcatcagggacagagctgtatccatcggccctgtgggaagcaggacagctgtccgtcattgctgcttgatcatgctgatgtggtgaactgtacctctataggcccaggtctcatgaagtgtgctatcacttgtcaaaggggatttgcccttcaggccagcagtgggcagtacatcaggcccatgcagaaggaaattctgctcacatgttcttctgggcactgggaccagaatgtgagctgccttcccgtggactgcggtgttcccgacccgtctttggtgaactatgcaaacttctcctgctcagagggaaccaaatttctgaaacgctgctcaatctcttgtgtcccaccagccaagctgcaaggactgagcccatggctgacatgtcttgaagatggtctctggtctctccctgaagtctactgcaagttggagtgtgatgctccccctattattctgaatgccaacttgctcctgcctcactgcctccaggacaaccacgacgtgggcaccatctgcaaatatgaatgcaaaccagggtactatgtggcagaaagtgcagagggtaaagtcaggaacaagctcctgaagatacaatgcctggaaggtggaatctgggagcaaggcagctgcattcctgtggtgtgtgagccaccccctcctgtgtttgaaggcatgtatgaatgtaccaatggcttcagcctggacagccagtgtgtgctcaactgtaaccaggaacgtgaaaagcttcccatcctctgcactaaagagggcctgtggacccaggagtttaagttgtgtgagaatctgcaaggagaatgcccaccacccccctcagagctgaattctgtggagtacaaatgtgaacaaggatatgggattggtgcagtgtgttccccattgtgtgtaatcccccccagtgaccccgtgatgctacctgagaatatcactgctgacactctggagcactggatggaacctgtcaaagtccagagcattgtgtgcactggccggcgtcaatggcacccagaccccgtcttagtccactgcatccagtcatgtgagacacatctttcagattcctcagaaccatccagtcctaagctcttctccatggggcctagatgttgtggagccagctcctaaaagcagatttccctcacccccaaaatctggattaggtatttaactcctgttcacatcttgatgctacactgaactatcacatgagct

SEQ ID NO: 424216 - DNA, 4848 bp, Homo sapiens
tgggcatgactctctctcttgagtaggcacacactcccttttctcgggtgtgtactttttgctttgtgatacatctctgcactttcagtattttccaactcatccttaaattccttctcacaacagtgtcaagagcctggacgccagccaggattgaggtcctacgggtgtttggggacctccccaagcccacgagtatcaatggcagtatcaattgtctgtgacagtgattaaggagcaaaacacttggaacccacaagactcccagaaggtgaagttaagagctcccagactcataaggttattagaacagcaaactggcaccccaaagaactttacggagacttgcaacctatcaacaagttggatgagggattaaaagccttcaacaaccaacaaccccaagcatcaaactgaaggaaacattctaaccttcacagacagactggaggctggatggggacctggctgaagacatctggagaatgaaagttaagtaccagcttgcatttttgtgcccctagattatttttgcattttaaaataagaagcatcaaattgcgtgtctctgtgtaaaagttctagcaatttgttttaaggtgaacttattttggcttagggactacaaaaagagaaggtaattcctagggaaggaagaagagaaagaaatgaaaattagagaataagattattttgaatgacttcaggtagcgaggagtgtgtgtttgtgagtgtgtatttgagagacttggctcatgcctgtgggtcttctcttctagtatcagtgaggggagggattactgaagaagaaggggggaaaaaaaaagaaagaaatctgagctttctgggaggaaattcaaaggaaccaagagaaattaacttcgttctgcaaggactaaaatacagcaagaggagagaggtcaagcgagaagcgtgcgggaagcacatgccctggggaggcatagaagccacactggcagagcggccagcacaggtagccagcagaggcattcttggggctatttgaaaaagtttggtctgtgaacaaaacagtttccctggtgactgcaaatccattgctagctgcctctttctcgtctgcccatcactctggtgtggtacccagaagttgacttctggttctgtagaaagagctaggggaggtatgatgtgcttaaagatcctaagaataagcctggcgattttggctgggtgggcactctgttctgccaactctgagctgggctggacacgcaagaaatccttggttgagagggaacacctgaatcaggtgctgttggaaggagaacgttgttggctgggggccaaggttcgaagacccagagcttctccacagcatcacctctttggagtctaccccagcagggctgggaactacctaaggccctaccccgtgggggagcaagaaatccatcatacaggacgcagcaaaccagacactgaaggaaatgctgtgagccttgttcccccagacctgactgaaaatccagcaggactgaggggtgcagttgaagagccggctgccccatgggtaggggatagtcctattgggcaatctgagctgctgggagatgatgacgcttatctcggcaatcaaagatccaaggagtctctaggtgaggccgggattcagaaaggctcagccatggctgccactactaccaccgccattttcacaaccctgaacgaacccaaaccagagacccaaaggaggggctgggccaagtccaggcagcgtcgccaagtgtggaagaggcgggcggaagatgggcagggagactccggtatctcttcacatttccaaccttggcccaagcattcccttaaacacagggtcaaaaagagtccaccggaggaaagcaaccaaaatggtggagagggctcctaccgagaagcagagacctttaactcccaagtaggactgcccatcttatacttctctgggaggcgggagcggctgctgctgcgtccagaagtgctggctgagattccccgggaggcgttcacagtggaagcctgggttaaaccggagggaggacagaacaacccagccatcatcgcaggtgtgtttgataactgctcccacactgtcagtgacaaaggctgggccctggggatccgctcagggaaggacaagggaaagcgggatgctcgcttcttcttctccctctgcaccgaccgcgtgaagaaagccaccatcttgattagccacagtcgctaccaaccaggcacatggacccatgtggcagccacttacgatggacggcacatggccctgtatgtggatggcactcaggtggctagcagtctagaccagtctggtcccctgaacagccccttcatggcatcttgccgctctttgctcctggggggagacagctctgaggatgggcactatttccgtggacacctgggcacactggttttctggtcgaccgccctgccacaaagccattttcagcacagttctcagcattcaagtggggaggaggaagcgactgacttggtcctgacagcgagctttgagcctgtgaacacagagtgggttccctttagagatgagaagtacccacgacttgaggttctccagggctttgagccagagcctgagattctgtcgcctttgcagcccccactctgtgggcaaacagtctgtgacaatgtggaattgatctcccagtacaatggatactggccccttcggggagagaaggtgatacgctaccaggtggtgaacatctgtgatgatgagggcctaaaccccattgtgagtgaggagcagattcgtctgcagcacgaggcactgaatgaggccttcagccgctacaacatcagctggcagctgagcgtccaccaggtccacaattccaccctgcgacaccgggttgtgcttgtgaactgtgagcccagcaagattggcaatgaccattgtgaccccgagtgtgagcacccactcacaggctatgatgggggtgactgccgcctgcagggccgctgctactcctggaaccgcagggatgggctctgtcacgtggagtgtaacaacatgctgaacgactttgacgacggagactgctgcgacccccaggtggctgatgtgcgcaagacctgctttgaccctgactcacccaagagggcatacatgagtgtgaaggagctgaaggaggccctgcagctgaacagtactcacttcctcaacatctactttgccagctcagtgcgggaagaccttgcaggtgctgccacctggccttgggacaaggacgctgtcactcacctgggtggcattgtcctcagcccagcatattatgggatgcctggccacaccgacaccatgatccatgaagtgggacatgttctgggactctaccatgtctttaaaggagtcagtgaaagagaatcctgcaatgacccctgcaaggagacagtgccatccatggaaacgggagacctctgtgccgacaccgcccccactcccaagagtgagctgtgccgggaaccagagcccactagtgacacctgtggcttcactcgcttcccaggggctccgttcaccaactacatgagctacacggatgataactgcactgacaacttcactcctaaccaagtggcccgaatgcattgctatttggacctagtctatcagcagtggactgaaagcagaaagcccacccccatccccattccacctatggtcatcggacagaccaacaagtccctcactatccactggctgcctcctattagtggagttgtatatgacagggcctcaggcagcttgtgtggcgcttgcactgaagatgggacctttcgtcagtatgtgcacacagcttcctcccggcgggtgtgtgactcctcaggttattggaccccagaggaggctgtggggcctcctgatgtggatcagccctgcgagccaagcttacaggcctggagccctgaggtccacctgtaccacatgaacatgacggtcccctgccccacagaaggctgtagcttggagctgctcttccaacacccggtccaagccgacaccctcaccctgtgggtcacttccttcttcatggagtcctcgcaggtcctctttgacacagagatcttgctggaaaacaaggagtcagtgcacctgggccccttagacactttctgtgacatcccactcaccatcaaactgcacgtggatgggaaggtgtcgggggtgaaagtctacacctttgatgagaggatagagattgatgcagcactcctgacttctcagccccacagtcccttgtgctctggctgcaggcctgtgaggtaccaggttctccgcgatcccccatttgccagtggtttgcccgtggtggtgacacattctcacaggaagttcacggacgtggaggtcacacctggacagatgtatcagtaccaagttctagctgaagctggaggagaactgggagaagcttcgcctcctctgaaccacattcatggagctccttattgtggagatgggaaggtgtcagagtgagtattttggtgtgtgtgtgtgtgtgtgtgtgtgtgtgtgtgagagagagagagagagagagagagagggagagagagagagcaggcactgtgttctctaaacagaagtctcgggagtgtgacttgttgtggatatgtagggagcgaggccacatttgattcttgtgttgaaattctaaaatctgggacttggttgtgtcaggtcttgagatctggcatctctacatagttatggaggaacccacttttacttatagctaaccccagagtattgaggtattgaggccgattatctgggggccccttttatggcct

SEQ ID NO: 424217 - DNA, 2117 bp, Homo sapiens
tgggcatgactctctctcttgagtaggcacacactcccttttctcgggtgtgtactttttgctttgtgatacatctctgcactttcagtattttccaactcatccttaaattccttctcacaacagtgtcaagagcctggacgccagccaggattgaggtcctacgggtgtttggggacctccccaagcccacgagtatcaatggcagtatcaattgtctgtgacagtgattaaggagcaaaacacttggaacccacaagactcccagaaggtgaagttaagagctcccagactcataaggttattagaacagcaaactggcaccccaaagaactttacggagacttgcaacctatcaacaagttggatgagggattaaaagccttcaacaaccaacaaccccaagcatcaaactgaaggaaacattctaaccttcacagacagactggaggctggatggggacctggctgaagacatctggagaatgaaagttaagtaccagcttgcatttttgtgcccctagattatttttgcattttaaaataagaagcatcaaattgcgtgtctctgtgtaaaagttctagcaatttgttttaaggtgaacttattttggcttagggactacaaaaagagaaggtaattcctagggaaggaagaagagaaagaaatgaaaattagagaataagattattttgaatgacttcaggtagcgaggagtgtgtgtttgtgagtgtgtatttgagagacttggctcatgcctgtgggtcttctcttctagtatcagtgaggggagggattactgaagaagaaggggggaaaaaaaaagaaagaaatctgagctttctgggaggaaattcaaaggaaccaagagaaattaacttcgttctgcaaggactaaaatacagcaagaggagagaggtcaagcgagaagcgtgcgggaagcacatgccctggggaggcatagaagccacactggcagagcggccagcacaggtagccagcagaggcattcttggggctatttgaaaaagtttggtctgtgaacaaaacagtttccctggtgactgcaaatccattgctagctgcctctttctcgtctgcccatcactctggtgtggtacccagaagttgacttctggttctgtagaaagagctaggggaggtatgatgtgcttaaagatcctaagaataagcctggcgattttggctgggtgggcactctgttctgccaactctgagctgggctggacacgcaagaaatccttggttgagagggaacacctgaatcaggtgctgttggaaggagaacgttgttggctgggggccaaggttcgaagacccagagcttctccacagcatcacctctttggagtctaccccagcagggctgggaactacctaaggccctaccccgtgggggagcaagaaatccatcatacaggacgcagcaaaccagacactgaaggaaatgctgtgagccttgttcccccagacctgactgaaaatccagcaggactgaggggtgcagttgaagagccggctgccccatgggtaggggatagtcctattgggcaatctgagctgctgggagatgatgacgcttatctcggcaatcaaagatccaaggagtctctaggtgaggccgggattcagaaaggctcagccatggctgccactactaccaccgccattttcacaaccctgaacgaacccaaaccagagacccaaaggaggggctgggccaagtccaggcagcgtcgccaagtgtggaagaggcgggcggaagatgggcagggagactccggtatctcttcacatttccaaccttggcccaagcattcccttaaacacagggtcaaaaagagtccaccggaggaaagcaaccaaaatggtggagagggctcctaccgagaagcagagacctttaactcccaagtaggactgcccatcttatacttctctgggaggcgggagcggctgctgctgcgtccagaagtgctggctgagattccccgggaggcgttcacagtggaagcctgggttaaaccggagggaggacagaacaacccagccatcatcgcaggtaacacccttctcctgggctttctgaacctcc

SEQ ID NO: 424218 - DNA, 418 bp, Homo sapiens
gagctgcaaagtcattgctcctccttactggttctcaaccagtcctaagatggttctatttctcttatcccagctgtatccatcggccctgtgggaagcaggacagctgtccgtcattgctgcttgatcatgctgatgtggtgaactgtacctctataggcccaggtctcatgaagtgtgctatcacttgtcaaaggggatttgcccttcaggccagcagtgggcagtacatcaggcccatgcaggtgagttgaaagaacactatcaccaggaccaagttcctgggaaggggaggtattcacactcttctctctggctccacagggaaagagcagatgtttttaaaccatttgaaagcaaaacatgggggctctaacaagcagagagaatgatggcttaatagaaatgcaaggtatat

SEQ ID NO: 424219 - DNA, 5090 bp, Homo sapiens
  misc_feature (1976)..(1976): n is a, c, g, or t
  misc_feature (4040)..(4040): n is a, c, g, or t
  misc_feature (4043)..(4043): n is a, c, g, or t
  misc_feature (4067)..(4067): n is a, c, g, or t
gaaactggatacatggtttacagcaggtcactaatgttggaaaaagtacagagtccagggaaagacttgcttgtaactttatgaattctggatttttttttttcctttgctttttcttaactttcactaagggttactgtagtctgatgtgtccttcccaaggccacgaaatttgacaagctgcacttttcttttgctcaatgatttctgctttaagccaaagaactgcctataatttcactaagaatgtcttctaattcagatactggggatttacaagagtctttaaagcacggacttacacctattggtgctgggcttccggaccgacacggatcccccatccccgcccgcggtcgccttgtcatgctgcccaaagtggagacggaagccctgggactggctcgatcgcatggggaacagggccagatgccggaaaacatgcaagtgtctcaatttaaaatggtgaattactcctatgatgaagatctggaagagctttgtcccgtgtgtggagataaagtgtctgggtaccattatgggctcctcacctgtgaaagctgcaagggattttttaagcgaacagtccaaaataataaaaggtacacatgtatagaaaaccagaactgccaaattgacaaaacacagagaaagcgttgtccttactgtcgttttcaaaaatgtctaagtgttggaatgaagctagaagctgtaagggccgaccgaatgcgtggaggaaggaataagtttgggccaatgtacaagagagacagggccctgaagcaacagaaaaaagccctcatccgagccaatggacttaagctagaagccatgtctcaggtgatccaagctatgccctctgacctgaccatttcctctgcaattcaaaacatccactctgcctccaaaggcctacctctgaaccatgctgccttgcctcctacagactatgacagaagtccctttgtaacatcccccattagcatgacaatgccccctcacggcagcctgcaaggttaccaaacatatggccactttcctagccgggccatcaagtctgagtacccagacccctataccagctcacccgagtccataatgggctattcatatatggatagttaccagacgagctctccagcaagcatcccacatctgatactggaacttttgaagtgtgagccagatgagcctcaagtccaggctaaaatcatggcctatttgcagcaagagcaggctaaccgaagcaagcacgaaaagctgagcacctttgggcttatgtgcaaaatggcagatcaaactctcttctccattgtcgagtgggccaggagtagtatcttcttcagagaacttaaggttgatgaccaaatgaagctgcttcagaactgctggagtgagctcttaatcctcgaccacatttaccgacaagtggtacatggaaaggaaggatccatcttcctggttactgggcaacaagtggactattccataatagcatcacaagccggagccaccctcaacaacctcatgagtcatgcacaggagttagtggcaaaacttcgttctctccagtttgatcaacgagagttcgtatgtctgaaattcttggtgctctttagtttagatgtcaaaaaccttgaaaacttccagctggtagaaggtgtccaggaacaagtcaatgccgccctgctggactacacaatgtgtaactacccgcagcagacagagaaatttggacagctacttcttcgactacccgaaatccgggccatcagtatgcaggctgaagaatacctctactacaagcacctgaacggggatgtgccctataataaccttctcattgaaatgttgcatgccaaaagagcataagttacaacccctaggagctctgctttcaaaacaaaaagagattgggggagtggggagggggaagaagaacaggaagaaaaaaagtactctgaactgctccaagnaacgctaattaaaaacttgctttaaagatattgaatttaaaaaggcataataatcaaatacttaatagcaaataaatgatgtatcagggtatttgtattgcaaactgtgaatcaaaggcttcacagccccagaggattccatataaaagacattgtaatggagtggattgaactcacagatggataccaacacggtcagaagaaaaacggacagaacggttcttgtatatttaaactgatctccactatgaagaaatttaggaactaatcttattaattaggcttatacagcgggggatttgagcttacaggattcctccatggtaaagctgaactgaaacaattctcaagaatgcatcagctgtacctacaatagcccctccctcttcctttgaaggcccgagcacctctgccctgtggtcaccgaatctgtactaaggacctgtgttcagccacacccagtggtagctccaccaaatcatgaacagcctaattttgagtgtctgtgtcttagacctgcaaacagctaataggaaattctattaatatgttagcttgccattttaaatatgttctgagggttgttttgtctcgtgttcatgatgttaagaaaatgcaggcagtatccctcatcttatgtaagtgtgaattaatattaagggaaatgactacaaactttcaaagcaaatgctccatagctaaagcaacttagaccttatttctgctactgttgctgaaatgtggctttggcattgttggatttcataaaaaatttctggcaggaagtcttgttagtatacatcagtctttttcatcatccaagtttgtagttcatttaaaaatacaacattaaacacattttgctaggatgtcaaatagtcacagttctaagtagttggaaacaaaattgacgcatgttaatctatgcaaagagaaaggaaaggatgaggtgatgtattgactcaaggttcattcttgctgcaattgaacatcctcaagagttgggatggaaatggtgatttttacatgtgtcctggaaagatattaaagtaattcaaatcttccccaaaggggaaaggaagagagtgatactgacctttttaagtcatagaccaaagtctgctgtagaacaaatatgggaggacaaagaatcgcaaattcttcaaatgactattatcagtattattaacatgcgatgccacaggtatgaaagtcttgccttatttcacaattttaaaaggtagctgtgcagatgtggatcaacatttgtttaaaataaagtattaatactttaaagtcaaataagatatagtgtttacattctttaggtcctgaggggcagggggatctgtgatataacaaaatagcaaaagcggtaatttccttaatgttatttttctgattggtaattatttttaacagtacttaattattctatgtcgtgagacactaaaatcaaaaacgggaatctcatttagactttaatttttttgagattatcggcggcacaatcactttgtagaaactgtaaaaaataaaagtatctcctagtcccttaattttttcataaatatttctggcttttgagtagtgtatttatattgtatatcatactttcaactgtagacaattatgatgctaatttattgtttcttggtttcacctttgtataagatatagccaagactgaagaaaccaaatatatgtgtttactgtagcatgtcttcaaattagtggaacttagttcagggacatagaagagtcttaatgaattaaaatcattcacttgattaaatgtctgtaaatcttcatcattcctactgtagtttatttaatatctattgtaaattatgtgacttgtagcttcctctggttttcaagtaaactcaacaaggtggagtcttacctggttttcctttccaagcattgtaaattgtataccaaagatattagttattacttctgtgtgtacaaagaggattattttattatgtttattaatcacctctaatactcatccacatgaagggtacacattaggtaagctgggcgttgactcatgcncantctcagtcacccgtgttatcttcntggctcaaaggacaatgcaaaatcgccgatcagagctcatacccaaagcattacagagaacagcagcatcattgccctccccagctgaaaaacaagttggctagaagatacatggagaggaatggtgttgtcaacagttaatgaaacggttctatcatgcatgtgtaatgtggatggagacaattataagatttgactataactatttggagggtctttaacattgccaaaaaaacaaatatgttgatttttattttattttattttttattttaagaggcgggatcttgatctcacatgttgcccaggctggccttgaactcctgggctcaagcattcctcctgcctcagcctcccccgtagctgggactaggggtgcatgccagcatacctggctacgttgactcttaaaatctatgttctcttattttaaagatacagtgctccccactgaaaattaaacctaaaaaatgtcacatattggtatgttgttaacctggtagattaaatcatgagaatgattagaaagacgggcaacacagcgggttacatccacactgctgatcacaccaacgacaggagctgataagcaagaaagcgtcacagccagcgtctgttcacccaaggttgacaagtgaagtttctctaatgttgattgttagccgatttgtaacctggcatttacttagcaactgccttatcaattacaggatttgccggtaaaagcagactcaaatataaaggtttttggcttaacttggtttattatagttgctctatgtttgtaaacagacaatctctaatgtctgattatttgtatcacagatctgcagctgccttggacttgaatccatgcaatgtttagagtgtgaagtcagttacttgttgatgttttcttactgtatcaatgaaatacatattgtcatgtcagttcttgccaggaacttctcaacaaaatggaattttttttttcagtatttcaataaatattgatatgcccagcctgataatttttaaaagttt

SEQ ID NO: 424220 - DNA, 5162 bp, Homo sapiens
  misc_feature (345)..(345): n is a, c, g, or t
  misc_feature (2048)..(2048): n is a, c, g, or t
  misc_feature (4112)..(4112): n is a, c, g, or t
  misc_feature (4115)..(4115): n is a, c, g, or t
  misc_feature (4139)..(4139): n is a, c, g, or t
gaaactggatacatggtttacagcaggtcactaatgttggaaaaagtacagagtccagggaaagacttgcttgtaactttatgaattctggatttttttttttcctttgctttttcttaactttcactaagggttactgtagtctgatgtgtccttcccaaggccacgaaatttgacaagctgcacttttcttttgctcaatgatttctgctttaagccaaagaactgcctataatttcactaagaatgtcttctaattcagatactggggatttacaagagtctttaaagcacggacttacacctattgatcgaggaaattgccgctctggctgcttctccttngccgccacgctcagacagaggtcgcttctgactagctgtgctgggcttccggaccgacacggatcccccatccccgcccgcggtcgccttgtcatgctgcccaaagtggagacggaagccctgggactggctcgatcgcatggggaacagggccagatgccggaaaacatgcaagtgtctcaatttaaaatggtgaattactcctatgatgaagatctggaagagctttgtcccgtgtgtggagataaagtgtctgggtaccattatgggctcctcacctgtgaaagctgcaagggattttttaagcgaacagtccaaaataataaaaggtacacatgtatagaaaaccagaactgccaaattgacaaaacacagagaaagcgttgtccttactgtcgttttcaaaaatgtctaagtgttggaatgaagctagaagctgtaagggccgaccgaatgcgtggaggaaggaataagtttgggccaatgtacaagagagacagggccctgaagcaacagaaaaaagccctcatccgagccaatggacttaagctagaagccatgtctcaggtgatccaagctatgccctctgacctgaccatttcctctgcaattcaaaacatccactctgcctccaaaggcctacctctgaaccatgctgccttgcctcctacagactatgacagaagtccctttgtaacatcccccattagcatgacaatgccccctcacggcagcctgcaaggttaccaaacatatggccactttcctagccgggccatcaagtctgagtacccagacccctataccagctcacccgagtccataatgggctattcatatatggatagttaccagacgagctctccagcaagcatcccacatctgatactggaacttttgaagtgtgagccagatgagcctcaagtccaggctaaaatcatggcctatttgcagcaagagcaggctaaccgaagcaagcacgaaaagctgagcacctttgggcttatgtgcaaaatggcagatcaaactctcttctccattgtcgagtgggccaggagtagtatcttcttcagagaacttaaggttgatgaccaaatgaagctgcttcagaactgctggagtgagctcttaatcctcgaccacatttaccgacaagtggtacatggaaaggaaggatccatcttcctggttactgggcaacaagtggactattccataatagcatcacaagccggagccaccctcaacaacctcatgagtcatgcacaggagttagtggcaaaacttcgttctctccagtttgatcaacgagagttcgtatgtctgaaattcttggtgctctttagtttagatgtcaaaaaccttgaaaacttccagctggtagaaggtgtccaggaacaagtcaatgccgccctgctggactacacaatgtgtaactacccgcagcagacagagaaatttggacagctacttcttcgactacccgaaatccgggccatcagtatgcaggctgaagaatacctctactacaagcacctgaacggggatgtgccctataataaccttctcattgaaatgttgcatgccaaaagagcataagttacaacccctaggagctctgctttcaaaacaaaaagagattgggggagtggggagggggaagaagaacaggaagaaaaaaagtactctgaactgctccaagnaacgctaattaaaaacttgctttaaagatattgaatttaaaaaggcataataatcaaatacttaatagcaaataaatgatgtatcagggtatttgtattgcaaactgtgaatcaaaggcttcacagccccagaggattccatataaaagacattgtaatggagtggattgaactcacagatggataccaacacggtcagaagaaaaacggacagaacggttcttgtatatttaaactgatctccactatgaagaaatttaggaactaatcttattaattaggcttatacagcgggggatttgagcttacaggattcctccatggtaaagctgaactgaaacaattctcaagaatgcatcagctgtacctacaatagcccctccctcttcctttgaaggcccgagcacctctgccctgtggtcaccgaatctgtactaaggacctgtgttcagccacacccagtggtagctccaccaaatcatgaacagcctaattttgagtgtctgtgtcttagacctgcaaacagctaataggaaattctattaatatgttagcttgccattttaaatatgttctgagggttgttttgtctcgtgttcatgatgttaagaaaatgcaggcagtatccctcatcttatgtaagtgtgaattaatattaagggaaatgactacaaactttcaaagcaaatgctccatagctaaagcaacttagaccttatttctgctactgttgctgaaatgtggctttggcattgttggatttcataaaaaatttctggcaggaagtcttgttagtatacatcagtctttttcatcatccaagtttgtagttcatttaaaaatacaacattaaacacattttgctaggatgtcaaatagtcacagttctaagtagttggaaacaaaattgacgcatgttaatctatgcaaagagaaaggaaaggatgaggtgatgtattgactcaaggttcattcttgctgcaattgaacatcctcaagagttgggatggaaatggtgatttttacatgtgtcctggaaagatattaaagtaattcaaatcttccccaaaggggaaaggaagagagtgatactgacctttttaagtcatagaccaaagtctgctgtagaacaaatatgggaggacaaagaatcgcaaattcttcaaatgactattatcagtattattaacatgcgatgccacaggtatgaaagtcttgccttatttcacaattttaaaaggtagctgtgcagatgtggatcaacatttgtttaaaataaagtattaatactttaaagtcaaataagatatagtgtttacattctttaggtcctgaggggcagggggatctgtgatataacaaaatagcaaaagcggtaatttccttaatgttatttttctgattggtaattatttttaacagtacttaattattctatgtcgtgagacactaaaatcaaaaacgggaatctcatttagactttaatttttttgagattatcggcggcacaatcactttgtagaaactgtaaaaaataaaagtatctcctagtcccttaattttttcataaatatttctggcttttgagtagtgtatttatattgtatatcatactttcaactgtagacaattatgatgctaatttattgtttcttggtttcacctttgtataagatatagccaagactgaagaaaccaaatatatgtgtttactgtagcatgtcttcaaattagtggaacttagttcagggacatagaagagtcttaatgaattaaaatcattcacttgattaaatgtctgtaaatcttcatcattcctactgtagtttatttaatatctattgtaaattatgtgacttgtagcttcctctggttttcaagtaaactcaacaaggtggagtcttacctggttttcctttccaagcattgtaaattgtataccaaagatattagttattacttctgtgtgtacaaagaggattattttattatgtttattaatcacctctaatactcatccacatgaagggtacacattaggtaagctgggcgttgactcatgcncantctcagtcacccgtgttatcttcntggctcaaaggacaatgcaaaatcgccgatcagagctcatacccaaagcattacagagaacagcagcatcattgccctccccagctgaaaaacaagttggctagaagatacatggagaggaatggtgttgtcaacagttaatgaaacggttctatcatgcatgtgtaatgtggatggagacaattataagatttgactataactatttggagggtctttaacattgccaaaaaaacaaatatgttgatttttattttattttattttttattttaagaggcgggatcttgatctcacatgttgcccaggctggccttgaactcctgggctcaagcattcctcctgcctcagcctcccccgtagctgggactaggggtgcatgccagcatacctggctacgttgactcttaaaatctatgttctcttattttaaagatacagtgctccccactgaaaattaaacctaaaaaatgtcacatattggtatgttgttaacctggtagattaaatcatgagaatgattagaaagacgggcaacacagcgggttacatccacactgctgatcacaccaacgacaggagctgataagcaagaaagcgtcacagccagcgtctgttcacccaaggttgacaagtgaagtttctctaatgttgattgttagccgatttgtaacctggcatttacttagcaactgccttatcaattacaggatttgccggtaaaagcagactcaaatataaaggtttttggcttaacttggtttattatagttgctctatgtttgtaaacagacaatctctaatgtctgattatttgtatcacagatctgcagctgccttggacttgaatccatgcaatgtttagagtgtgaagtcagttacttgttgatgttttcttactgtatcaatgaaatacatattgtcatgtcagttcttgccaggaacttctcaacaaaatggaattttttttttcagtatttcaataaatattgatatgcccagcctgataatttttaaaagttt

SEQ ID NO: 424221 - DNA, 4046 bp, Homo sapiens
  misc_feature (932)..(932): n is a, c, g, or t
  misc_feature (2996)..(2996): n is a, c, g, or t
  misc_feature (2999)..(2999): n is a, c, g, or t
  misc_feature (3023)..(3023): n is a, c, g, or t
taactctaatagctctattaatgttaggtagaccagtttaatggagtgcattctcctagcagttcattgattataaatacttagcttaagtacctacgtgtgtcctaaaaaaactatttgtccgaatgaaaatcctgattttcaggagcagtgatatgaattctgggcacctgtgcttcagtgaccatgggtggagactttcttgtttatatgtagtcctcttatgttgaaaattacacaaaaacaaaaaagtagtgaataacagtgtcattttttgttttttttgtttgtttgtttctatttcttttgcaggttgatgaccaaatgaagctgcttcagaactgctggagtgagctcttaatcctcgaccacatttaccgacaagtggtacatggaaaggaaggatccatcttcctggttactgggcaacaagtggactattccataatagcatcacaagccggagccaccctcaacaacctcatgagtcatgcacaggagttagtggcaaaacttcgttctctccagtttgatcaacgagagttcgtatgtctgaaattcttggtgctctttagtttagatgtcaaaaaccttgaaaacttccagctggtagaaggtgtccaggaacaagtcaatgccgccctgctggactacacaatgtgtaactacccgcagcagacagagaaatttggacagctacttcttcgactacccgaaatccgggccatcagtatgcaggctgaagaatacctctactacaagcacctgaacggggatgtgccctataataaccttctcattgaaatgttgcatgccaaaagagcataagttacaacccctaggagctctgctttcaaaacaaaaagagattgggggagtggggagggggaagaagaacaggaagaaaaaaagtactctgaactgctccaagnaacgctaattaaaaacttgctttaaagatattgaatttaaaaaggcataataatcaaatacttaatagcaaataaatgatgtatcagggtatttgtattgcaaactgtgaatcaaaggcttcacagccccagaggattccatataaaagacattgtaatggagtggattgaactcacagatggataccaacacggtcagaagaaaaacggacagaacggttcttgtatatttaaactgatctccactatgaagaaatttaggaactaatcttattaattaggcttatacagcgggggatttgagcttacaggattcctccatggtaaagctgaactgaaacaattctcaagaatgcatcagctgtacctacaatagcccctccctcttcctttgaaggcccgagcacctctgccctgtggtcaccgaatctgtactaaggacctgtgttcagccacacccagtggtagctccaccaaatcatgaacagcctaattttgagtgtctgtgtcttagacctgcaaacagctaataggaaattctattaatatgttagcttgccattttaaatatgttctgagggttgttttgtctcgtgttcatgatgttaagaaaatgcaggcagtatccctcatcttatgtaagtgtgaattaatattaagggaaatgactacaaactttcaaagcaaatgctccatagctaaagcaacttagaccttatttctgctactgttgctgaaatgtggctttggcattgttggatttcataaaaaatttctggcaggaagtcttgttagtatacatcagtctttttcatcatccaagtttgtagttcatttaaaaatacaacattaaacacattttgctaggatgtcaaatagtcacagttctaagtagttggaaacaaaattgacgcatgttaatctatgcaaagagaaaggaaaggatgaggtgatgtattgactcaaggttcattcttgctgcaattgaacatcctcaagagttgggatggaaatggtgatttttacatgtgtcctggaaagatattaaagtaattcaaatcttccccaaaggggaaaggaagagagtgatactgacctttttaagtcatagaccaaagtctgctgtagaacaaatatgggaggacaaagaatcgcaaattcttcaaatgactattatcagtattattaacatgcgatgccacaggtatgaaagtcttgccttatttcacaattttaaaaggtagctgtgcagatgtggatcaacatttgtttaaaataaagtattaatactttaaagtcaaataagatatagtgtttacattctttaggtcctgaggggcagggggatctgtgatataacaaaatagcaaaagcggtaatttccttaatgttatttttctgattggtaattatttttaacagtacttaattattctatgtcgtgagacactaaaatcaaaaacgggaatctcatttagactttaatttttttgagattatcggcggcacaatcactttgtagaaactgtaaaaaataaaagtatctcctagtcccttaattttttcataaatatttctggcttttgagtagtgtatttatattgtatatcatactttcaactgtagacaattatgatgctaatttattgtttcttggtttcacctttgtataagatatagccaagactgaagaaaccaaatatatgtgtttactgtagcatgtcttcaaattagtggaacttagttcagggacatagaagagtcttaatgaattaaaatcattcacttgattaaatgtctgtaaatcttcatcattcctactgtagtttatttaatatctattgtaaattatgtgacttgtagcttcctctggttttcaagtaaactcaacaaggtggagtcttacctggttttcctttccaagcattgtaaattgtataccaaagatattagttattacttctgtgtgtacaaagaggattattttattatgtttattaatcacctctaatactcatccacatgaagggtacacattaggtaagctgggcgttgactcatgcncantctcagtcacccgtgttatcttcntggctcaaaggacaatgcaaaatcgccgatcagagctcatacccaaagcattacagagaacagcagcatcattgccctccccagctgaaaaacaagttggctagaagatacatggagaggaatggtgttgtcaacagttaatgaaacggttctatcatgcatgtgtaatgtggatggagacaattataagatttgactataactatttggagggtctttaacattgccaaaaaaacaaatatgttgatttttattttattttattttttattttaagaggcgggatcttgatctcacatgttgcccaggctggccttgaactcctgggctcaagcattcctcctgcctcagcctcccccgtagctgggactaggggtgcatgccagcatacctggctacgttgactcttaaaatctatgttctcttattttaaagatacagtgctccccactgaaaattaaacctaaaaaatgtcacatattggtatgttgttaacctggtagattaaatcatgagaatgattagaaagacgggcaacacagcgggttacatccacactgctgatcacaccaacgacaggagctgataagcaagaaagcgtcacagccagcgtctgttcacccaaggttgacaagtgaagtttctctaatgttgattgttagccgatttgtaacctggcatttacttagcaactgccttatcaattacaggatttgccggtaaaagcagactcaaatataaaggtttttggcttaacttggtttattatagttgctctatgtttgtaaacagacaatctctaatgtctgattatttgtatcacagatctgcagctgccttggacttgaatccatgcaatgtttagagtgtgaagtcagttacttgttgatgttttcttactgtatcaatgaaatacatattgtcatgtcagttcttgccaggaacttctcaacaaaatggaattttttttttcagtatttcaataaatattgatatgcccagcctgataatttttaaaagttt

SEQ ID NO: 424222 - DNA, 432 bp, Homo sapiens
gaaactggatacatggtttacagcaggtcactaatgttggaaaaagtacagagtccagggaaagacttgcttgtaactttatgaattctggatttttttttttcctttgctttttcttaactttcactaagggttactgtagtctgatgtgtccttcccaaggccacgaaatttgacaagctgcacttttcttttgctcaatgatttctgctttaagccaaagaactgcctataatttcactaagaatgtcttctaattcagatactggggatttacaagagtctttaaagcacggacttacacctattggtaagtaggagtttctctattgatcatctatttattctgctactacatacatataatttaatcttgttgatggattttgcattttaagtcatggcttttcctattatgtttattaaaagcac

SEQ ID NO: 424223 - DNA, 450 bp, Homo sapiens
gaaactggatacatggtttacagcaggtcactaatgttggaaaaagtacagagtccagggaaagacttgcttgtaactttatgaattctggatttttttttttcctttgctttttcttaactttcactaagggttactgtagtctgatgtgtccttcccaaggccacgaaatttgacaagctgcacttttcttttgctcaatgatttctgctttaagccaaagaactgcctataatttcactaagaatgtcttctaattcagatactggggatttacaagagtctttaaagcacggacttacacctattgataacacagaaaatacaggcacaagaaagatgagagagcagcacacaaccatttcgcatctttttcgtcgggcagaaccgccgcggtgcgcaggcaaggagtccttcccggcagctccgcgcagctccggttccgcgtcc

SEQ ID NO: 424224 - DNA, 379 bp, Homo sapiens
gcaagcacgaaaagctgagcacctttgggcttatgtgcaaaatggcagatcaaactctcttctccattgtcgagtgggccaggagtagtatcttcttcagagaacttaaggtatgccaccagctattacaacttacagcaccccttttaagagagacctaactatgttcctaattaatacattcttggtgctgaaaatatgtgttccttaattttctactttgtatgatttacagagtagacgtaattttattaccttgacttcaggactgtggcagcttaaatttatggggctttgattttgtgtagctcttagtttgggggggctggcatttaacataaagtataggaaactcgggcttttttttctaaatagtaga

SEQ ID NO: 424225 - DNA, 3137 bp, Homo sapiens
  misc_feature (1838)..(1838): n is a, c, g, or t
gaaactggatacatggtttacagcaggtcactaatgttggaaaaagtacagagtccagggaaagacttgcttgtaactttatgaattctggatttttttttttcctttgctttttcttaactttcactaagggttactgtagtctgatgtgtccttcccaaggccacgaaatttgacaagctgcacttttcttttgctcaatgatttctgctttaagccaaagaactgcctataatttcactaagaatgtcttctaattcagatactggggatttacaagagtctttaaagcacggacttacacctattgtgtctcaatttaaaatggtgaattactcctatgatgaagatctggaagagctttgtcccgtgtgtggagataaagtgtctgggtaccattatgggctcctcacctgtgaaagctgcaagggattttttaagcgaacagtccaaaataataaaaggtacacatgtatagaaaaccagaactgccaaattgacaaaacacagagaaagcgttgtccttactgtcgttttcaaaaatgtctaagtgttggaatgaagctagaagctgtaagggccgaccgaatgcgtggaggaaggaataagtttgggccaatgtacaagagagacagggccctgaagcaacagaaaaaagccctcatccgagccaatggacttaagctagaagccatgtctcaggtgatccaagctatgccctctgacctgaccatttcctctgcaattcaaaacatccactctgcctccaaaggcctacctctgaaccatgctgccttgcctcctacagactatgacagaagtccctttgtaacatcccccattagcatgacaatgccccctcacggcagcctgcaaggttaccaaacatatggccactttcctagccgggccatcaagtctgagtacccagacccctataccagctcacccgagtccataatgggctattcatatatggatagttaccagacgagctctccagcaagcatcccacatctgatactggaacttttgaagtgtgagccagatgagcctcaagtccaggctaaaatcatggcctatttgcagcaagagcaggctaaccgaagcaagcacgaaaagctgagcacctttgggcttatgtgcaaaatggcagatcaaactctcttctccattgtcgagtgggccaggagtagtatcttcttcagagaacttaaggttgatgaccaaatgaagctgcttcagaactgctggagtgagctcttaatcctcgaccacatttaccgacaagtggtacatggaaaggaaggatccatcttcctggttactgggcaacaagtggactattccataatagcatcacaagccggagccaccctcaacaacctcatgagtcatgcacaggagttagtggcaaaacttcgttctctccagtttgatcaacgagagttcgtatgtctgaaattcttggtgctctttagtttagatgtcaaaaaccttgaaaacttccagctggtagaaggtgtccaggaacaagtcaatgccgccctgctggactacacaatgtgtaactacccgcagcagacagagaaatttggacagctacttcttcgactacccgaaatccgggccatcagtatgcaggctgaagaatacctctactacaagcacctgaacggggatgtgccctataataaccttctcattgaaatgttgcatgccaaaagagcataagttacaacccctaggagctctgctttcaaaacaaaaagagattgggggagtggggagggggaagaagaacaggaagaaaaaaagtactctgaactgctccaagnaacgctaattaaaaacttgctttaaagatattgaatttaaaaaggcataataatcaaatacttaatagcaaataaatgatgtatcagggtatttgtattgcaaactgtgaatcaaaggcttcacagccccagaggattccatataaaagacattgtaatggagtggattgaactcacagatggataccaacacggtcagaagaaaaacggacagaacggttcttgtatatttaaactgatctccactatgaagaaatttaggaactaatcttattaattaggcttatacagcgggggatttgagcttacaggattcctccatggtaaagctgaactgaaacaattctcaagaatgcatcagctgtacctacaatagcccctccctcttcctttgaaggcccgagcacctctgccctgtggtcaccgaatctgtactaaggacctgtgttcagccacacccagtggtagctccaccaaatcatgaacagcctaattttgagtgtctgtgtcttagacctgcaaacagctaataggaaattctattaatatgttagcttgccattttaaatatgttctgagggttgttttgtctcgtgttcatgatgttaagaaaatgcaggcagtatccctcatcttatgtaagtgtgaattaatattaagggaaatgactacaaactttcaaagcaaatgctccatagctaaagcaacttagaccttatttctgctactgttgctgaaatgtggctttggcattgttggatttcataaaaaatttctggcaggaagtcttgttagtatacatcagtctttttcatcatccaagtttgtagttcatttaaaaatacaacattaaacacattttgctaggatgtcaaatagtcacagttctaagtagttggaaacaaaattgacgcatgttaatctatgcaaagagaaaggaaaggatgaggtgatgtattgactcaaggttcattcttgctgcaattgaacatcctcaagagttgggatggaaatggtgatttttacatgtgtcctggaaagatattaaagtaattcaaatcttccccaaaggggaaaggaagagagtgatactgacctttttaagtcatagaccaaagtctgctgtagaacaaatatgggaggacaaagaatcgcaaattcttcaaatgactattatcagtattattaacatgcgatgccacaggtatgaaagtcttgccttatttcacaattttaaaaggtagctgtgcagatgtggatcaacatttgtttaaaataaagtattaatactttaaagtc

SEQ ID NO: 424226 - DNA, 2342 bp, Homo sapiens
  misc_feature (345)..(345): n is a, c, g, or t
  misc_feature (1434)..(1434): n is a, c, g, or t
  misc_feature (1466)..(1466): n is a, c, g, or t
  misc_feature (1482)..(1483): n is a, c, g, or t
  misc_feature (1705)..(1705): n is a, c, g, or t
  misc_feature (1778)..(1778): n is a, c, g, or t
  misc_feature (1783)..(1784): n is a, c, g, or t
  misc_feature (1849)..(1849): n is a, c, g, or t
  misc_feature (1859)..(1859): n is a, c, g, or t
  misc_feature (1903)..(1903): n is a, c, g, or t
  misc_feature (1920)..(1920): n is a, c, g, or t
  misc_feature (1925)..(1925): n is a, c, g, or t
  misc_feature (2109)..(2109): n is a, c, g, or t
gaaactggatacatggtttacagcaggtcactaatgttggaaaaagtacagagtccagggaaagacttgcttgtaactttatgaattctggatttttttttttcctttgctttttcttaactttcactaagggttactgtagtctgatgtgtccttcccaaggccacgaaatttgacaagctgcacttttcttttgctcaatgatttctgctttaagccaaagaactgcctataatttcactaagaatgtcttctaattcagatactggggatttacaagagtctttaaagcacggacttacacctattgatcgaggaaattgccgctctggctgcttctccttngccgccacgctcagacagaggtcgcttctgactagctgtgctgggcttccggaccgacacggatcccccatccccgcccgcggtcgccttgtcatgctgcccaaagtggagacggaagccctgggactggctcgatcgcatggggaacagggccagatgccggaaaacatgcaagtgtctcaatttaaaatggtgaattactcctatgatgaagatctggaagagctttgtcccgtgtgtggagataaagtgtctgggtaccattatgggctcctcacctgtgaaagctgcaagggattttttaagcgaacagtccaaaataataaaaggtacacatgtatagaaaaccagaactgccaaattgacaaaacacagagaaagcgttgtccttactgtcgttttcaaaaatgtctaagtgttggaatgaagctagaagctgtaagggccgaccgaatgcgtggaggaaggaataagtttgggccaatgtacaagagagacagggccctgaagcaacagaaaaaagccctcatccgagccaatggacttaagctagaagccatgtctcaggtgatccaagctatgccctctgacctgaccatttcctctgcaattcaaaacatccactctgcctccaaaggcctacctctgaaccatgctgccttgcctcctacagactatgacagaagtccctttgtaacatcccccattagcatgacaatgccccctcacggcagcctgcaaggttaccaaacatatggccactttcctagccgggccatcaagtctgagtacccagacccctataccagctcacccgagtccataatgggctattcatatatggatagttaccagacgagctctccagcaagcatcccacatctgatactggaacttttgaagtgtgagccagatgagcctcaagtccaggctaaaatcatggcctatttgcagcaagagcaggctaaccgaagcaagcacgaaaagctgagcacctttgggcttatgtgcaaaatggcagatcaaactctcttctccattgtcgagtgggccaggagtagtatcttcttcagagaacttaagggtctnactctgtcgcccagtctggagtgcagtggccnatcttggctcatggcnncctccacctcctgcattcaagtgattcgcctgcctcagcctcccgagtagctgggattacaggcgtgcaccacaacacccatctaatttttgtatttttagtagagatgggattttgccatgttggccaggctggtctcaaaactcctgacctcagggtgatctgcctgcctcggcctcccaaagtgctgggattatgggcatgagccactgcgcctggccntaattgtgcttttttttccttttttctttttttgagatggagttacactcttgttgcctgggctggggtgcantggcnnagtctcggctcactgcaacctcacctctgggttccagcaattctcctgcctcagcctcccgagtngctgggattncaggcatgcgccaccatgcctagctaattttcgtattattagtngaaacaaggtttcaccntgtcngccaggctggtctcaaactcctgacctcagatgatccacccgccttggcctcccaaagtgctgggattacagatgtgagccaccacgctcagccaaattgtactttcagtaaagtactttactgtttacaaagaacttccatatacatttttttggtcctggtctctgtctttcattttgggancatggatgtaactggcctttcatcaatggttcagtagtgttgttttttaaagcctacaacagaaccatctcctatgaattgactatcacctgtctaaatgccctgttacagcatgttgtactgcaagagcaggatatttaaagtactttataattgataattgccattatcaatatgctcacctctttaccatattccaacaggtcttaaaggacttgtattattttttaccg

SEQ ID NO: 424227 - DNA, 2239 bp, Homo sapiens
ggggggcccacattttttgtttaggataaaactagcctgagcactgttctactgaatctgaagtcaggagtatcagatttttgtgtcagtccagcccttagccagtgctaaatgactttgaatgtgttagctagtcttttgggtataatgtccacatctgagggatttgtcccttatctgaaaagtagataggtggtgagttcttcagggacaaggattcaattttattcatacagtatatatgtggatatacatatacacatttatacataaaatcccagtacctagcactgtacctggtccttggtaaggccttgataaaggtttgttagaggcgtgaatattttctgtcttcagggcactttatattctttatgaaaagcagtttatgtagtttatgttattgttttaaaaaacttaatcctaaatgtgaagtcatttcttttctttgttttgttttgttttgtttttgagacggagtctctcattatcacccagattggagtgcagtggcaccatctcggctcactgcaacctccatctcccggtttcaagagattatcatgcctcagcctccaagtagctgggactacaggtgtgcaccaccacacccagctaatttttttttttagttgagatgggagtttcaccatgttggccaggctggtctctaactcctgacctcaagtgatccgcctgcctcagcctcccaaagtgctgggattacaggtgtgagccaccatgcctggccaatagtttatttccaatgcatctattaatttgattcttttctatttgacaaccctttccaatattctctttgcatccaaatggaatttatgttttttcccaagttcccaactgcccaaggtagacactggcagatttatatcaaggttctttgacatcttgaacttcagatcagaggatggagttcttctctcattgccttgagcaagggcttataaccagagccacattaagaactcagatcatgctccctaattgaggacacatagcaagcttcaccaagccctccactacaactataccaatttgtcttcctgtagacttacaaggtaccactagggttcctttggagaactcaggagtccagtataacttggagtgataataccacattggaactcacaactcttctaactccagggatttgaatgtgatttcttctttttaattcagagtagcgtaatgatcctacacttgggcatatttgtcttggccccactcccaaagcaaatagatttccatgtaactggaaatctgctgcaaaccccaagaattttatcctccctcaaaaagtgctatcctgagtggttttttttttctttttactgtacattgaaaattgaagttgttgtttcctttttttttaatttgagacaaggtctcactgtgtcacccaggcatgatcacagctcactgcagcctcaatctccccaggctcagatgatcctcctgccttagacttctgactagctgagactacaggcgcaatgccaccatgcctggctaatgtgtgtattttttgtagagatggagtttcgtcatgttgcctaggctggcctcaaactcctggcctcaagcgatcctcccacctcggcctcccaaagtgttgggattacaggcatgagtcaccatgcccaggctaaagctgttatttcctcataacctttactgcacatgttttaaaacaggtccttatcattgtttgccccagcaactggaatagctttctatctgctttcaatcttaacccagtctcaccagggcatataatctttctagaatgcaaatctgatcattttacttgaaggcttaagttttgcagtgacatactttagagcagcactgtctgataggaatagaatgttagcttcatgtatacagatgctccttgacttaggatgggtttatgtcccaataaatccaccataagttgaaaatattgtaagtaaaaaatgcatgaaatacacataccctactgaatatcatagcttagccaagcctaccttaaatgtgctcagaacactgatgttaacctacagttgggaaaaatcatcttacacaaaccctattttataataaagtgtgaatatctcgtgtaatttattactattgatcataaagtttaagcattataagttggcgatagtctgtaattgttaatttgtttgtatccaatataaaaaatataaagagaaacagatgaaattaa

SEQ ID NO: 424228 - DNA, 2248 bp, Homo sapiens
gccgagcgtttcgtgagcggcgctccgaggatcaggaatggggcttcgggcgctgggcgcgctccgaacccggcgcacgtaagagcctgggagcgcccgagccgcccggctgcccggagccccatcgcctaggaccgggagatgctggaaatgcaaccgcctgttccccgaggagccgctgcccccgggaccccctggcactgtgcgcaccctggtcagcagcccccggagaagacggcgcccccaacgcccgacccgcgtggccgtggcagcgccacgcgagccctctaggcgaccgcagggccacagcagctcagccgccggtgccccctcggaaaccatgacccccggcgcgggcccatggagccatggcctatagggtcctgggccgcgcggggccacctcagccgcggagggcgcgcaggctgctcttcgccttcacgctctcgctctcctgcacttacctgtgttacagcttcctgtgctgctgcgacgacctgggtcggagccgcctcctcggcgcgcctcgctgcctccgcggccccagcgcgggcggccagaaacttctccagaagtcccgcccctgtgatccctccgggccgacgcccagcgagcccagcgctcccagcgcgcccgccgccgccgtgcccgcccctcgcctctccggttccaaccactccggctcacccaagctgggtaccaagcggttgccccaagccctcattgtgggcgtgaagaaggggggcacccgggccgtgctggagtttatccgagtacacccggacgtgcgggccttgggcacggaaccccacttctttgacaggaactacggccgcgggctggattggtacaggagcctgatgcccaggaccctcgagagccagatcacgctggagaagacgcccagctactttgtcactcaagaggctcctcgacgcatcttcaacatgtcccgagacaccaagctgatcgtggttgtgcggaaccctgtgacccgtgccatctctgattacacgcagacactctccaagaagcccgacatcccgacctttgagggcctctccttccgcaaccgcaccctgggcctggtggacgtgtcatggaacgccatccgcatcggcatgtacgtgctgcacctggagagctggctgcagtacttcccgctagctcagattcacttcgtcagtggcgagcgactcatcactgacccggccggcgagatggggcgagtccaggacttcctgggcattaagagattcatcacggacaagcacttctatttcaacaagaccaaaggattcccttgcttgaaaaaaacagaatcgagcctcctgcctcgatgcttgggcaaatcaaaagggagaactcatgtacagattgatcctgaagtgatagaccagctccgagaattttatagaccgtataatatcaaattttatgaaaccgttgggcaggacttcaggtgggaataagcccacgaaaggaaagggctctcaagggctcttctgctcatctcttccgtgagatttgctcccagaccctctgatctccctccaacaaaccctggctccagccccctttcccaacttgagttgcatcatcttggaaccaggaagcccagctaaagccaagagaccagagagtccctgccactagttttcatcagtctgttcaagcaaagttgatctgctcctggcacgtccagtaaattccagaatcattctcctttctgcccataaagggccttggagaattgctttaagaagagtgaatgttccaatgatgatagatattataagcgatgatggttctgttgctatgaacacagcagtcggtccctgtcattgtccacccaggagtggccttgttaattccaagtggcatgtatcttccctctgagcttcatttcttcaagatgctctgggtggtgggatgggagaccatcctcagccctcctcagaccttatcaattcattgagagattgcaaagctgaaagcacctccggccactcctgggagacagaccctttggtgatgaaataaaccagtgacttcagagcctatggtctcaactgtgcttgaaaaacactgtctctgaaaacaactttgtgattctccctgctccctgtggacaaaagcacataattctgctgttacgggtactttgctcatacgagctttcatgttcagcatgcaatggaatcatgcttgtccatgtgaaataaatatggctctctcgtgtccttaa

SEQ ID NO: 424229 - DNA, 1487 bp, Homo sapiens
tgcagtggaatgatcatagctcacttcaacctcaaactcctgggctcaagcggtcctcccacctcagcttcccaagggagctgacactacaggagcctgatgcccaggaccctcgagagccagatcacgctggagaagacgcccagctactttgtcactcaagaggctcctcgacgcatcttcaacatgtcccgagacaccaagctgatcgtggttgtgcggaaccctgtgacccgtgccatctctgattacacgcagacactctccaagaagcccgacatcccgacctttgagggcctctccttccgcaaccgcaccctgggcctggtggacgtgtcatggaacgccatccgcatcggcatgtacgtgctgcacctggagagctggctgcagtacttcccgctagctcagattcacttcgtcagtggcgagcgactcatcactgacccggccggcgagatggggcgagtccaggacttcctgggcattaagagattcatcacggacaagcacttctatttcaacaagaccaaaggattcccttgcttgaaaaaaacagaatcgagcctcctgcctcgatgcttgggcaaatcaaaagggagaactcatgtacagattgatcctgaagtgatagaccagctccgagaattttatagaccgtataatatcaaattttatgaaaccgttgggcaggacttcaggtgggaataagcccacgaaaggaaagggctctcaagggctcttctgctcatctcttccgtgagatttgctcccagaccctctgatctccctccaacaaaccctggctccagccccctttcccaacttgagttgcatcatcttggaaccaggaagcccagctaaagccaagagaccagagagtccctgccactagttttcatcagtctgttcaagcaaagttgatctgctcctggcacgtccagtaaattccagaatcattctcctttctgcccataaagggccttggagaattgctttaagaagagtgaatgttccaatgatgatagatattataagcgatgatggttctgttgctatgaacacagcagtcggtccctgtcattgtccacccaggagtggccttgttaattccaagtggcatgtatcttccctctgagcttcatttcttcaagatgctctgggtggtgggatgggagaccatcctcagccctcctcagaccttatcaattcattgagagattgcaaagctgaaagcacctccggccactcctgggagacagaccctttggtgatgaaataaaccagtgacttcagagcctatggtctcaactgtgcttgaaaaacactgtctctgaaaacaactttgtgattctccctgctccctgtggacaaaagcacataattctgctgttacgggtactttgctcatacgagctttcatgttcagcatgcaatggaatcatgcttgtccatgtgaaataaatatggctctctcgtgtccttaa

SEQ ID NO: 424230 - DNA, 5978 bp, Homo sapiens
ggctggagctgctgtggcgaccgacgcgaggcggtggcagaggagacccacccctgtccacatggacagtcgcaaaggcctccgctgatgcattcacgcctgggcggggtgggcggacggccgtagcggcggcggctgcagaacgagctaggggcctgggggcgcctgacggtcgcagagacctcgccgctccggcgcggcgggtgcggccattttacggcctgggacgaagggaggcgtgtttgtgtgctcgctttcattctcctttcttgggaacccacggctgggggaagtttctcaggcagcctgggtgggcggtggatggggagtcgtgggccgagaggaaccgggcccgggaagcgccgtcgtcgtcgtcgccggtcgcgttcccccggagaggcctgagaagctcgggccgcgggcctcgctgcccgccagcccgcggacaggcccgggcgcgcctggcctgcctttgtataggcccgtctgaacgtgggagcgcagcccgcctgacggctgagcccgaggcccgcaaccctgcggcgtctaccctcctccggcgcggcccctcatcccggcgagcacggcggcggtgtgggccatggattaagaaggaggcggcgtgggaggaggaagatggcggccggcaagagcggcggtagcgcaggggagattacttttctggaagctttggctagatcagagtctaagagagatggaggttttaaaaataattggagctttgatcatgaagaagaaagtgaaggagatacagataaagatgggacaaatctgctcagtgtggatgaagatgaggattctgaaacctcaaaaggaaaaaagttaaatcgtcgatctgaaattgttgctaatagctctggtgaattcatcttgaagacatatgtaagacgaaacaagtctgaaagttttaaaactttgaaaggcaacccaattggacttaacatgttgagcaacaataagaaattgagtgaaaatacgcaaaatacgtcattatgttctggaactgtagttcatggtagacgttttcatcatgctcatgcacagataccagtagtaaaaacagcagcccaaagcagtctggaccgaaaagaaaggaaagaatacccacctcatgtccaaaaagttgaaattaatcctgtaaggttaagtcggctccaaggtgttgaacgtataatgaagaaaacagaagagtccgaatcacaagtggagcctgaaattaagaggaaagtacaacagaaacggcactgtagtacctatcagcctactcctcctctatctcctgcttcaaaaaaatgtttaacccatttagaggatttgcaaagaaattgcagacaagctattactttgaatgagtctactggaccattattaagaacgtcaattcatcagaattctggaggacagaagtcacaaaacacaggattaacaaccaagaagttttatggcaacaatgtggaaaaggttccaattgatattattgtgaattgtgatgacagtaaacacacttatttacagactaatggaaaagtcattttacctggggcaaaaatacccaaaatcacaaacttgaaagaaaggaaaacaagtttgtcagacctaaatgatccaatcattttgtccagtgatgatgatgatgacaacgacagaactaacagaagagaaagcatatctcctcagcctgctgattcagcatgttcttcccctgcaccatccactggaaaagtagaagcagcgctaaatgaaaatacttgcagagcagagcgtgaactacgaagcattccagaagactcagagttaaatacagttacattgccaagaaaagcaagaatgaaagaccagtttggcaattctattatcaacacacctctgaaacgtcgtaaagtgttttctcaagaacctccagatgctttagctttaagctgccaaagttcctttgacagtgtcattttaaactgtcgaagtatacgagtaggaacactcttccggctgttaatagagcctgtaattttttgtttagattttatcaagatacagctagacgaaccagaccatgatcctgtagagattatattaaatacctctgatctaactaaatgtgaatggtgtaatgtccgaaaattacctgtagtgtttcttcaagcaattccagcagtttatcaaaagctgagcatccaactgcaaatgaataaggaggataaagtttggaatgattgtaaaggagtaaataaattaacaaatttagaagaacaatatataattttaatttttcaaaatggccttgatcctccggcaaatatggtatttgaaagtatcattaatgaaattggtataaagaataacatctccaatttttttgcgaaaattccctttgaagaagctaatggcagacttgttgcctgtacaagaacctatgaagagagcatcaaaggaagttgtgggcaaaaggaaaacaaaattaaaactgtatcatttgaatctaaaatacaacttagaagcaaacaagaatttcagttttttgatgaagaagaagaaactggagaaaaccacaccatcttcattggcccagtagaaaagttgatagtatatccaccacctccagctaagggaggcatctctgttaccaatgaggacctgcactgtctaaatgaaggagaatttttaaatgatgttattatagacttttatttgaaatacttggtgcttgaaaaactgaagaaggaagacgctgaccgaattcatatattcagttcttttttctataaacgccttaatcagagagagaggagaaatcatgaaacaactaatctgtcaatacagcaaaaacggcatgggagagtaaaaacatggacccggcacgtagatatttttgagaaggattttatttttgtaccccttaatgaagctgcacactggtttttggctgttgtttgtttccccggtttggaaaaaccaaagtatgaacctaatcctcattaccatgaaaatgctgtcatacagaaatgttcaactgtagaggacagttgtatttcttcttcagccagtgaaatggagagttgttcacaaaactcttctgccaagcctgtaattaagaagatgctaaacaaaaaacattgcatagctgtaattgattccaatcctgggcaggaagaaagtgaccctcgttataagagaaacatatgcagtgtaaaatacagtgtgaaaaaaataaatcatactgcgagtgaaaatgaagaattcaataaaggagaatctacatcccagaaagttgctgataggactaaaagtgagaatggcctacagaatgaaagtttaagttccacacatcatacagatggcttaagcaaaatcagactaaactatagcgatgaatcacctgaagctggtaaaatgcttgaagatgaactcgtcgacttctcagaagatcaggataaccaggatgatagcagtgacgatggattcctcgctgatgacaactgcagttcagaaataggacagtggcatttaaagcctactatctgtaaacaaccttgtatcctacttatggactcactccgaggcccttctcggtcaaatgttgtcaaaattttaagagagtatttagaagtggaatgggaagttaaaaaaggaagcaaaagaagtttttccaaagatgttatgaagggctctaatccaaaagtaccacagcaaaacaacttcagtgactgtggtgtatatgtattgcagtatgtagagagcttttttgagaatccaattctcagttttgaactacctatgaatttggcaaactggtttcctccaccaagaatgagaacaaaaagagaagaaatccgaaacataattctgaagctacaggaagatcagagcaaagagaaaagaaagcataaggacacttactcaacagaagcacctttaggcgaaggaacagaacaatatgtcaatagtatctcagattgaccatttctgttacttgtcatttctactttcagaaactaaatgactttcaaatttgggtatagacaataaagaactgaagtgctcactactcagtgatttggaaattttgatgcttgtataaatgtcagataattaatttccaaaggcgtatgtattaagtaaaagtctgtaaatatgttaatgaggccaatttttccagcatttataattatttttttcacttgttaggaagcttttgttatgtattttctgttaatagtacctaaaattgcaacttctaaacccaaataaaaagaaaatatttataggaggaaatgattaatttgatattctttagtgaacttgtttaattcctcagtgggtgtgacatatttcatgggaatattcaaatatctatggtaatattttgaccctttatatttgttctaaaataagtcaaaatgtgaaaataatattaaatctaagatattttgaactaagcatctttatatgcttgtgtaacaggaacaaagtaacagcctttcaattcatatactgccttgtgttcagtgaacccaagaaatgtaataaatatttgtaattttacacaaatatttaagaggaaagagtattaagagcaattcaaaaaaagtaaccttatactactaaaaaaaaaattcttgcatatattatcatcaaatgcatttttgaagacatcaaagactcaggttaaaactattttggtaagtgcagcttgaatttcaaatatcccgtgttacctttctctattacagcttaaagtatgctacaatctgtgtcatatagttaattgataagcatttttaatctgtgtaaacacaggaatttaaataggaatttactatttttttataaagcttttgctattttttcattgctcattttgttcttattattttgataaagtatcagactttttgcttgagttcttcagtgtaaattattttttacatgtaaaagtactgtattcaaccagttgcataatacagcaaaaatctttgaattcccctttaaaataactaaaatttgatggtttccatgacagatttatagcacatatagggatcttgcatgtatctgcagaaacttcattatttttcaaatgaaatggtgtatacttctttcaaatgaactttgagacttgaaacatattttagtcattttttgttaaatattgaatttttaaatacacatatatcaaaaatagttgagaataaaaagaaagcctaatcatcagcaattattttatttttaatttggccatctctgacattgcagtcaatatcttagggtattttcttgaatttaataaagtcccatgggtgggttcagggtgaatgggagtattaacaacaaccaaaaaatatctattgagacacagtagagtctcagtaagagaaatattaaaatgtaagaaaggtcaccattagtgatatcaactgtagtttgttactttgaactatatttctgattaactctttatagtaataacttagagctgttagctcagatatcttaattagctcatatgaaaaacaagtttaattttattatttactgaacatggcaaaatgcttttcaatctataataaaactgggataaaaaattgaagttgttttttttaaaacctaatagcaataagcaaaattggcatacataatttttttaatgaactatattttgtcagaatctgaaggtactgaaaaactattctaaaatgcctacttgtttttgcattaatttgtaatgcttacattttgcacccttagataatgtttgataagataaaaatataatttatcccttgtaccaactcaagtcaatcagattttaacatgaaaaatatagattaatgtatgtcagctttctagaggtagaatactcagctatttgatggcatttttcccaccccatgtgaaattttatttttggaagttatgctagtgacattgcaatatatattgaaatcttcggaggctgccag

SEQ ID NO: 424231 - DNA, 1798 bp, Homo sapiens
tgagcaaggactccccagagaagagctgtaaatatagttaagtgggttgagaaaagaacaaaagaagaaagggaaatggttctttttcttttgcatagtttgcatgggagacagtgccagaggaagaaaagagcagcataatgccactgggatggactcaaacttcagaggaaggttctttcctccaaggaacccctgtttcacttagctttatggagggctgaaactcattagactgtgttccctgagcctctgcccctacatcttatagattgcctagccattgaactaagaggcaaaaaccactttggtttttttgaaaggttatttgaattttaccagcattatttaatttcatgtagatagtagagagagaagtaagatactggaaaattactgttacataagttgggagagtatcactatctagaagctacagataataagaaagtggcccctagttttgcctgtttcttgtttttaattgttaagtatcatgcatactttttagttccacatttttaatccttttgcattgaaaagcattcttgccttgtgcttaccctttttattgaaacttttcctaattgactgtaaattgctaatttaatttcctttaccaggtatcatttgaatctaaaatacaacttagaagcaaacaagaatttcagttttttgatgaagaagaagaaactggagaaaaccacaccatcttcattggcccagtagaaaagttgatagtatatccaccacctccagctaagggaggcatctctgttaccaatgaggacctgcactgtctaaatgaaggagaatttttaaatgatgttattatagacttttatttgaagtaagttaattttccactgatcttttattaaatctttaacattccgtcatatcttatgtctttgttttccagagtcaggctttttgagttttaaattccatctctgccacttactgtgtgacatttggggagttattttttctgtttctgtctttgcacattttaaaaatgagaattctatctaaaaagttgtgaaaattgggccagggagatatctggcttatgtctataatcctgacactttgggaggtcaaggtgggaggatcgcttgagcccaagagttcacgaccagcctgggaaacaaagtgagaccttgtctccacaaaaaatttaaaaattagccagtcatatacctatagtcccagccacttgggaggctcagacaggaagattacctgagcccatgagttcgaagttgcactgagccatgatggcgccactgcactccagcctggtcaacaaagcaaaactctacccccacacccacccccgaaaacaggagttgtgagaattaaatgagatcgtacatatcaagtagtaggaaaaatgcctagtacagtgttagaagtttatggtcttgtaggaagcacaaatacagaattaaagcaatgatagaagcattaacatggtacagtcctagcagatgagagaatgcttcattatctttggaggttgggagatatgagggaccaggaagctttcctggaagagcttacattatgacccaatatacattatgacccaacataacacatgtatacacctatgtgcaatgtgtttatacatttatcaatttgtatgtttttactggtttgtgatataaaatggacatgtatatgaaataaaacagaacttagcatcagtatgcatagttctctgtaatattttctagtttcttatactgtgtttcattaaacaaaacaaaacttttaaaaattgaaaaaagaa

SEQ ID NO: 424232 - DNA, 459 bp, Homo sapiens
aagggatgtgacaagaatgttaacagtttaacagttagtgggtttagataagcaatgtttaggtgttcattataatgttataccaacttctctgtgggattttaagagataaacgagtaatataagaaacattctaagtatttgaataaaaaagtgaagcctgcctttctttgtaagtctagagcaatactaattcatctttttttttagttttgtttagattttatcaagatacagctagacggtaagctattttatgtctttttacttaccaaagctttctttacaccaaagcactttacaggaataaaagattaaataatattcatagaatttattaagatggttagttgttacatatatcttcttatcaaagggcatatatcttggtgtaatttcattcagaaatatcacagaacctaactttttagaaaccccttttcatttggaaaaaataaa

SEQ ID NO: 424233 - DNA, 5957 bp, Homo sapiens
ggctggagctgctgtggcgaccgacgcgaggcggtggcagaggagacccacccctgtccacatggacagtcgcaaaggcctccgctgatgcattcacgcctgggcggggtgggcggacggccgtagcggcggcggctgcagaacgagctaggggcctgggggcgcctgacggtcgcagagacctcgccgctccggcgcggcgggtgcggccattttacggcctgggacgaagggaggcgtgtttgtgtgctcgctttcattctcctttcttgggaacccacggctgggggaagtttctcaggcagcctgggtgggcggtggatggggagtcgtgggccgagaggaaccgggcccgggaagcgccgtcgtcgtcgtcgccggtcgcgttcccccggagaggcctgagaagctcgggccgcgggcctcgctgcccgccagcccgcggacaggcccgggcgcgcctggcctgcctttgtataggcccgtctgaacgtgggagcgcagcccgcctgacggctgagcccgaggcccgcaaccctgcggcgtctaccctcctccggcgcggcccctcatcccggcgagcacggcggcggtgtgggccatggattaagaaggaggcggcgtgggaggaggaagatggcggccggcaagagcggcggtagcgcaggggagattacttttctggaagctttggctagatcagagtctaagagagatggaggttttaaaaataattggagctttgatcatgaagaagaaagtgaaggagatacagataaagatgggacaaatctgctcagtgtggatgaagatgaggattctgaaacctcaaaaggaaaaaagttaaatcgtcgatctgaaattgttgctaatagctctggtgaattcatcttgaagacatatgtaagacgaaacaagtctgaaagttttaaaactttgaaaggcaacccaattggacttaacatgttgagcaacaataagaaattgagtgaaaatacgcaaaatacgtcattatgttctggaactgtagttcatggtagacgttttcatcatgctcatgcacagataccagtagtaaaaacagcagcccaaaggaaagaatacccacctcatgtccaaaaagttgaaattaatcctgtaaggttaagtcggctccaaggtgttgaacgtataatgaagaaaacagaagagtccgaatcacaagtggagcctgaaattaagaggaaagtacaacagaaacggcactgtagtacctatcagcctactcctcctctatctcctgcttcaaaaaaatgtttaacccatttagaggatttgcaaagaaattgcagacaagctattactttgaatgagtctactggaccattattaagaacgtcaattcatcagaattctggaggacagaagtcacaaaacacaggattaacaaccaagaagttttatggcaacaatgtggaaaaggttccaattgatattattgtgaattgtgatgacagtaaacacacttatttacagactaatggaaaagtcattttacctggggcaaaaatacccaaaatcacaaacttgaaagaaaggaaaacaagtttgtcagacctaaatgatccaatcattttgtccagtgatgatgatgatgacaacgacagaactaacagaagagaaagcatatctcctcagcctgctgattcagcatgttcttcccctgcaccatccactggaaaagtagaagcagcgctaaatgaaaatacttgcagagcagagcgtgaactacgaagcattccagaagactcagagttaaatacagttacattgccaagaaaagcaagaatgaaagaccagtttggcaattctattatcaacacacctctgaaacgtcgtaaagtgttttctcaagaacctccagatgctttagctttaagctgccaaagttcctttgacagtgtcattttaaactgtcgaagtatacgagtaggaacactcttccggctgttaatagagcctgtaattttttgtttagattttatcaagatacagctagacgaaccagaccatgatcctgtagagattatattaaatacctctgatctaactaaatgtgaatggtgtaatgtccgaaaattacctgtagtgtttcttcaagcaattccagcagtttatcaaaagctgagcatccaactgcaaatgaataaggaggataaagtttggaatgattgtaaaggagtaaataaattaacaaatttagaagaacaatatataattttaatttttcaaaatggccttgatcctccggcaaatatggtatttgaaagtatcattaatgaaattggtataaagaataacatctccaatttttttgcgaaaattccctttgaagaagctaatggcagacttgttgcctgtacaagaacctatgaagagagcatcaaaggaagttgtgggcaaaaggaaaacaaaattaaaactgtatcatttgaatctaaaatacaacttagaagcaaacaagaatttcagttttttgatgaagaagaagaaactggagaaaaccacaccatcttcattggcccagtagaaaagttgatagtatatccaccacctccagctaagggaggcatctctgttaccaatgaggacctgcactgtctaaatgaaggagaatttttaaatgatgttattatagacttttatttgaaatacttggtgcttgaaaaactgaagaaggaagacgctgaccgaattcatatattcagttcttttttctataaacgccttaatcagagagagaggagaaatcatgaaacaactaatctgtcaatacagcaaaaacggcatgggagagtaaaaacatggacccggcacgtagatatttttgagaaggattttatttttgtaccccttaatgaagctgcacactggtttttggctgttgtttgtttccccggtttggaaaaaccaaagtatgaacctaatcctcattaccatgaaaatgctgtcatacagaaatgttcaactgtagaggacagttgtatttcttcttcagccagtgaaatggagagttgttcacaaaactcttctgccaagcctgtaattaagaagatgctaaacaaaaaacattgcatagctgtaattgattccaatcctgggcaggaagaaagtgaccctcgttataagagaaacatatgcagtgtaaaatacagtgtgaaaaaaataaatcatactgcgagtgaaaatgaagaattcaataaaggagaatctacatcccagaaagttgctgataggactaaaagtgagaatggcctacagaatgaaagtttaagttccacacatcatacagatggcttaagcaaaatcagactaaactatagcgatgaatcacctgaagctggtaaaatgcttgaagatgaactcgtcgacttctcagaagatcaggataaccaggatgatagcagtgacgatggattcctcgctgatgacaactgcagttcagaaataggacagtggcatttaaagcctactatctgtaaacaaccttgtatcctacttatggactcactccgaggcccttctcggtcaaatgttgtcaaaattttaagagagtatttagaagtggaatgggaagttaaaaaaggaagcaaaagaagtttttccaaagatgttatgaagggctctaatccaaaagtaccacagcaaaacaacttcagtgactgtggtgtatatgtattgcagtatgtagagagcttttttgagaatccaattctcagttttgaactacctatgaatttggcaaactggtttcctccaccaagaatgagaacaaaaagagaagaaatccgaaacataattctgaagctacaggaagatcagagcaaagagaaaagaaagcataaggacacttactcaacagaagcacctttaggcgaaggaacagaacaatatgtcaatagtatctcagattgaccatttctgttacttgtcatttctactttcagaaactaaatgactttcaaatttgggtatagacaataaagaactgaagtgctcactactcagtgatttggaaattttgatgcttgtataaatgtcagataattaatttccaaaggcgtatgtattaagtaaaagtctgtaaatatgttaatgaggccaatttttccagcatttataattatttttttcacttgttaggaagcttttgttatgtattttctgttaatagtacctaaaattgcaacttctaaacccaaataaaaagaaaatatttataggaggaaatgattaatttgatattctttagtgaacttgtttaattcctcagtgggtgtgacatatttcatgggaatattcaaatatctatggtaatattttgaccctttatatttgttctaaaataagtcaaaatgtgaaaataatattaaatctaagatattttgaactaagcatctttatatgcttgtgtaacaggaacaaagtaacagcctttcaattcatatactgccttgtgttcagtgaacccaagaaatgtaataaatatttgtaattttacacaaatatttaagaggaaagagtattaagagcaattcaaaaaaagtaaccttatactactaaaaaaaaaattcttgcatatattatcatcaaatgcatttttgaagacatcaaagactcaggttaaaactattttggtaagtgcagcttgaatttcaaatatcccgtgttacctttctctattacagcttaaagtatgctacaatctgtgtcatatagttaattgataagcatttttaatctgtgtaaacacaggaatttaaataggaatttactatttttttataaagcttttgctattttttcattgctcattttgttcttattattttgataaagtatcagactttttgcttgagttcttcagtgtaaattattttttacatgtaaaagtactgtattcaaccagttgcataatacagcaaaaatctttgaattcccctttaaaataactaaaatttgatggtttccatgacagatttatagcacatatagggatcttgcatgtatctgcagaaacttcattatttttcaaatgaaatggtgtatacttctttcaaatgaactttgagacttgaaacatattttagtcattttttgttaaatattgaatttttaaatacacatatatcaaaaatagttgagaataaaaagaaagcctaatcatcagcaattattttatttttaatttggccatctctgacattgcagtcaatatcttagggtattttcttgaatttaataaagtcccatgggtgggttcagggtgaatgggagtattaacaacaaccaaaaaatatctattgagacacagtagagtctcagtaagagaaatattaaaatgtaagaaaggtcaccattagtgatatcaactgtagtttgttactttgaactatatttctgattaactctttatagtaataacttagagctgttagctcagatatcttaattagctcatatgaaaaacaagtttaattttattatttactgaacatggcaaaatgcttttcaatctataataaaactgggataaaaaattgaagttgttttttttaaaacctaatagcaataagcaaaattggcatacataatttttttaatgaactatattttgtcagaatctgaaggtactgaaaaactattctaaaatgcctacttgtttttgcattaatttgtaatgcttacattttgcacccttagataatgtttgataagataaaaatataatttatcccttgtaccaactcaagtcaatcagattttaacatgaaaaatatagattaatgtatgtcagctttctagaggtagaatactcagctatttgatggcatttttcccaccccatgtgaaattttatttttggaagttatgctagtgacattgcaatatatattgaaatcttcggaggctgccag

SEQ ID NO: 424234 - DNA, 5903 bp, Homo sapiens
ggctggagctgctgtggcgaccgacgcgaggcggtggcagaggagacccacccctgtccacatggacagtcgcaaaggcctccgctgatgcattcacgcctgggcggggtgggcggacggccgtagcggcggcggctgcagaacgagctaggggcctgggggcgcctgacggtcgcagagacctcgccgctccggcgcggcgggtgcggccattttacggcctgggacgaagggaggcgtgtttgtgtgctcgctttcattctcctttcttgggaacccacggctgggggaagtttctcaggcagcctgggtgggcggtggatggggagtcgtgggccgagaggaaccgggcccgggaagcgccgtcgtcgtcgtcgccggtcgcgttcccccggagaggcctgagaagctcgggccgcgggcctcgctgcccgccagcccgcggacaggcccgggcgcgcctggcctgcctttgtataggcccgtctgaacgtgggagcgcagcccgcctgacggctgagcccgaggcccgcaaccctgcggcgtctaccctcctccggcgcggcccctcatcccggcgagcacggcggcggtgtgggccatggattaagaaggaggcggcgtgggaggaggaagatggcggccggcaagagcggcggtagcgcaggggagattacttttctggaagctttggctagatcagagtctaagagagatggaggttttaaaaataattggagctttgatcatgaagaagaaagtgaaggagatacagataaagatgggacaaatctgctcagtgtggatgaagatgaggattctgaaacctcaaaaggaaaaaagttaaatcgtcgatctgaaattgttgctaatagctctggtgaattcatcttgaagacatatgtaagacgaaacaagtctgaaagttttaaaactttgaaaggcaacccaattggacttaacatgttgagcaacaataagaaattgagtgaaaatacgcaaaatacgtcattatgttctggaactgtagttcatggtagacgttttcatcatgctcatgcacagataccagtagtaaaaacagcagcccaaaggaaagaatacccacctcatgtccaaaaagttgaaattaatcctgtaaggttaagtcggctccaaggtgttgaacgtataatgaagaaaacagaagagtccgaatcacaagtggagcctgaaattaagaggaaagtacaacagaaacggcactgtagtacctatcagcctactcctcctctatctcctgcttcaaaaaaatgtttaacccatttagaggatttgcaaagaaattgcagacaagctattactttgaatgagtctactggaccattattaagaacgtcaattcatcagaattctggaggacagaagtcacaaaacacaggattaacaaccaagaagttttatggcaacaatgtggaaaaggttccaattgatattattgtgaattgtgatgacagtaaacacacttatttacagactaatggaaaagtcattttacctggggcaaaaatacccaaaatcacaaacttgaaagaaaggaaaacaagtttgtcagacctaaatgatccaatcattttgtccagtgatgatgatgatgacaacgacagaactaacagaagagaaagcatatctcctcagcctgctgattcagcatgttcttcccctgcaccatccactggaaaagtagaagcagcgctaaatgaaaatacttgcagagcagagcgtgaactacgaagcattccagaagactcagagttaaatacagttacattgccaagaagtcgtaaagtgttttctcaagaacctccagatgctttagctttaagctgccaaagttcctttgacagtgtcattttaaactgtcgaagtatacgagtaggaacactcttccggctgttaatagagcctgtaattttttgtttagattttatcaagatacagctagacgaaccagaccatgatcctgtagagattatattaaatacctctgatctaactaaatgtgaatggtgtaatgtccgaaaattacctgtagtgtttcttcaagcaattccagcagtttatcaaaagctgagcatccaactgcaaatgaataaggaggataaagtttggaatgattgtaaaggagtaaataaattaacaaatttagaagaacaatatataattttaatttttcaaaatggccttgatcctccggcaaatatggtatttgaaagtatcattaatgaaattggtataaagaataacatctccaatttttttgcgaaaattccctttgaagaagctaatggcagacttgttgcctgtacaagaacctatgaagagagcatcaaaggaagttgtgggcaaaaggaaaacaaaattaaaactgtatcatttgaatctaaaatacaacttagaagcaaacaagaatttcagttttttgatgaagaagaagaaactggagaaaaccacaccatcttcattggcccagtagaaaagttgatagtatatccaccacctccagctaagggaggcatctctgttaccaatgaggacctgcactgtctaaatgaaggagaatttttaaatgatgttattatagacttttatttgaaatacttggtgcttgaaaaactgaagaaggaagacgctgaccgaattcatatattcagttcttttttctataaacgccttaatcagagagagaggagaaatcatgaaacaactaatctgtcaatacagcaaaaacggcatgggagagtaaaaacatggacccggcacgtagatatttttgagaaggattttatttttgtaccccttaatgaagctgcacactggtttttggctgttgtttgtttccccggtttggaaaaaccaaagtatgaacctaatcctcattaccatgaaaatgctgtcatacagaaatgttcaactgtagaggacagttgtatttcttcttcagccagtgaaatggagagttgttcacaaaactcttctgccaagcctgtaattaagaagatgctaaacaaaaaacattgcatagctgtaattgattccaatcctgggcaggaagaaagtgaccctcgttataagagaaacatatgcagtgtaaaatacagtgtgaaaaaaataaatcatactgcgagtgaaaatgaagaattcaataaaggagaatctacatcccagaaagttgctgataggactaaaagtgagaatggcctacagaatgaaagtttaagttccacacatcatacagatggcttaagcaaaatcagactaaactatagcgatgaatcacctgaagctggtaaaatgcttgaagatgaactcgtcgacttctcagaagatcaggataaccaggatgatagcagtgacgatggattcctcgctgatgacaactgcagttcagaaataggacagtggcatttaaagcctactatctgtaaacaaccttgtatcctacttatggactcactccgaggcccttctcggtcaaatgttgtcaaaattttaagagagtatttagaagtggaatgggaagttaaaaaaggaagcaaaagaagtttttccaaagatgttatgaagggctctaatccaaaagtaccacagcaaaacaacttcagtgactgtggtgtatatgtattgcagtatgtagagagcttttttgagaatccaattctcagttttgaactacctatgaatttggcaaactggtttcctccaccaagaatgagaacaaaaagagaagaaatccgaaacataattctgaagctacaggaagatcagagcaaagagaaaagaaagcataaggacacttactcaacagaagcacctttaggcgaaggaacagaacaatatgtcaatagtatctcagattgaccatttctgttacttgtcatttctactttcagaaactaaatgactttcaaatttgggtatagacaataaagaactgaagtgctcactactcagtgatttggaaattttgatgcttgtataaatgtcagataattaatttccaaaggcgtatgtattaagtaaaagtctgtaaatatgttaatgaggccaatttttccagcatttataattatttttttcacttgttaggaagcttttgttatgtattttctgttaatagtacctaaaattgcaacttctaaacccaaataaaaagaaaatatttataggaggaaatgattaatttgatattctttagtgaacttgtttaattcctcagtgggtgtgacatatttcatgggaatattcaaatatctatggtaatattttgaccctttatatttgttctaaaataagtcaaaatgtgaaaataatattaaatctaagatattttgaactaagcatctttatatgcttgtgtaacaggaacaaagtaacagcctttcaattcatatactgccttgtgttcagtgaacccaagaaatgtaataaatatttgtaattttacacaaatatttaagaggaaagagtattaagagcaattcaaaaaaagtaaccttatactactaaaaaaaaaattcttgcatatattatcatcaaatgcatttttgaagacatcaaagactcaggttaaaactattttggtaagtgcagcttgaatttcaaatatcccgtgttacctttctctattacagcttaaagtatgctacaatctgtgtcatatagttaattgataagcatttttaatctgtgtaaacacaggaatttaaataggaatttactatttttttataaagcttttgctattttttcattgctcattttgttcttattattttgataaagtatcagactttttgcttgagttcttcagtgtaaattattttttacatgtaaaagtactgtattcaaccagttgcataatacagcaaaaatctttgaattcccctttaaaataactaaaatttgatggtttccatgacagatttatagcacatatagggatcttgcatgtatctgcagaaacttcattatttttcaaatgaaatggtgtatacttctttcaaatgaactttgagacttgaaacatattttagtcattttttgttaaatattgaatttttaaatacacatatatcaaaaatagttgagaataaaaagaaagcctaatcatcagcaattattttatttttaatttggccatctctgacattgcagtcaatatcttagggtattttcttgaatttaataaagtcccatgggtgggttcagggtgaatgggagtattaacaacaaccaaaaaatatctattgagacacagtagagtctcagtaagagaaatattaaaatgtaagaaaggtcaccattagtgatatcaactgtagtttgttactttgaactatatttctgattaactctttatagtaataacttagagctgttagctcagatatcttaattagctcatatgaaaaacaagtttaattttattatttactgaacatggcaaaatgcttttcaatctataataaaactgggataaaaaattgaagttgttttttttaaaacctaatagcaataagcaaaattggcatacataatttttttaatgaactatattttgtcagaatctgaaggtactgaaaaactattctaaaatgcctacttgtttttgcattaatttgtaatgcttacattttgcacccttagataatgtttgataagataaaaatataatttatcccttgtaccaactcaagtcaatcagattttaacatgaaaaatatagattaatgtatgtcagctttctagaggtagaatactcagctatttgatggcatttttcccaccccatgtgaaattttatttttggaagttatgctagtgacattgcaatatatattgaaatcttcggaggctgccag

SEQ ID NO: 424235 - DNA, 3945 bp, Homo sapiens
  misc_feature (1)..(1): n is a, c, g, or t
  misc_feature (10)..(12): n is a, c, g, or t
  misc_feature (38)..(38): n is a, c, g, or t
nggggatccnnngactcttccggatcccccgcaaattnccttccctcgagagattatattaaatacctctgatctaactaaatgtgaatggtgtaatgtccgaaaattacctgtagtgtttcttcaagcaattccagcagtttatcaaaagctgagcatccaactgcaaatgaataaggaggataaagtttggaatgattgtaaaggagtaaataaattaacaaatttagaagaacaatatataattttaatttttcaaaatggccttgatcctccggcaaatatggtatttgaaagtatcattaatgaaattggtataaagaataacatctccaatttttttgcgaaaattccctttgaagaagctaatggcagacttgttgcctgtacaagaacctatgaagagagcatcaaaggaagttgtgggcaaaaggaaaacaaaattaaaactgtatcatttgaatctaaaatacaacttagaagcaaacaagaatttcagttttttgatgaagaagaagaaactggagaaaaccacaccatcttcattggcccagtagaaaagttgatagtatatccaccacctccagctaagggaggcatctctgttaccaatgaggacctgcactgtctaaatgaaggagaatttttaaatgatgttattatagacttttatttgaaatacttggtgcttgaaaaactgaagaaggaagacgctgaccgaattcatatattcagttcttttttctataaacgccttaatcagagagagaggagaaatcatgaaacaactaatctgtcaatacagcaaaaacggcatgggagagtaaaaacatggacccggcacgtagatatttttgagaaggattttatttttgtaccccttaatgaagctgcacactggtttttggctgttgtttgtttccccggtttggaaaaaccaaagtatgaacctaatcctcattaccatgaaaatgctgtcatacagaaatgttcaactgtagaggacagttgtatttcttcttcagccagtgaaatggagagttgttcacaaaactcttctgccaagcctgtaattaagaagatgctaaacaaaaaacattgcatagctgtaattgattccaatcctgggcaggaagaaagtgaccctcgttataagagaaacatatgcagtgtaaaatacagtgtgaaaaaaataaatcatactgcgagtgaaaatgaagaattcaataaaggagaatctacatcccagaaagttgctgataggactaaaagtgagaatggcctacagaatgaaagtttaagttccacacatcatacagatggcttaagcaaaatcagactaaactatagcgatgaatcacctgaagctggtaaaatgcttgaagatgaactcgtcgacttctcagaagatcaggataaccaggatgatagcagtgacgatggattcctcgctgatgacaactgcagttcagaaataggacagtggcatttaaagcctactatctgtaaacaaccttgtatcctacttatggactcactccgaggcccttctcggtcaaatgttgtcaaaattttaagagagtatttagaagtggaatgggaagttaaaaaaggaagcaaaagaagtttttccaaagatgttatgaagggctctaatccaaaagtaccacagcaaaacaacttcagtgactgtggtgtatatgtattgcagtatgtagagagcttttttgagaatccaattctcagttttgaactacctatgaatttggcaaactggtttcctccaccaagaatgagaacaaaaagagaagaaatccgaaacataattctgaagctacaggaagatcagagcaaagagaaaagaaagcataaggacacttactcaacagaagcacctttaggcgaaggaacagaacaatatgtcaatagtatctcagattgaccatttctgttacttgtcatttctactttcagaaactaaatgactttcaaatttgggtatagacaataaagaactgaagtgctcactactcagtgatttggaaattttgatgcttgtataaatgtcagataattaatttccaaaggcgtatgtattaagtaaaagtctgtaaatatgttaatgaggccaatttttccagcatttataattatttttttcacttgttaggaagcttttgttatgtattttctgttaatagtacctaaaattgcaacttctaaacccaaataaaaagaaaatatttataggaggaaatgattaatttgatattctttagtgaacttgtttaattcctcagtgggtgtgacatatttcatgggaatattcaaatatctatggtaatattttgaccctttatatttgttctaaaataagtcaaaatgtgaaaataatattaaatctaagatattttgaactaagcatctttatatgcttgtgtaacaggaacaaagtaacagcctttcaattcatatactgccttgtgttcagtgaacccaagaaatgtaataaatatttgtaattttacacaaatatttaagaggaaagagtattaagagcaattcaaaaaaagtaaccttatactactaaaaaaaaaattcttgcatatattatcatcaaatgcatttttgaagacatcaaagactcaggttaaaactattttggtaagtgcagcttgaatttcaaatatcccgtgttacctttctctattacagcttaaagtatgctacaatctgtgtcatatagttaattgataagcatttttaatctgtgtaaacacaggaatttaaataggaatttactatttttttataaagcttttgctattttttcattgctcattttgttcttattattttgataaagtatcagactttttgcttgagttcttcagtgtaaattattttttacatgtaaaagtactgtattcaaccagttgcataatacagcaaaaatctttgaattcccctttaaaataactaaaatttgatggtttccatgacagatttatagcacatatagggatcttgcatgtatctgcagaaacttcattatttttcaaatgaaatggtgtatacttctttcaaatgaactttgagacttgaaacatattttagtcattttttgttaaatattgaatttttaaatacacatatatcaaaaatagttgagaataaaaagaaagcctaatcatcagcaattattttatttttaatttggccatctctgacattgcagtcaatatcttagggtattttcttgaatttaataaagtcccatgggtgggttcagggtgaatgggagtattaacaacaaccaaaaaatatctattgagacacagtagagtctcagtaagagaaatattaaaatgtaagaaaggtcaccattagtgatatcaactgtagtttgttactttgaactatatttctgattaactctttatagtaataacttagagctgttagctcagatatcttaattagctcatatgaaaaacaagtttaattttattatttactgaacatggcaaaatgcttttcaatctataataaaactgggataaaaaattgaagttgttttttttaaaacctaatagcaataagcaaaattggcatacataatttttttaatgaactatattttgtcagaatctgaaggtactgaaaaactattctaaaatgcctacttgtttttgcattaatttgtaatgcttacattttgcacccttagataatgtttgataagataaaaatataatttatcccttgtaccaactcaagtcaatcagattttaacatgaaaaatatagattaatgtatgtcagctttctagaggtagaatactcagctatttgatggcatttttcccaccccatgtgaaattttatttttggaagttatgctagtgacattgcaatatatattgaaatcttcggaggctgccag

SEQ ID NO: 424236 - DNA, 4117 bp, Homo sapiens
tgagcaaggactccccagagaagagctgtaaatatagttaagtgggttgagaaaagaacaaaagaagaaagggaaatggttctttttcttttgcatagtttgcatgggagacagtgccagaggaagaaaagagcagcataatgccactgggatggactcaaacttcagaggaaggttctttcctccaaggaacccctgtttcacttagctttatggagggctgaaactcattagactgtgttccctgagcctctgcccctacatcttatagattgcctagccattgaactaagaggcaaaaaccactttggtttttttgaaaggttatttgaattttaccagcattatttaatttcatgtagatagtagagagagaagtaagatactggaaaattactgttacataagttgggagagtatcactatctagaagctacagataataagaaagtggcccctagttttgcctgtttcttgtttttaattgttaagtatcatgcatactttttagttccacatttttaatccttttgcattgaaaagcattcttgccttgtgcttaccctttttattgaaacttttcctaattgactgtaaattgctaatttaatttcctttaccaggtatcatttgaatctaaaatacaacttagaagcaaacaagaatttcagttttttgatgaagaagaagaaactggagaaaaccacaccatcttcattggcccagtagaaaagttgatagtatatccaccacctccagctaagggaggcatctctgttaccaatgaggacctgcactgtctaaatgaaggagaatttttaaatgatgttattatagacttttatttgaaatacttggtgcttgaaaaactgaagaaggaagacgctgaccgaattcatatattcagttcttttttctataaacgccttaatcagagagagaggagaaatcatgaaacaactaatctgtcaatacagcaaaaacggcatgggagagtaaaaacatggacccggcacgtagatatttttgagaaggattttatttttgtaccccttaatgaagctgcacactggtttttggctgttgtttgtttccccggtttggaaaaaccaaagtatgaacctaatcctcattaccatgaaaatgctgtcatacagaaatgttcaactgtagaggacagttgtatttcttcttcagccagtgaaatggagagttgttcacaaaactcttctgccaagcctgtaattaagaagatgctaaacaaaaaacattgcatagctgtaattgattccaatcctgggcaggaagaaagtgaccctcgttataagagaaacatatgcagtgtaaaatacagtgtgaaaaaaataaatcatactgcgagtgaaaatgaagaattcaataaaggagaatctacatcccagaaagttgctgataggactaaaagtgagaatggcctacagaatgaaagtttaagttccacacatcatacagatggcttaagcaaaatcagactaaactatagcgatgaatcacctgaagctggtaaaatgcttgaagatgaactcgtcgacttctcagaagatcaggataaccaggatgatagcagtgacgatggattcctcgctgatgacaactgcagttcagaaataggacagtggcatttaaagcctactatctgtaaacaaccttgtatcctacttatggactcactccgaggcccttctcggtcaaatgttgtcaaaattttaagagagtatttagaagtggaatgggaagttaaaaaaggaagcaaaagaagtttttccaaagatgttatgaagggctctaatccaaaagtaccacagcaaaacaacttcagtgactgtggtgtatatgtattgcagtatgtagagagcttttttgagaatccaattctcagttttgaactacctatgaatttggcaaactggtttcctccaccaagaatgagaacaaaaagagaagaaatccgaaacataattctgaagctacaggaagatcagagcaaagagaaaagaaagcataaggacacttactcaacagaagcacctttaggcgaaggaacagaacaatatgtcaatagtatctcagattgaccatttctgttacttgtcatttctactttcagaaactaaatgactttcaaatttgggtatagacaataaagaactgaagtgctcactactcagtgatttggaaattttgatgcttgtataaatgtcagataattaatttccaaaggcgtatgtattaagtaaaagtctgtaaatatgttaatgaggccaatttttccagcatttataattatttttttcacttgttaggaagcttttgttatgtattttctgttaatagtacctaaaattgcaacttctaaacccaaataaaaagaaaatatttataggaggaaatgattaatttgatattctttagtgaacttgtttaattcctcagtgggtgtgacatatttcatgggaatattcaaatatctatggtaatattttgaccctttatatttgttctaaaataagtcaaaatgtgaaaataatattaaatctaagatattttgaactaagcatctttatatgcttgtgtaacaggaacaaagtaacagcctttcaattcatatactgccttgtgttcagtgaacccaagaaatgtaataaatatttgtaattttacacaaatatttaagaggaaagagtattaagagcaattcaaaaaaagtaaccttatactactaaaaaaaaaattcttgcatatattatcatcaaatgcatttttgaagacatcaaagactcaggttaaaactattttggtaagtgcagcttgaatttcaaatatcccgtgttacctttctctattacagcttaaagtatgctacaatctgtgtcatatagttaattgataagcatttttaatctgtgtaaacacaggaatttaaataggaatttactatttttttataaagcttttgctattttttcattgctcattttgttcttattattttgataaagtatcagactttttgcttgagttcttcagtgtaaattattttttacatgtaaaagtactgtattcaaccagttgcataatacagcaaaaatctttgaattcccctttaaaataactaaaatttgatggtttccatgacagatttatagcacatatagggatcttgcatgtatctgcagaaacttcattatttttcaaatgaaatggtgtatacttctttcaaatgaactttgagacttgaaacatattttagtcattttttgttaaatattgaatttttaaatacacatatatcaaaaatagttgagaataaaaagaaagcctaatcatcagcaattattttatttttaatttggccatctctgacattgcagtcaatatcttagggtattttcttgaatttaataaagtcccatgggtgggttcagggtgaatgggagtattaacaacaaccaaaaaatatctattgagacacagtagagtctcagtaagagaaatattaaaatgtaagaaaggtcaccattagtgatatcaactgtagtttgttactttgaactatatttctgattaactctttatagtaataacttagagctgttagctcagatatcttaattagctcatatgaaaaacaagtttaattttattatttactgaacatggcaaaatgcttttcaatctataataaaactgggataaaaaattgaagttgttttttttaaaacctaatagcaataagcaaaattggcatacataatttttttaatgaactatattttgtcagaatctgaaggtactgaaaaactattctaaaatgcctacttgtttttgcattaatttgtaatgcttacattttgcacccttagataatgtttgataagataaaaatataatttatcccttgtaccaactcaagtcaatcagattttaacatgaaaaatatagattaatgtatgtcagctttctagaggtagaatactcagctatttgatggcatttttcccaccccatgtgaaattttatttttggaagttatgctagtgacattgcaatatatattgaaatcttcggaggctgccag

SEQ ID NO: 424237 - DNA, 4175 bp, Homo sapiens
ggctggagctgctgtggcgaccgacgcgaggcggtggcagaggagacccacccctgtccacatggacagtcgcaaaggcctccgctgatgcattcacgcctgggcggggtgggcggacggccgtagcggcggcggctgcagaacgagctaggggcctgggggcgcctgacggtcgcagagacctcgccgctccggcgcggcgggtgcggccattttacggcctgggacgaagggaggcgtgtttgtgtgctcgctttcattctcctttcttgggaacccacggctgggggaagtttctcaggcagcctgggtgggcggtggatggggagtcgtgggccgagaggaaccgggcccgggaagcgccgtcgtcgtcgtcgccggtcgcgttcccccggagaggcctgagaagctcgggccgcgggcctcgctgcccgccagcccgcggacaggcccgggcgcgcctggcctgcctttgtataggcccgtctgaacgtgggagcgcagcccgcctgacggctgagcccgaggcccgcaaccctgcggcgtctaccctcctccggcgcggcccctcatcccggcgagcacggcggcggtgtgggccatggattaagaaggaggcggcgtgggaggaggaagatggcggccggcaagagcggcggtagcgcaggggagattacttttctggaagctttggctagatcagagtctaagagagatggaggttttaaaaataattggagctttgatcatgaagaagaaagtgaaggagatacagataaagatgggacaaatctgctcagtgtggatgaagatgaggattctgaaacctcaaaaggaaaaaagttaaatcgtcgatctgaaattgttgctaatagctctggtgaattcatcttgaagacatatgtaagacgaaacaagtctgaaagttttaaaactttgaaaggcaacccaattggacttaacatgttgagcaacaataagaaattgagtgaaaatacgcaaaatacgtcattatgttctggaactgtagttcatggtagacgttttcatcatgctcatgcacagataccagtagtaaaaacagcagcccaaaggaaagaatacccacctcatgtccaaaaagttgaaattaatcctgtaaggttaagtcggctccaaggtgttgaacgtataatgaagaaaacagaagagtccgaatcacaagtggagcctgaaattaagaggaaagtacaacagaaacggcactgtagtacctatcagcctactcctcctctatctcctgcttcaaaaaaatgtttaacccatttagaggatttgcaaagaaattgcagacaagctattactttgaatgagtctactggaccattattaagaacgtcaattcatcagaattctggaggacagaagtcacaaaacacaggattaacaaccaagaagttttatggcaacaatgtggaaaaggttccaattgatattattgtgaattgtgatgacagtaaacacacttatttacagactaatggaaaagtcattttacctggggcaaaaatacccaaaatcacaaacttgaaagaaaggaaaacaagtttgtcagacctaaatgatccaatcattttgtccagtgatgatgatgatgacaacgacagaactaacagaagagaaagcatatctcctcagcctgctgattcagcatgttcttcccctgcaccatccactggaaaagtagaagcagcgctaaatgaaaatacttgcagagcagagcgtgaactacgaagcattccagaagactcagagttaaatacagttacattgccaagaaaagcaagaatgaaagaccagtttggcaattctattatcaacacacctctgaaacgtcgtaaagtgttttctcaagaacctccagatgctttagctttaagctgccaaagttcctttgacagtgtcattttaaactgtcgaagtatacgagtaggaacactcttccggctgttaatagagcctgtaattttttgtttagattttatcaagatacagctagacgaaccagaccatgatcctgtagagattatattaaatacctctgatctaactaaatgtgaatggtgtaatgtccgaaaattacctgtagtgtttcttcaagcaattccagcagtttatcaaaagctgagcatccaactgcaaatgaataaggaggataaagtttggaatgattgtaaaggagtaaataaattaacaaatttagaagaacaatatataattttaatttttcaaaatggccttgatcctccggcaaatatggtatttgaaagtatcattaatgaaattggtataaagaataacatctccaatttttttgcgaaaattccctttgaagaagctaatggcagacttgttgcctgtacaagaacctatgaagagagcatcaaaggaagttgtgggcaaaaggaaaacaaaattaaaactgtatcatttgaatctaaaatacaacttagaagcaaacaagaatttcagttttttgatgaagaagaagaaactggagaaaaccacaccatcttcattggcccagtagaaaagttgatagtatatccaccacctccagctaagggaggcatctctgttaccaatgaggacctgcactgtctaaatgaaggagaatttttaaatgatgttattatagacttttatttgaaatacttggtgcttgaaaaactgaagaaggaagacgctgaccgaattcatatattcagttcttttttctataaacgccttaatcagagagagaggagaaatcatgaaacaactaatctgtcaatacagcaaaaacggcatgggagagtaaaaacatggacccggcacgtagatatttttgagaaggattttatttttgtaccccttaatgaagctgcacactggtttttggctgttgtttgtttccccggtttggaaaaaccaaagtatgaacctaatcctcattaccatgaaaatgctgtcatacagaaatgttcaactgtagaggacagttgtatttcttcttcagccagtgaaatggagagttgttcacaaaactcttctgccaagcctgtaattaagaagatgctaaacaaaaaacattgcatagctgtaattgattccaatcctgggcaggaagaaagtgaccctcgttataagagaaacatatgcagtgtaaaatacagtgtgaaaaaaataaatcatactgcgagtgaaaatgaagaattcaataaaggagaatctacatcccagaaagttgctgataggactaaaagtgagaatggcctacagaatgaaagtttaagttccacacatcatacagatggcttaagcaaaatcagactaaactatagcgatgaatcacctgaagctggtaaaatgcttgaagatgaactcgtcgacttctcagaagatcaggataaccagaccttgtatcctacttatggactcactccgaggcccttctcggtcaaatgttgtcaaaattttaagagagtatttagaagtggaatgggaagttaaaaaaggaagcaaaagaagtttttccaaagatgttatgaagggctctaatccaaaagtaccacagcaaaacaacttcagtgactgtggtgtatatgtattgcagtatgtagagagcttttttgagaatccaattctcagttttgaactacctatgaatttggcaaactggtttcctccaccaagaatgagaacaaaaagagaagaaatccgaaacataattctgaagctacaggaagatcagagcaaagagaaaagaaagcataaggacacttactcaacagaagcacctttaggcgaaggaacagaacaatatgtcaatagtatctcagattgaccatttctgttacttgtcatttctactttcagaaactaaatgactttcaaatttgggtatagacaataaagaactgaagtgctcactactcagtgatttggaaattttgatgcttgtataaatgtcagataattaatttccaaaggcgtatgtattaagtaaaagtctgtaaatatgttaatgaggccaatttttccagcatttataattatttttttcacttgttaggaagcttttgttatgtattttctgttaatagtacctaaaattgcaacttctaaacccaaataaaaagaaaatatttatagga

SEQ ID NO: 424238 - DNA, 1059 bp, Homo sapiens
cactaaggcagattttgtgttcttgactactgtatcattaattaactactagcattaatttcagcctcatatactatgagtgatagacatggccttttttattatgtaatgtttcttattgatacaatggcttaagcaaaatcagactaaactatagcgatgaatcacctgaagctggtaaaatgcttgaagatgaactcgtcgacttctcagaagatcaggataaccaggatgatagcagtgacgatggattcctcgctgatgacaactgcagttcagaaataggacagtggcatttaaagcctactatctgtaaacaaccttgtatcctacttatggactcactccgaggcccttctcggtcaaatgttgtcaaaattttaagagagtatttagaagtggaatgggaagttaaaaaaggaagcaaaagaagtttttccaaagatgttatgaagggctctaatccaaaagtaccacagcaaaacaacttcagtgactgtggtgtatatgtattgcagtatgtagagagcttttttgagaatccaattctcagttttgaactacctatgaatttggcaaactggtttcctccaccaagaatgagaacaaaaagagaagaaatccgaaacataattctgaagctacaggaagatcagagcaaagagaaaagaaagcataaggacacttactcaacagaagcacctttaggcgaaggaacagaacaatatgtcaatagtatctcagattgaccatttctgttacttgtcatttctactttcagaaactaaatgactttcaaatttgggtatagacaataaagaactgaagtgctcactactcagtgatttggaaattttgatgcttgtataaatgtcagataattaatttccaaaggcgtatgtattaagtaaaagtctgtaaatatgttaatgaggccaatttttccagcatttataattatttttttcacttgttaggaagcttttgttatgtattttctgttaatagtacctaaaattgcaacttctaaacccaaataaaaagaaaatatttatagga

SEQ ID NO: 424239 - DNA, 3767 bp, Homo sapiens
ggctggagctgctgtggcgaccgacgcgaggcggtggcagaggagacccacccctgtccacatggacagtcgcaaaggcctccgctgatgcattcacgcctgggcggggtgggcggacggccgtagcggcggcggctgcagaacgagctaggggcctgggggcgcctgacggtcgcagagacctcgccgctccggcgcggcgggtgcggccattttacggcctgggacgaagggaggcgtgtttgtgtgctcgctttcattctcctttcttgggaacccacggctgggggaagtttctcaggcagcctgggtgggcggtggatggggagtcgtgggccgagaggaaccgggcccgggaagcgccgtcgtcgtcgtcgccggtcgcgttcccccggagaggcctgagaagctcgggccgcgggcctcgctgcccgccagcccgcggacaggcccgggcgcgcctggcctgcctttgtataggcccgtctgaacgtgggagcgcagcccgcctgacggctgagcccgaggcccgcaaccctgcggcgtctaccctcctccggcgcggcccctcatcccggcgagcacggcggcggtgtgggccatggattaagaaggaggcggcgtgggaggaggaagatggcggccggcaagagcggcggtagcgcaggggagattacttttctggaagctttggctagatcagagtctaagagagatggaggttttaaaaataattggagctttgatcatgaagaagaaagtgaaggagatacagataaagagtgcttcacttctgtctgggcaacagctccgttcatcattaccactttatgtgccttcaccgatgagatgttgatttgaagttttatttgaaggagagctttgaactgtgggacaaatctgctcagtgtggatgaagatgaggattctgaaacctcaaaaggaaaaaagttaaatcgtcgatctgaaattgttgctaatagctctggtgaattcatcttgaagacatatgtaagacgaaacaagtctgaaagttttaaaactttgaaaggcaacccaattggacttaacatgttgagcaacaataagaaattgagtgaaaatacgcaaaatacgtcattatgttctggaactgtagttcatggtagacgttttcatcatgctcatgcacagataccagtagtaaaaacagcagcccaaagcagtctggaccgaaaagaaaggaaagaatacccacctcatgtccaaaaagttgaaattaatcctgtaaggttaagtcggctccaaggtgttgaacgtataatgaagaaaacagaagagtccgaatcacaagtggagcctgaaattaagaggaaagtacaacagaaacggcactgtagtacctatcagcctactcctcctctatctcctgcttcaaaaaaatgtttaacccatttagaggatttgcaaagaaattgcagacaagctattactttgaatgagtctactggaccattattaagaacgtcaattcatcagaattctggaggacagaagtcacaaaacacaggattaacaaccaagaagttttatggcaacaatgtggaaaaggttccaattgatattattgtgaattgtgatgacagtaaacacacttatttacagactaatggaaaagtcattttacctggggcaaaaatacccaaaatcacaaacttgaaagaaaggaaaacaagtttgtcagacctaaatgatccaatcattttgtccagtgatgatgatgatgacaacgacagaactaacagaagagaaagcatatctcctcagcctgctgattcagcatgttcttcccctgcaccatccactggaaaagtagaagcagcgctaaatgaaaatacttgcagagcagagcgtgaactacgaagcattccagaagactcagagttaaatacagttacattgccaagaaaagcaagaatgaaagaccagtttggcaattctattatcaacacacctctgaaacgtcgtaaagtgttttctcaagaacctccagatgctttagctttaagctgccaaagttcctttgacagtgtcattttaaactgtcgaagtatacgagtaggaacactcttccggctgttaatagagcctgtaattttttgtttagattttatcaagatacagctagacgaaccagaccatgatcctgtagagattatattaaatacctctgatctaactaaatgtgaatggtgtaatgtccgaaaattacctgtagtgtttcttcaagcaattccagcagtttatcaaaagctgagcatccaactgcaaatgaataaggaggataaagtttggaatgattgtaaaggagtaaataaattaacaaatttagaagaacaatatataattttaatttttcaaaatggccttgatcctccggcaaatatggtatttgaaagtatcattaatgaaattggtataaagaataacatctccaatttttttgcgaaaattccctttgaagaagctaatggcagacttgttgcctgtacaagaacctatgaagagagcatcaaaggaagttgtgggcaaaaggaaaacaaaattaaaactgtatcatttgaatctaaaatacaacttagaagcaaacaagaatttcagttttttgatgaagaagaagaaactggagaaaaccacaccatcttcattggcccagtagaaaagttgatagtatatccaccacctccagctaagggaggcatctctgttaccaatgaggacctgcactgtctaaatgaaggagaatttttaaatgatgttattatagacttttatttgaagtaagttaattttccactgatcttttattaaatctttaacattccgtcatatcttatgtctttgttttccagagtcaggctttttgagttttaaattccatctctgccacttactgtgtgacatttggggagttattttttctgtttctgtctttgcacattttaaaaatgagaattctatctaaaaagttgtgaaaattgggccagggagatatctggcttatgtctataatcctgacactttgggaggtcaaggtgggaggatcgcttgagcccaagagttcacgaccagcctgggaaacaaagtgagaccttgtctccacaaaaaatttaaaaattagccagtcatatacctatagtcccagccacttgggaggctcagacaggaagattacctgagcccatgagttcgaagttgcactgagccatgatggcgccactgcactccagcctggtcaacaaagcaaaactctacccccacacccacccccgaaaacaggagttgtgagaattaaatgagatcgtacatatcaagtagtaggaaaaatgcctagtacagtgttagaagtttatggtcttgtaggaagcacaaatacagaattaaagcaatgatagaagcattaacatggtacagtcctagcagatgagagaatgcttcattatctttggaggttgggagatatgagggaccaggaagctttcctggaagagcttacattatgacccaatatacattatgacccaacataacacatgtatacacctatgtgcaatgtgtttatacatttatcaatttgtatgtttttactggtttgtgatataaaatggacatgtatatgaaataaaacagaacttagcatcagtatgcatagttctctgtaatattttctagtttcttatactgtgtttcattaaacaaaacaaaacttttaaaaattgaaaaaagaa

SEQ ID NO: 424240 - DNA, 3355 bp, Homo sapiens
ggctggagctgctgtggcgaccgacgcgaggcggtggcagaggagacccacccctgtccacatggacagtcgcaaaggcctccgctgatgcattcacgcctgggcggggtgggcggacggccgtagcggcggcggctgcagaacgagctaggggcctgggggcgcctgacggtcgcagagacctcgccgctccggcgcggcgggtgcggccattttacggcctgggacgaagggaggcgtgtttgtgtgctcgctttcattctcctttcttgggaacccacggctgggggaagtttctcaggcagcctgggtgggcggtggatggggagtcgtgggccgagaggaaccgggcccgggaagcgccgtcgtcgtcgtcgccggtcgcgttcccccggagaggcctgagaagctcgggccgcgggcctcgctgcccgccagcccgcggacaggcccgggcgcgcctggcctgcctttgtataggcccgtctgaacgtgggagcgcagcccgcctgacggctgagcccgaggcccgcaaccctgcggcgtctaccctcctccggcgcggcccctcatcccggcgagcacggcggcggtgtgggccatggattaagaaggaggcggcgtgggaggaggaagatggcggccggcaagagcggcggtagcgcaggggagattacttttctggaagctttggctagatcagagtctaagagagatggaggttttaaaaataattggagctttgatcatgaagaagaaagtgaaggagatacagataaagatgggacaaatctgctcagtgtggatgaagatgaggattctgaaacctcaaaaggaaaaaagttaaatcgtcgatctgaaattgttgctaatagctctggtgaattcatcttgaagacatatgtaagacgaaacaagtctgaaagttttaaaactttgaaaggcaacccaattggacttaacatgttgagcaacaataagaaattgagtgaaaatacgcaaaatacgtcattatgttctggaactgtagttcatggtagacgttttcatcatgctcatgcacagataccagtagtaaaaacagcagcccaaaggaaagaatacccacctcatgtccaaaaagttgaaattaatcctgtaaggttaagtcggctccaaggtgttgaacgtataatgaagaaaacagaagagtccgaatcacaagtggagcctgaaattaagaggaaagtacaacagaaacggcactgtagtacctatcagcctactcctcctctatctcctgcttcaaaaaaatgtttaacccatttagaggatttgcaaagaaattgcagacaagctattactttgaatgagtctactggaccattattaagaacgtcaattcatcagaattctggaggacagaagtcacaaaacacaggattaacaaccaagaagttttatggcaacaatgtggaaaaggttccaattgatattattgtgaattgtgatgacagtaaacacacttatttacagactaatggaaaagtcattttacctggggcaaaaatacccaaaatcacaaacttgaaagaaaggaaaacaagtttgtcagacctaaatgatccaatcattttgtccagtgatgatgatgatgacaacgacagaactaacagaagagaaagcatatctcctcagcctgctgattcagcatgttcttcccctgcaccatccactggaaaagtagaagcagcgctaaatgaaaatacttgcagagcagagcgtgaactacgaagcattccagaagactcagagttaaatacagttacattgccaagaaaagcaagaatgaaagaccagtttggcaattctattatcaacacacctctgaaacgtcgtaaagtgttttctcaagaacctccagatgctttagctttaagctgccaaagttcctttgacagtgtcattttaaactgtcgaagtatacgagtaggaacactcttccggctgttaatagagcctgtaattttttgtttagattttatcaagatacagctagacgaaccagaccatgatcctgtagagattatattaaatacctctgatctaactaaatgtgaatggtgtaatgtccgaaaattacctgtagtgtttcttcaagcaattccagcagtttatcaaaagctgagcatccaactgcaaatgaataaggaggataaagtttggaatgattgtaaaggagtaaataaattaacaaatttagaagaacaatatataattttaatttttcaaaatggccttgatcctccggcaaatatggtatttgaaagtatcattaatgaaattggtataaagaataacatctccaatttttttgcgaaaattccctttgaagaagctaatggcagacttgttgcctgtacaagaacctatgaagagagcatcaaaggaagttgtgggcaaaaggaaaacaaaattaaaactgtatcatttgaatctaaaatacaacttagaagcaaacaagaatttcagttttttgatgaagaagaagaaactggagaaaaccacaccatcttcattggcccagtagaaaagttgatagtatatccaccacctccagctaagggaggcatctctgttaccaatgaggacctgcactgtctaaatgaaggagaatttttaaatgatgttattatagacttttatttgaaatacttggtgcttgaaaaactgaagaaggaagacgctgaccgaattcatatattcagttcttttttctataaacgccttaatcagagagagaggagaaatcatgaaacaactaatctgtcaatacagcaaaaacggcatgggagagtaaaaacatggacccggcacgtagatatttttgagaaggattttatttttgtaccccttaatgaagcgtgagtaagaatttcctttaaaggaaaatctttaaatcatgtaaatgatggcaatttttaaataatgagtatgaggtgaagaattcattttaaaacatctttctgaaatctcttgtgtatattcatatttgtactgcctgttttacaagaattaatgcagtttcacagtgaagcatgtaagatattgaattttagagacaatagaccagatacctttctaatctcattttattcattaatgtcaaataataccatttttaaaaatatggtgcttattgtctagcaagtaacctatagaaaagtattattttatacaaaaagatgattaggtcacataaaggaattggaatcttaagtttaaaatacacttctgtttttagccagaaaggagaaacgatggttggatttatgccatttttcaattaaaaaccatgtggactacttgaagcagt

SEQ ID NO: 424241 - DNA, 1339 bp, Homo sapiens
ggctggagctgctgtggcgaccgacgcgaggcggtggcagaggagacccacccctgtccacatggacagtcgcaaaggcctccgctgatgcattcacgcctgggcggggtgggcggacggccgtagcggcggcggctgcagaacgagctaggggcctgggggcgcctgacggtcgcagagacctcgccgctccggcgcggcgggtgcggccattttacggcctgggacgaagggaggcgtgtttgtgtgctcgctttcattctcctttcttgggaacccacggctgggggaagtttctcaggcagcctgggtgggcggtggatggggagtcgtgggccgagaggaaccgggcccgggaagcgccgtcgtcgtcgtcgccggtcgcgttcccccggagaggcctgagaagctcgggccgcgggcctcgctgcccgccagcccgcggacaggcccgggcgcgcctggcctgcctttgtataggcccgtctgaacgtgggagcgcagcccgcctgacggctgagcccgaggcccgcaaccctgcggcgtctaccctcctccggcgcggcccctcatcccggcgagcacggcggcggtgtgggccatggattaagaaggaggcggcgtgggaggaggaagatggcggccggcaagagcggcggtagcgcaggggagattacttttctggaagctttggctagatcagagtctaagagagatggaggttttaaaaataattggagctttgatcatgaagaagaaagtgaaggagatacagataaagatgggacaaatctgctcagtgtggatgaagatgaggattctgaaacctcaaaaggaaaaaagttaaatcgtcgatctgaaattgttgctaatagctctggtgaattcatcttgaagacatatgtaagacgaaacaagtctgaaagttttaaaactttgaaaggcaacccaattggacttaacatgttgagcaacaataagaaattgagtgaaaatacgcaaaatacgtcattatgttctggaactgtagttcatggtagacgttttcatcatgctcatgcacagataccagtagtaaaaacagcagcccaaaggtaagaattctaattgtctttggttagtatatacatggcatcttcttcaataggttttcactttttttaaccatttttttcctttgtgaaaccttactgttttcactgtctgtagagagatatatctctgaaataattcatgacatgaaattatactattttatatctgcttttgagtaatcagattctgtaaatagagaatttttcactaagacctgttgtattgcattataatccagagaatc

SEQ ID NO: 424242 - DNA, 234 bp, Homo sapiens
gagaagagtaatccaggatataattattggtttagtcttatgttctgattatttttttgctgaaacactagcttattttaactaaaacttaaagtttatttttttctccttcctttagaacgtataatgaagaaaacagaagagtccgaatcacaagtggagcctgaaattaagaggaaagtacaacagaaacggcactgtagtacctatcagcctactcctcctctatctcct

SEQ ID NO: 424243 - DNA, 886 bp, Homo sapiens
ttagtgaaaagctgttttgcagttagattctcttgagatactaccagttcacatggcaattttctatttgtgtttgacaaaaatgttaactattatatctttaagactatagatttagatttattagatgaagtaaattagttacatacgtgaatagatttgttcttgaactgttgttagagtaatgtattctggttccttccaataacttaggtgacattggcatgtaacacatactggtctttccagtgattgttgtgtatccactgtatgtcagacattgttgtggacctttatactgggatttctgattatcctcctggaaagaattaataattactccttttaaaagtatctatttacttcttttgtgtttttttttggacttatatttatttcttttcagatttagaagaacaatatataattttaatttttcaaaatggccttgatcctccggcaaatatggtatttgaaagtatcattaatgaaattggtataaagaataacatctccaatttttttgcgaaaattccctttgaagaagctaatggcagacttgttgcctgtacaagaacctatgaagagagcatcaaaggaagttgtgggcaaaaggaaaacaaaattaaaactgtaattatgttttttaatttaaaaatattcttaaattgtgggtagttttaaagggaaatatgttttattttaatactgttcatttcagtgttaaatctttttaattttatttcagaattacttacttttatgtgtgatttgtaaactaccttgtgtcaaaacagtggtgggtaggtgccaaataccacttgatacaggtctcagaagcatttttggttcctccacattctatccttatctttacttttcatca

SEQ ID NO: 424244 - DNA, 4285 bp, Homo sapiens
ggctggagctgctgtggcgaccgacgcgaggcggtggcagaggagacccacccctgtccacatggacagtcgcaaaggcctccgctgatgcattcacgcctgggcggggtgggcggacggccgtagcggcggcggctgcagaacgagctaggggcctgggggcgcctgacggtcgcagagacctcgccgctccggcgcggcgggtgcggccattttacggcctgggacgaagggaggcgtgtttgtgtgctcgctttcattctcctttcttgggaacccacggctgggggaagtttctcaggcagcctgggtgggcggtggatggggagtcgtgggccgagaggaaccgggcccgggaagcgccgtcgtcgtcgtcgccggtcgcgttcccccggagaggcctgagaagctcgggccgcgggcctcgctgcccgccagcccgcggacaggcccgggcgcgcctggcctgcctttgtataggcccgtctgaacgtgggagcgcagcccgcctgacggctgagcccgaggcccgcaaccctgcggcgtctaccctcctccggcgcggcccctcatcccggcgagcacggcggcggtgtgggccatggattaagaaggaggcggcgtgggaggaggaagatggcggccggcaagagcggcggtagcgcaggggagattacttttctggaagctttggctagatcagagtctaagagagatggaggttttaaaaataattggagctttgatcatgaagaagaaagtgaaggagatacagataaagatgggacaaatctgctcagtgtggatgaagatgaggattctgaaacctcaaaaggaaaaaagttaaatcgtcgatctgaaattgttgctaatagctctggtgaattcatcttgaagacatatgtaagacgaaacaagtctgaaagttttaaaactttgaaaggcaacccaattggacttaacatgttgagcaacaataagaaattgagtgaaaatacgcaaaatacgtcattatgttctggaactgtagttcatggtagacgttttcatcatgctcatgcacagataccagtagtaaaaacagcagcccaaagcagtctggaccgaaaagaaaggaaagaatacccacctcatgtccaaaaagttgaaattaatcctgtaaggttaagtcggctccaaggtgttgaacgtataatgaagaaaacagaagagtccgaatcacaagtggagcctgaaattaagaggaaagtacaacagaaacggcactgtagtacctatcagcctactcctcctctatctcctgcttcaaaaaaatgtttaacccatttagaggatttgcaaagaaattgcagacaagctattactttgaatgagtctactggaccattattaagaacgtcaattcatcagaattctggaggacagaagtcacaaaacacaggattaacaaccaagaagttttatggcaacaatgtggaaaaggttccaattgatattattgtgaattgtgatgacagtaaacacacttatttacagactaatggaaaagtcattttacctggggcaaaaatacccaaaatcacaaacttgaaagaaaggaaaacaagtttgtcagacctaaatgatccaatcattttgtccagtgatgatgatgatgacaacgacagaactaacagaagagaaagcatatctcctcagcctgctgattcagcatgttcttcccctgcaccatccactggaaaagtagaagcagcgctaaatgaaaatacttgcagagcagagcgtgaactacgaagcattccagaagactcagagttaaatacagttacattgccaagaaaagcaagaatgaaagaccagtttggcaattctattatcaacacacctctgaaacgtcgtaaagtgttttctcaagaacctccagatgctttagctttaagctgccaaagttcctttgacagtgtcattttaaactgtcgaagtatacgagtaggaacactcttccggctgttaatagagcctgtaattttttgtttagattttatcaagatacagctagacgaaccagaccatgatcctgtagagattatattaaatacctctgatctaactaaatgtgaatggtgtaatgtccgaaaattacctgtagtgtttcttcaagcaattccagcagtttatcaaaagctgagcatccaactgcaaatgaataaggaggataaagtttggaatgattgtaaaggagtaaataaattaacaaatttagaagaacaatatataattttaatttttcaaaatggccttgatcctccggcaaatatggtatttgaaagtatcattaatgaaattggtataaagaataacatctccaatttttttgcgaaaattccctttgaagaagctaatggcagacttgttgcctgtacaagaacctatgaagagagcatcaaaggaagttgtgggcaaaaggaaaacaaaattaaaactgtatcatttgaatctaaaatacaacttagaagcaaacaagaatttcagttttttgatgaagaagaagaaactggagaaaaccacaccatcttcattggcccagtagaaaagttgatagtatatccaccacctccagctaagggaggcatctctgttaccaatgaggacctgcactgtctaaatgaaggagaatttttaaatgatgttattatagacttttatttgaaatacttggtgcttgaaaaactgaagaaggaagacgctgaccgaattcatatattcagttcttttttctataaacgccttaatcagagagagaggagaaatcatgaaacaactaatctgtcaatacagcaaaaacggcatgggagagtaaaaacatggacccggcacgtagatatttttgagaaggattttatttttgtaccccttaatgaagctgcacactggtttttggctgttgtttgtttccccggtttggaaaaaccaaagtatgaacctaatcctcattaccatgaaaatgctgtcatacagaaatgttcaactgtagaggacagttgtatttcttcttcagccagtgaaatggagagttgttcacaaaactcttctgccaagcctgtaattaagaagatgctaaacaaaaaacattgcatagctgtaattgattccaatcctgggcaggaagaaagtgaccctcgttataagagaaacatatgcagtgtaaaatacagtgtgaaaaaaataaatcatactgcgagtgaaaatgaagaattcaataaaggagaatctacatcccagaaagttgctgataggactaaaagtgagaatggcctacagaatgaaagtttaagttccacacatcatacagatggcttaagcaaaatcagactaaactatagcgatgaatcacctgaagctggtaaaatgcttgaagatgaactcgtcgacttctcagaagatcaggataaccaggatgatagcagtgacgatggattcctcgctgatgacaactgcagttcagaaataggacagtggcatttaaagcctactatctgtaaacaaccttgtatcctacttatggactcactccgaggcccttctcggtcaaatgttgtcaaaattttaagagagtatttagaagtggaatgggaagttaaaaaaggaagcaaaagaagtttttccaaagatgttatgaagggctctaatccaaaagtaccacagcaaaacaacttcagtgactgtggtgtatatgtattgcagtatgtagagagcttttttgagaatccaattctcagttttgaactacctatgaatttggcaaactggtttcctccaccaagaatgagaacaaaaagagaagaaatccgaaacataattctgaagctacaggaagatcagagcaaagagaaaagaaagcataaggacacttactcaacagaagcacctttaggcgaaggaacagaacaatatgtcaatagtatctcagattgaccatttctgttacttgtcatttctactttcagaaactaaatgactttcaaatttgggtatagacaataaagaactgaagtgctcactactcagtgatttggaaattttgatgcttgtataaatgtcagataattaatttccaaaggcgtatgtattaagtaaaagtctgtaaatatgttaatgaggccaatttttccagcatttataattatttttttcacttgttaggaagcttttgttatgtattttctgttaatagtacctaaaattgcaacttctaaacccaaataaaaagaaaatatttatagga

SEQ ID NO: 424245 - DNA, 6086 bp, Homo sapiens
ggctggagctgctgtggcgaccgacgcgaggcggtggcagaggagacccacccctgtccacatggacagtcgcaaaggcctccgctgatgcattcacgcctgggcggggtgggcggacggccgtagcggcggcggctgcagaacgagctaggggcctgggggcgcctgacggtcgcagagacctcgccgctccggcgcggcgggtgcggccattttacggcctgggacgaagggaggcgtgtttgtgtgctcgctttcattctcctttcttgggaacccacggctgggggaagtttctcaggcagcctgggtgggcggtggatggggagtcgtgggccgagaggaaccgggcccgggaagcgccgtcgtcgtcgtcgccggtcgcgttcccccggagaggcctgagaagctcgggccgcgggcctcgctgcccgccagcccgcggacaggcccgggcgcgcctggcctgcctttgtataggcccgtctgaacgtgggagcgcagcccgcctgacggctgagcccgaggcccgcaaccctgcggcgtctaccctcctccggcgcggcccctcatcccggcgagcacggcggcggtgtgggccatggattaagaaggaggcggcgtgggaggaggaagatggcggccggcaagagcggcggtagcgcaggggagattacttttctggaagctttggctagatcagagtctaagagagatggaggttttaaaaataattggagctttgatcatgaagaagaaagtgaaggagatacagataaagagtgcttcacttctgtctgggcaacagctccgttcatcattaccactttatgtgccttcaccgatgagatgttgatttgaagttttatttgaaggagagctttgaactgtgggacaaatctgctcagtgtggatgaagatgaggattctgaaacctcaaaaggaaaaaagttaaatcgtcgatctgaaattgttgctaatagctctggtgaattcatcttgaagacatatgtaagacgaaacaagtctgaaagttttaaaactttgaaaggcaacccaattggacttaacatgttgagcaacaataagaaattgagtgaaaatacgcaaaatacgtcattatgttctggaactgtagttcatggtagacgttttcatcatgctcatgcacagataccagtagtaaaaacagcagcccaaagcagtctggaccgaaaagaaaggaaagaatacccacctcatgtccaaaaagttgaaattaatcctgtaaggttaagtcggctccaaggtgttgaacgtataatgaagaaaacagaagagtccgaatcacaagtggagcctgaaattaagaggaaagtacaacagaaacggcactgtagtacctatcagcctactcctcctctatctcctgcttcaaaaaaatgtttaacccatttagaggatttgcaaagaaattgcagacaagctattactttgaatgagtctactggaccattattaagaacgtcaattcatcagaattctggaggacagaagtcacaaaacacaggattaacaaccaagaagttttatggcaacaatgtggaaaaggttccaattgatattattgtgaattgtgatgacagtaaacacacttatttacagactaatggaaaagtcattttacctggggcaaaaatacccaaaatcacaaacttgaaagaaaggaaaacaagtttgtcagacctaaatgatccaatcattttgtccagtgatgatgatgatgacaacgacagaactaacagaagagaaagcatatctcctcagcctgctgattcagcatgttcttcccctgcaccatccactggaaaagtagaagcagcgctaaatgaaaatacttgcagagcagagcgtgaactacgaagcattccagaagactcagagttaaatacagttacattgccaagaaaagcaagaatgaaagaccagtttggcaattctattatcaacacacctctgaaacgtcgtaaagtgttttctcaagaacctccagatgctttagctttaagctgccaaagttcctttgacagtgtcattttaaactgtcgaagtatacgagtaggaacactcttccggctgttaatagagcctgtaattttttgtttagattttatcaagatacagctagacgaaccagaccatgatcctgtagagattatattaaatacctctgatctaactaaatgtgaatggtgtaatgtccgaaaattacctgtagtgtttcttcaagcaattccagcagtttatcaaaagctgagcatccaactgcaaatgaataaggaggataaagtttggaatgattgtaaaggagtaaataaattaacaaatttagaagaacaatatataattttaatttttcaaaatggccttgatcctccggcaaatatggtatttgaaagtatcattaatgaaattggtataaagaataacatctccaatttttttgcgaaaattccctttgaagaagctaatggcagacttgttgcctgtacaagaacctatgaagagagcatcaaaggaagttgtgggcaaaaggaaaacaaaattaaaactgtatcatttgaatctaaaatacaacttagaagcaaacaagaatttcagttttttgatgaagaagaagaaactggagaaaaccacaccatcttcattggcccagtagaaaagttgatagtatatccaccacctccagctaagggaggcatctctgttaccaatgaggacctgcactgtctaaatgaaggagaatttttaaatgatgttattatagacttttatttgaaatacttggtgcttgaaaaactgaagaaggaagacgctgaccgaattcatatattcagttcttttttctataaacgccttaatcagagagagaggagaaatcatgaaacaactaatctgtcaatacagcaaaaacggcatgggagagtaaaaacatggacccggcacgtagatatttttgagaaggattttatttttgtaccccttaatgaagctgcacactggtttttggctgttgtttgtttccccggtttggaaaaaccaaagtatgaacctaatcctcattaccatgaaaatgctgtcatacagaaatgttcaactgtagaggacagttgtatttcttcttcagccagtgaaatggagagttgttcacaaaactcttctgccaagcctgtaattaagaagatgctaaacaaaaaacattgcatagctgtaattgattccaatcctgggcaggaagaaagtgaccctcgttataagagaaacatatgcagtgtaaaatacagtgtgaaaaaaataaatcatactgcgagtgaaaatgaagaattcaataaaggagaatctacatcccagaaagttgctgataggactaaaagtgagaatggcctacagaatgaaagtttaagttccacacatcatacagatggcttaagcaaaatcagactaaactatagcgatgaatcacctgaagctggtaaaatgcttgaagatgaactcgtcgacttctcagaagatcaggataaccaggatgatagcagtgacgatggattcctcgctgatgacaactgcagttcagaaataggacagtggcatttaaagcctactatctgtaaacaaccttgtatcctacttatggactcactccgaggcccttctcggtcaaatgttgtcaaaattttaagagagtatttagaagtggaatgggaagttaaaaaaggaagcaaaagaagtttttccaaagatgttatgaagggctctaatccaaaagtaccacagcaaaacaacttcagtgactgtggtgtatatgtattgcagtatgtagagagcttttttgagaatccaattctcagttttgaactacctatgaatttggcaaactggtttcctccaccaagaatgagaacaaaaagagaagaaatccgaaacataattctgaagctacaggaagatcagagcaaagagaaaagaaagcataaggacacttactcaacagaagcacctttaggcgaaggaacagaacaatatgtcaatagtatctcagattgaccatttctgttacttgtcatttctactttcagaaactaaatgactttcaaatttgggtatagacaataaagaactgaagtgctcactactcagtgatttggaaattttgatgcttgtataaatgtcagataattaatttccaaaggcgtatgtattaagtaaaagtctgtaaatatgttaatgaggccaatttttccagcatttataattatttttttcacttgttaggaagcttttgttatgtattttctgttaatagtacctaaaattgcaacttctaaacccaaataaaaagaaaatatttataggaggaaatgattaatttgatattctttagtgaacttgtttaattcctcagtgggtgtgacatatttcatgggaatattcaaatatctatggtaatattttgaccctttatatttgttctaaaataagtcaaaatgtgaaaataatattaaatctaagatattttgaactaagcatctttatatgcttgtgtaacaggaacaaagtaacagcctttcaattcatatactgccttgtgttcagtgaacccaagaaatgtaataaatatttgtaattttacacaaatatttaagaggaaagagtattaagagcaattcaaaaaaagtaaccttatactactaaaaaaaaaattcttgcatatattatcatcaaatgcatttttgaagacatcaaagactcaggttaaaactattttggtaagtgcagcttgaatttcaaatatcccgtgttacctttctctattacagcttaaagtatgctacaatctgtgtcatatagttaattgataagcatttttaatctgtgtaaacacaggaatttaaataggaatttactatttttttataaagcttttgctattttttcattgctcattttgttcttattattttgataaagtatcagactttttgcttgagttcttcagtgtaaattattttttacatgtaaaagtactgtattcaaccagttgcataatacagcaaaaatctttgaattcccctttaaaataactaaaatttgatggtttccatgacagatttatagcacatatagggatcttgcatgtatctgcagaaacttcattatttttcaaatgaaatggtgtatacttctttcaaatgaactttgagacttgaaacatattttagtcattttttgttaaatattgaatttttaaatacacatatatcaaaaatagttgagaataaaaagaaagcctaatcatcagcaattattttatttttaatttggccatctctgacattgcagtcaatatcttagggtattttcttgaatttaataaagtcccatgggtgggttcagggtgaatgggagtattaacaacaaccaaaaaatatctattgagacacagtagagtctcagtaagagaaatattaaaatgtaagaaaggtcaccattagtgatatcaactgtagtttgttactttgaactatatttctgattaactctttatagtaataacttagagctgttagctcagatatcttaattagctcatatgaaaaacaagtttaattttattatttactgaacatggcaaaatgcttttcaatctataataaaactgggataaaaaattgaagttgttttttttaaaacctaatagcaataagcaaaattggcatacataatttttttaatgaactatattttgtcagaatctgaaggtactgaaaaactattctaaaatgcctacttgtttttgcattaatttgtaatgcttacattttgcacccttagataatgtttgataagataaaaatataatttatcccttgtaccaactcaagtcaatcagattttaacatgaaaaatatagattaatgtatgtcagctttctagaggtagaatactcagctatttgatggcatttttcccaccccatgtgaaattttatttttggaagttatgctagtgacattgcaatatatattgaaatcttcggaggctgccag

SEQ ID NO: 424246 - DNA, 3836 bp, Homo sapiens
ggctggagctgctgtggcgaccgacgcgaggcggtggcagaggagacccacccctgtccacatggacagtcgcaaaggcctccgctgatgcattcacgcctgggcggggtgggcggacggccgtagcggcggcggctgcagaacgagctaggggcctgggggcgcctgacggtcgcagagacctcgccgctccggcgcggcgggtgcggccattttacggcctgggacgaagggaggcgtgtttgtgtgctcgctttcattctcctttcttgggaacccacggctgggggaagtttctcaggcagcctgggtgggcggtggatggggagtcgtgggccgagaggaaccgggcccgggaagcgccgtcgtcgtcgtcgccggtcgcgttcccccggagaggcctgagaagctcgggccgcgggcctcgctgcccgccagcccgcggacaggcccgggcgcgcctggcctgcctttgtataggcccgtctgaacgtgggagcgcagcccgcctgacggctgagcccgaggcccgcaaccctgcggcgtctaccctcctccggcgcggcccctcatcccggcgagcacggcggcggtgtgggccatggattaagaaggaggcggcgtgggaggaggaagatggcggccggcaagagcggcggtagcgcaggggagattacttttctggaagctttggctagatcagagtctaagagagatggaggttttaaaaataattggagctttgatcatgaagaagaaagtgaaggagatacagataaagatgggacaaatctgctcagtgtggatgaagatgaggattctgaaacctcaaaaggaaaaaagttaaatcgtcgatctgaaattgttgctaatagctctggtgaattcatcttgaagacatatgtaagacgaaacaagtctgaaagttttaaaactttgaaaggcaacccaattggacttaacatgttgagcaacaataagaaattgagtgaaaatacgcaaaatacgtcattatgttctggaactgtagttcatggtagacgttttcatcatgctcatgcacagataccagtagtaaaaacagcagcccaaaggaaagaatacccacctcatgtccaaaaagttgaaattaatcctgtaaggttaagtcggctccaaggtgttgaacgtataatgaagaaaacagaagagtccgaatcacaagtggagcctgaaattaagaggaaagtacaacagaaacggcactgtagtacctatcagcctactcctcctctatctcctgcttcaaaaaaatgtttaacccatttagaggatttgcaaagaaattgcagacaagctattactttgaatgagtctactggaccattattaagaacgtcaattcatcagaattctggaggacagaagtcacaaaacacaggattaacaaccaagaagttttatggcaacaatgtggaaaaggttccaattgatattattgtgaattgtgatgacagtaaacacacttatttacagactaatggaaaagtcattttacctggggcaaaaatacccaaaatcacaaacttgaaagaaaggaaaacaagtttgtcagacctaaatgatccaatcattttgtccagtgatgatgatgatgacaacgacagaactaacagaagagaaagcatatctcctcagcctgctgattcagcatgttcttcccctgcaccatccactggaaaagtagaagcagcgctaaatgaaaatacttgcagagcagagcgtgaactacgaagcattccagaagactcagagttaaatacagttacattgccaagaaaagcaagaatgaaagaccagtttggcaattctattatcaacacacctctgaaacgtcgtaaagtgttttctcaagaacctccagatgctttagctttaagctgccaaagttcctttgacagtgtcattttaaactgtcgaagtatacgagtaggaacactcttccggctgttaatagagcctgtaattttttgtttagattttatcaagatacagctagacgaaccagaccatgatcctgtagagattatattaaatacctctgatctaactaaatgtgaatggtgtaatgtccgaaaattacctgtagtgtttcttcaagcaattccagcagtttatcaaaagctgagcatccaactgcaaatgaataaggaggataaagtttggaatgattgtaaaggagtaaataaattaacaaatttagaagaacaatatataattttaatttttcaaaatggccttgatcctccggcaaatatggtatttgaaagtatcattaatgaaattggtataaagaataacatctccaatttttttgcgaaaattccctttgaagaagctaatggcagacttgttgcctgtacaagaacctatgaagagagcatcaaaggaagttgtgggcaaaaggaaaacaaaattaaaactgtatcatttgaatctaaaatacaacttagaagcaaacaagaatttcagttttttgatgaagaagaagaaactggagaaaaccacaccatcttcattggcccagtagaaaagttgatagtatatccaccacctccagctaagggaggcatctctgttaccaatgaggacctgcactgtctaaatgaaggagaatttttaaatgatgttattatagacttttatttgaaatacttggtgcttgaaaaactgaagaaggaagacgctgaccgaattcatatattcagttcttttttctataaacgccttaatcagagagagaggagaaatcatgaaacaactaatctgtcaatacagcaaaaacggcatgggagagtaaaaacatggacccggcacgtagatatttttgagaaggattttatttttgtaccccttaatgaagcatggcttaagcaaaatcagactaaactatagcgatgaatcacctgaagctggtaaaatgcttgaagatgaactcgtcgacttctcagaagatcaggataaccaggatgatagcagtgacgatggattcctcgctgatgacaactgcagttcagaaataggacagtggcatttaaagcctactatctgtaaacaaccttgtatcctacttatggactcactccgaggcccttctcggtcaaatgttgtcaaaattttaagagagtatttagaagtggaatgggaagttaaaaaaggaagcaaaagaagtttttccaaagatgttatgaagggctctaatccaaaagtaccacagcaaaacaacttcagtgactgtggtgtatatgtattgcagtatgtagagagcttttttgagaatccaattctcagttttgaactacctatgaatttggcaaactggtttcctccaccaagaatgagaacaaaaagagaagaaatccgaaacataattctgaagctacaggaagatcagagcaaagagaaaagaaagcataaggacacttactcaacagaagcacctttaggcgaaggaacagaacaatatgtcaatagtatctcagattgaccatttctgttacttgtcatttctactttcagaaactaaatgactttcaaatttgggtatagacaataaagaactgaagtgctcactactcagtgatttggaaattttgatgcttgtataaatgtcagataattaatttccaaaggcgtatgtattaagtaaaagtctgtaaatatgttaatgaggccaatttttccagcatttataattatttttttcacttgttaggaagcttttgttatgtattttctgttaatagtacctaaaattgcaacttctaaacccaaataaaaagaaaatatttatagga

SEQ ID NO: 424247 - DNA, 1524 bp, Homo sapiens
tgctgggattactggcgtgagctactgcgcccggccagaattaggcatttttaataaattaattggcaagaactttagaaaaaaacattttaattgatatgtattgccaaatataataaacttttctaataacatatttagtcatttcatttgttttttacagtgcacactggtttttggctgttgtttgtttccccggtttggaaaaaccaaagtatgaacctaatcctcattaccatgaaaatgctgtcatacagaaatgttcaactgtagaggacagttgtatttcttcttcagccagtgaaatggagagttgttcacaaaactcttctgccaagcctgtaattaagaagatgctaaacaaaaaacattgcatagctgtaattgattccaatcctgggcaggaagaaagtgaccctcgttataagagaaacatatgcagtgtaaaatacagtgtgaaaaaaataaatcatactgcgagtgaaaatgaagaattcaataaaggagaatctacatcccagaaagttgctgataggactaaaagtgagaatggcctacagaatgaaagtttaagttccacacatcatacagatggcttaagcaaaatcagactaaactatagcgatgaatcacctgaagctggtaaaatgcttgaagatgaactcgtcgacttctcagaagatcaggataaccaggatgatagcagtgacgatggattcctcgctgatgacaactgcagttcagaaataggacagtggcatttaaagcctactatctgtaaacaaccttgtatcctacttatggactcactccgaggcccttctcggtcaaatgttgtcaaaattttaagagagtatttagaagtggaatgggaagttaaaaaaggaagcaaaagaagtttttccaaagatgttatgaagggctctaatccaaaagtaccacagcaaaacaacttcagtgactgtggtgtatatgtattgcagtatgtagagagcttttttgagaatccaattctcagttttgaactacctatgaatttggcaaactggtttcctccaccaagaatgagaacaaaaagagaagaaatccgaaacataattctgaagctacaggaagatcagagcaaagagaaaagaaagcataaggacacttactcaacagaagcacctttaggcgaaggaacagaacaatatgtcaatagtatctcagattgaccatttctgttacttgtcatttctactttcagaaactaaatgactttcaaatttgggtatagacaataaagaactgaagtgctcactactcagtgatttggaaattttgatgcttgtataaatgtcagataattaatttccaaaggcgtatgtattaagtaaaagtctgtaaatatgttaatgaggccaatttttccagcatttataattatttttttcacttgttaggaagcttttgttatgtattttctgttaatagtacctaaaattgcaacttctaaacccaaataaaaagaaaatatttatagga

SEQ ID NO: 424248 - DNA, 978 bp, Homo sapiens
atcccccgggctgcaggattcggcacgaggttccacacatcatacatggcttaagcaaaatcagactaaactatagcgatgaatcacctgaagctggtaaaatgcttgaagatgaactcgtcgacttctcagaagatcaggataaccaggatgatagcagtgacgatggattcctcgctgatgacaactgcagttcagaaataggacagtggcatttaaagcctactatctgtaaacaaccttgtatcctacttatggactcactccgaggcccttctcggtcaaatgttgtcaaaattttaagagagtatttagaagtggaatgggaagttaaaaaaggaagcaaaagaagtttttccaaagatgttatgaagggctctaatccaaaagtaccacagcaaaacaacttcagtgactgtggtgtatatgtattgcagtatgtagagagcttttttgagaatccaattctcagttttgaactacctatgaatttggcaaactggtttcctccaccaagaatgagaacaaaaagagaagaaatccgaaacataattctgaagctacaggaagatcagagcaaagagaaaagaaagcataaggacacttactcaacagaagcacctttaggcgaaggaacagaacaatatgtcaatagtatctcagattgaccatttctgttacttgtcatttctactttcagaaactaaatgactttcaaatttgggtatagacaataaagaactgaagtgctcactactcagtgatttggaaattttgatgcttgtataaatgtcagataattaatttccaaaggcgtatgtattaagtaaaagtctgtaaatatgttaatgaggccaatttttccagcatttataattatttttttcacttgttaggaagcttttgttatgtattttctgttaatagtacctaaaattgcaacttctaaacccaaataaaaagaaaatatttatagga

SEQ ID NO: 424249 - DNA, 902 bp, Homo sapiens
tgaagaatcgagtcggtccctcgcgaacgtgtatctgatcttcgtcgacttctcagaagatcaggataaccaggatgatagcagtgacgatggattcctcgctgatgacaactgcagttcagaaataggacagtggcatttaaagcctactatctgtaaacaaccttgtatcctacttatggactcactccgaggcccttctcggtcaaatgttgtcaaaattttaagagagtatttagaagtggaatgggaagttaaaaaaggaagcaaaagaagtttttccaaagatgttatgaagggctctaatccaaaagtaccacagcaaaacaacttcagtgactgtggtgtatatgtattgcagtatgtagagagcttttttgagaatccaattctcagttttgaactacctatgaatttggcaaactggtttcctccaccaagaatgagaacaaaaagagaagaaatccgaaacataattctgaagctacaggaagatcagagcaaagagaaaagaaagcataaggacacttactcaacagaagcacctttaggcgaaggaacagaacaatatgtcaatagtatctcagattgaccatttctgttacttgtcatttctactttcagaaactaaatgactttcaaatttgggtatagacaataaagaactgaagtgctcactactcagtgatttggaaattttgatgcttgtataaatgtcagataattaatttccaaaggcgtatgtattaagtaaaagtctgtaaatatgttaatgaggccaatttttccagcatttataattatttttttcacttgttaggaagcttttgttatgtattttctgttaatagtacctaaaattgcaacttctaaacccaaataaaaagaaaatatttatagga

SEQ ID NO: 424250 - DNA, 2210 bp, Homo sapiens
ggctggagctgctgtggcgaccgacgcgaggcggtggcagaggagacccacccctgtccacatggacagtcgcaaaggcctccgctgatgcattcacgcctgggcggggtgggcggacggccgtagcggcggcggctgcagaacgagctaggggcctgggggcgcctgacggtcgcagagacctcgccgctccggcgcggcgggtgcggccattttacggcctgggacgaagggaggcgtgtttgtgtgctcgctttcattctcctttcttgggaacccacggctgggggaagtttctcaggcagcctgggtgggcggtggatggggagtcgtgggccgagaggaaccgggcccgggaagcgccgtcgtcgtcgtcgccggtcgcgttcccccggagaggcctgagaagctcgggccgcgggcctcgctgcccgccagcccgcggacaggcccgggcgcgcctggcctgcctttgtataggcccgtctgaacgtgggagcgcagcccgcctgacggctgagcccgaggcccgcaaccctgcggcgtctaccctcctccggcgcggcccctcatcccggcgagcacggcggcggtgtgggccatggattaagaaggaggcggcgtgggaggaggaagatggcggccggcaagagcggcggtagcgcaggggagattacttttctggaagctttggctagatcagagtctaagagagatggaggttttaaaaataattggagctttgatcatgaagaagaaagtgaaggagatacagataaagatgggacaaatctgctcagtgtggatgaagatgaggattctgaaacctcaaaaggaaaaaagttaaatcgtcgatctgaaattgttgctaatagctctggtgaattcatcttgaagacatatgtaagacgaaacaagtctgaaagttttaaaactttgaaaggcaacccaattggacttaacatgttgagcaacaataagaaattgagtgaaaatacgcaaaatacgtcattatgttctggaactgtagttcatggtagacgttttcatcatgctcatgcacagataccagtagtaaaaacagcagcccaaaggaaagaatacccacctcatgtccaaaaagttgaaattaatcctgtaaggttaagtcggctccaaggtgttgaacgtataatgaagaaaacagaagagtccgaatcacaagtggagcctgaaattaagaggaaagtacaacagaaacggcactgtagtacctatcagcctactcctcctctatctcctgcttcaaaaaaatgtttaacccatttagaggatttgcaaagaaattgcagacaagctattactttgaatgagtctactggaccattattaagaacgtcaattcatcagaattctggaggacagaagtcacaaaacacaggattaacaaccaagaagttttatggcaacaatgtggaaaaggttccaattgatattattgtgaattgtgatgacagtaaacacacttatttacagactaatggaaaagtcattttacctggggcaaaaatacccaaaatcacaaacttgaaagaaaggaaaacaagtttgtcagacctaaatgatccaatcattttgtccagtgatgatgatgatgacaacgacagaactaacagaagagaaagcatatctcctcagcctgctgattcagcatgttcttcccctgcaccatccactggaaaagtagaagcagcgctaaatgaaaatacttgcagagcagagcgtgaactacgaagcattccagaagactcagagttaaatacagttacattgccaagaaaagcaagaatgaaagaccagtttggcaattctattatcaacacacctctgaaacgtcgtaaagtgttttctcaagaacctccagatgctttagctttaagctgccaaagttcctttgacagtgtcattttaaactgtcgaagtatacgagtaggaacactcttccggctgttaatagagcctgtaattgtaagtacatcttaagctctttactataccaattataacattaaaaattccgttgctaaagctaatatataatatttaaaatttataagttaaaatatttaatagaatatcagttagttcaagatttcacattgctttaagagtatataaatagtagctccttgccattaaaatgagttagaaaaccttccaatatgttattg

SEQ ID NO: 424251 - DNA, 4320 bp, Homo sapiens
tcaggtgatctgtttttccttggccatctctccgtctgctcaccactcttttttccctagtacacgaatatctttaacattcaaaaatatatcttaacacttaggatagatcaaaattggtgttcattcagataacattgtcagattctcttagatccaaatatttcttttaacaacttaacagtatgttaaaacctcattcacttgcttggagagctgttgtacagttctttaaagagttctttatatgaggttgaatcttccctttcttaatagtcaaattctatatatggtgtcttcctttggaacaccttaccatgggctatttggtcagctccattgactccttgccttgggaattttagtgcagtgagagttgtgctcacttctccttcacttcagggcctgatgtgtcaggaaatggagttttctgaattaacatgaaagttgagttgcagattgcttggttaaaaaacaacaggtggggcacagagtctcatacctatgattgcagcacttcgggaggtgggaggattgcttgaggtcaggagtttgagaccgacctggccaacatagtgagacccccatctctattattttgaaaaacaacagcaaattttttcttaacatccaagacaaggccaccagtcaaaactatcaagttttagtagtattttcctgcttgattatataatagcctggcttagagatacaacctttaaataaggaatcttaagatgatgtgcagctgttctttgccttatttgtttgtttgttggttagtttgtagtttctaagaatctgctctgttcagctgtacagttccttcttctggagttaacctgtggcaaggattatgtttcacctgtcacaaaaatgagatctgtgccttcctctattataaagttagggcatgtgattcattcttcgaaatacttcaaaatgtactttggtatgtttttgtcttgaaaagaggttttctagctagaaattcggggcccagaaggtcaaggctccagagatccccttctcatcatccttcagttgtctgaggagacagaggatcacatgtgtcacagtgagtgctgattccccagaatctgcagtcttaagctcccctgctgacgcacacagccagttctctgcttcatattcatgtgacccactgtgaagtgacaggcagctgccaattctgtcatataagaagcagctctgcccatgcaactttgaaagttcctgcacttctccatagactgctccttcatggaaataaacacatcatcacactgtgggtgcctaagctaagtttgtttgcagtttgatgatgcccagctccttttcaactcagccttaattggcactttaagggccaggatgaggtttctctcaggccaagtcgagatttccagatttccttttgtccaaggctgaccagtttagaagttattcacatccttgttttagttctttccttcttgtcctggtacctcttcctttccaggattatttgcagagtctgtgatggcttacttggtgaccagacatggggtgagctactggtatagtctgattactttggcatctattctgaactggtcattggctgtacatgagtttttgtgctggtaaaggaatatactgggaagattggaaggcacagactgggaactaattctgagaagagaactgctgagttactgaaagaccttttggaccacccctaaatggagcatcttgatagatggcaaatccagtgtttcttaaacttgtccatgctgcccagagcccactgccttttatcagatgtgagacttcactgccacagtgtcatcccacagtttccttccctggacatttgataaagggaaaatcatttcttgtcctttaaggcagggactattattttttcacttttccacataccccacaacacctaacattgatttactcgtagtaggagtttcatactgttgaactctctaaaggccatttgttccagggcctagctgggcttgtgaaggacaacagagtcatttcctaaggaccccaaaagacagcatgaaggaaaaaataataataaactgctgttcacagtgccttgagtgtaccaccgtactttctgctatgccttgtccattccaatctggacagtctctgtgcccctcctttccactcaagtgttatccagcactcaagttctggctcaaggcccaacatctccgtggggacctcagccatcccagggcattgtgaccccttcctctaagtccccggcacactcgctgattggtaccctctcattcgacaaagcatatgccattgtggcttacttgtcatttctttaggtcttgccttcccaagtagatcatgagccactataagaactagctcccatagtcccagcccctgggcctggtacatggcaatgcttagtgattggtgattgaggataatggtggtaaaggatgtaccagacagtcatctcctgaagagatgccgaacaacctgtccttgttttatgtattttctctttctttcctgtccagttttattcctctcatagtaactgctaaaaaaaatgtcagttcctgtcactcttccaccccttttctccctctcccctgcattgtggtctgggccttggtccactagcaactccccttaggtgttgcttaatctgcctcatggccaaagccaatcccattcctgtcccccgctacccaagggactcccagtctgtatgcacaaggcgggatgtgaagtctggatgtgcaagaaacccagctgtaagaaacagcttccctcggcttggcatggtggctcatgcctataatcccagcactttgagaggtcaaagtgggagaatcacttgagcccaggagttcgggactagcctgggcaacatagcaagatcccacctctacaaaaaaagaaaaaattcagagtctcaaatgtcccttcatctccttactctcgacctgtctccctagttctctgccgccttttcctctcccctggatctgacactcaattgtctgcatgcacttttcaactgaaagagactccaatgccatccttctgatgaaatttttgctttggatactactgcagaaaaaatgctatcttgtattctggtccatggtggggaagaccctgtcgtagaacctggcaactcaagtggagggaggggccagaacattgttcttatgctatttacagtgagacaacaggattgatgcagaactttctttttttttttttttttttgagacagagtttcattcttgttgcccagggctggagtgcagtggcatgatctcagctcactgcaacctccaccccccaggttcaagcagttcttcctcagcctccggagtagctgggattacaggcgtgcgccaccacgcccagctaatttttgtatttttggtagagacggggtttcaccagtgttggccaggctggtctcgaactcctgacctcaggtgatccacccacctcggcctcccaaagtgctgggattacaggcatgaaccaccgtgcccggccgtgatgcgcaactttctaataacatacttttgaaagtgcccagacatacatccctcctctggtaccacagtggccatcagttgccagagaacatgaaattatccagccctcagctctgcagcaggattctgaggagtaaagcaggcctgtaaagtactctaaagtacttcagagaggtaatgccacaaagcgaagaacacctcttggaggcagagcccctcagccctatccaggccagcagtgtccacttgaaatctgaaagcagcctccctcaccaaaccagcaagatggaaaacctccctgggttggcaagtggccctgggaagtacatgccccatctctgtcaggatagcagtggagaggtttcgtgccagtgccagctccacccacccagatggtactcaagactccaagcctgtcaatggggtggaaactttctggcattttctgtcagaagggtgagttagcactgaaccatctcatgtgtcttttcactgagtaacagcccatatccattccatgaaatgagtgactgctttgttgaatcagatagtaacaaacatttatttgtagtctggttgtgtcatatcatggttgaattgcaaacaggttggatagaagagtcagcaaaaatcaacaaaagcattctgtaaaaaacttttctagaattacaataaatggcattgtatattttatttataaattatgtgctgcacatcatttttatcaatgaaatttataataaatttctgtacatatatacatttttat

SEQ ID NO: 424252 - DNA, 3818 bp, Homo sapiens
tcaggtgatctgtttttccttggccatctctccgtctgctcaccactcttttttccctagtacacgaatatctttaacattcaaaaatatatcttaacacttaggatagatcaaaattggtgttcattcagataacattgtcagattctcttagatccaaatatttcttttaacaacttaacagtatgttaaaacctcattcacttgcttggagagctgttgtacagttctttaaagagttctttatatgaggttgaatcttccctttcttaatagtcaaattctatatatggtgtcttcctttggaacaccttaccatgggctatttggtcagctccattgactccttgccttgggaattttagtgcagtgagagttgtgctcacttctccttcacttcagggcctgatgtgtcaggaaatggagttttctgaattaacatgaaagttgagttgcagattgcttggttaaaaaacaacaggtggggcacagagtctcatacctatgattgcagcacttcgggaggtgggaggattgcttgaggtcaggagtttgagaccgacctggccaacatagtgagacccccatctctattattttgaaaaacaacagcaaattttttcttaacatccaagacaaggccaccagtcaaaactatcaagttttagtagtattttcctgcttgattatataatagcctggcttagagatacaacctttaaataaggaatcttaagatgatgtgcagctgttctttgccttatttgtttgtttgttggttagtttgtagtttctaagaatctgctctgttcagctgtacagttccttcttctggagttaacctgtggcaaggattatgtttcacctgtcacaaaaatgagatctgtgccttcctctattataaagttagggcatgtgattcattcttcgaaatacttcaaaatgtactttggtatgtttttgtcttgaaaagaggttttctagctagaaattcggggcccagaaggtcaaggctccagagatccccttctcatcatccttcagttgtctgaggagacagaggatcacatgtgtcacagtgagtgctgattccccagaatctgcagtcttaagctcccctgctgacgcacacagccagttctctgcttcatattcatgtgacccacttaattctgagaagagaactgctgagttactgaaagaccttttggaccacccctaaatggagcatcttgatagatggcaaatccagtgtttcttaaacttgtccatgctgcccagagcccactgccttttatcagatgtgagacttcactgccacagtgtcatcccacagtttccttccctggacatttgataaagggaaaatcatttcttgtcctttaaggcagggactattattttttcacttttccacataccccacaacacctaacattgatttactcgtagtaggagtttcatactgttgaactctctaaaggccatttgttccagggcctagctgggcttgtgaaggacaacagagtcatttcctaaggaccccaaaagacagcatgaaggaaaaaataataataaactgctgttcacagtgccttgagtgtaccaccgtactttctgctatgccttgtccattccaatctggacagtctctgtgcccctcctttccactcaagtgttatccagcactcaagttctggctcaaggcccaacatctccgtggggacctcagccatcccagggcattgtgaccccttcctctaagtccccggcacactcgctgattggtaccctctcattcgacaaagcatatgccattgtggcttacttgtcatttctttaggtcttgccttcccaagtagatcatgagccactataagaactagctcccatagtcccagcccctgggcctggtacatggcaatgcttagtgattggtgattgaggataatggtggtaaaggatgtaccagacagtcatctcctgaagagatgccgaacaacctgtccttgttttatgtattttctctttctttcctgtccagttttattcctctcatagtaactgctaaaaaaaatgtcagttcctgtcactcttccaccccttttctccctctcccctgcattgtggtctgggccttggtccactagcaactccccttaggtgttgcttaatctgcctcatggccaaagccaatcccattcctgtcccccgctacccaagggactcccagtctgtatgcacaaggcgggatgtgaagtctggatgtgcaagaaacccagctgtaagaaacagcttccctcggcttggcatggtggctcatgcctataatcccagcactttgagaggtcaaagtgggagaatcacttgagcccaggagttcgggactagcctgggcaacatagcaagatcccacctctacaaaaaaagaaaaaattcagagtctcaaatgtcccttcatctccttactctcgacctgtctccctagttctctgccgccttttcctctcccctggatctgacactcaattgtctgcatgcacttttcaactgaaagagactccaatgccatccttctgatgaaatttttgctttggatactactgcagaaaaaatgctatcttgtattctggtccatggtggggaagaccctgtcgtagaacctggcaactcaagtggagggaggggccagaacattgttcttatgctatttacagtgagacaacaggattgatgcagaactttctttttttttttttttttttgagacagagtttcattcttgttgcccagggctggagtgcagtggcatgatctcagctcactgcaacctccaccccccaggttcaagcagttcttcctcagcctccggagtagctgggattacaggcgtgcgccaccacgcccagctaatttttgtatttttggtagagacggggtttcaccagtgttggccaggctggtctcgaactcctgacctcaggtgatccacccacctcggcctcccaaagtgctgggattacaggcatgaaccaccgtgcccggccgtgatgcgcaactttctaataacatacttttgaaagtgcccagacatacatccctcctctggtaccacagtggccatcagttgccagagaacatgaaattatccagccctcagctctgcagcaggattctgaggagtaaagcaggcctgtaaagtactctaaagtacttcagagaggtaatgccacaaagcgaagaacacctcttggaggcagagcccctcagccctatccaggccagcagtgtccacttgaaatctgaaagcagcctccctcaccaaaccagcaagatggaaaacctccctgggttggcaagtggccctgggaagtacatgccccatctctgtcaggatagcagtggagaggtttcgtgccagtgccagctccacccacccagatggtactcaagactccaagcctgtcaatggggtggaaactttctggcattttctgtcagaagggtgagttagcactgaaccatctcatgtgtcttttcactgagtaacagcccatatccattccatgaaatgagtgactgctttgttgaatcagatagtaacaaacatttatttgtagtctggttgtgtcatatcatggttgaattgcaaacaggttggatagaagagtcagcaaaaatcaacaaaagcattctgtaaaaaacttttctagaattacaataaatggcattgtatattttatttataaattatgtgctgcacatcatttttatcaatgaaatttataataaatttctgtacatatatacatttttat

SEQ ID NO: 424253 - DNA, 532 bp, Homo sapiens
tgagacggagtcttgctctgtcatccaggctggagtgcagtggcatgatctctgctcactgcaacctccgcctcccaagttcaagtgattctcttgcctcagtctcccgagtagctgggattataggcatccaccatcatgcccagctaatttttgtatttttagtagagatggggtttcatcatgttggccaggctggtcttgaactcctgacctcaggtgatctgcccacctcagcctcccaaagtgctgggattacaggcgtgagccactgtgcccggcctatccttaactttagacattgcacacagtacaactgctatccgtatcggatagttcttaaggtcagcagctattgcttattgtgtctgctgactctcttggtagctgcccttcttttgtgtctagtgatctttgagttcattgtttgatcttaaccaggggaactgtatgggccaaaattaggattgaggatatttttctccatagaggattttccttaacttttgcagcagctgaaagatgccattca

SEQ ID NO: 424254 - DNA, 2949 bp, Homo sapiens
ggctagtttgtgtttcagacttccatatttccatttgcagttgggtgaagtggttagagctgaaaggggacagctggagtcaaacaacttaactcaaatatctgggaacgatttcgcgctgaggaagaccctttgggacttgtagctccactccggggaacggactcgccgggactgacagttgccggaagtgaggctgcggggaatggccgccgctgcgaccatggcggctgcggcccgggaactggtgttgcgggctgggacctcagatatggaggaggaagagggcccgctggcgggtggtcctgggctccaggaaccactgcaacttggggagttggatatcacttctgatgaattcatcctggatgaagtggatgttcacattcaggcaaatctggaggatgagttagtaaaggaagctcttaaaacgggtgtagatctccgtcactattcaaagcaagttgagctggagctacagcagattgaacagaaatccattcgggattatattcaagagagtgagaatatagcatctctacacaaccagatcacagcctgtgatgctgtcctggagcgaatggagcagatgttgggagcttttcagagtgacctcagctccatcagctctgagatccggacactgcaggaacagtcaggagccatgaacattcgacttcgaaatcgccaggcagttcgggggaaacttggggagcttgttgatggtctggtggtgccttctgctctggtcacggcaattctggaggctccagtgacagagcccaggttcttggagcagctacaggagctggatgccaaggcagccgcagtcagagagcaggaagctagaggcacagcagcctgcgcagatgtcagaggcgtgctcgatcggctccgggtcaaggcagtgacgaagatccgagagtttatcctccagaagatttattccttcaggaaacccatgaccaactatcagatcccccagacggccctgctgaagtacaggttcttctatcagtttctgctgggcaatgaacgagcaacagcaaaggagatcagggatgaatatgtggagacgctgagcaagatttacctgtcttactaccgctcttacctggggcggctcatgaaggtgcagtatgaggaagtcgctgagaaagatgatctaatgggtgtggaagatacagcaaagaaaggattcttctcaaagccatcgctccgcagcaggaacaccattttcaccctaggaacccgcggctctgtcatctcccccactgaacttgaggcccccatcctggtgcctcacacagcgcagcgcggagagcagaggtatccatttgaggccctcttccgcagccagcactacgccctcctagacaattcctgccgcgaataccttttcatctgtgaattttttgttgtgtctggcccagctgcacacgacctgttccatgctgtcatgggccgtacactcagcatgaccctgaaacacctggattcttatctagctgactgctacgatgccattgctgtttttctctgtatccacattgttctccggttccgtaacattgcagcaaagagggatgttcctgccctggacaggtactgggaacaggtgcttgccttgctatggccacggtttgaactgatcctggagatgaatgttcagagcgtccgaagcactgacccccagcgcctaggggggttggatactcggccccactatatcacacgccgctatgcagagttctcctccgctcttgtcagtatcaaccagacaattcctaatgaacggaccatgcaattgctgggacagctgcaggtggaggtggagaattttgtcctccgagtggcagctgagttctcctcaaggaaggagcagcttgtgtttctgatcaacaactatgacatgatgctgggtgtgctgatggagcgggctgcagatgacagcaaagaggttgagagcttccagcagctgctcaatgctcggacacaggaattcattgaagagttgctgtctcccccttttgggggtttagtggcatttgtgaaggaggctgaggctttgattgagcgtggacaggctgagcgacttcgaggggaagaagcccgggtaactcagctgatccgtggctttggtagttcctggaaatcatcagtggaatctctgagtcaggatgtaatgcggagtttcaccaacttcagaaatggcaccagtatcattcagggagcgctgacccagctgatccagctctatcatcgcttccaccgggtgctgtcccagccgcagctccgagccctccctgcccgggctgagctcatcaacattcaccaccttatggtggagctcaagaagcataagcccaacttctgatgtgccagaaaccgccctgagatctgccggtcatctccatggacttctgcaccccattccatacccttcttcacctggggtaccccttccagttttccccttgcttcccaggcccttgacatggcttacctgccttcactcccagcaccttgcccaacaggataagctggatccccttggccttctgaatatcccagtgtcttcaggtttcccaagaccacttccctgtgggcttccaaaatggcctttatcatttctccagtctgtcaccctcctttcctgctcccatacacccaaggcttgtttcttcccctgtaaaaaccactgcctcaatctctggttcactcaactagtcaccatgtcctgaggcatgaagcctcctcagctcttggaattgctggcaaggggtgactgcctctgagtcattgtgtttttcaaagtgatttcttttctgtagctttttgacctaagatctcagcaatttgaacactaacctctcccctcctggctcaagaattactccgaagtcagtctgcagaaaataaatatttagtatgacatgaaaattaaaa

SEQ ID NO: 424255 - DNA, 2712 bp, Homo sapiens
atggcttgggtaccacaacttccggtgcgcctttctttacagttcgtaaggttcataggcgggtggtcctgggctccaggaaccactgcaacttggggagttggatatcacttctgatgaattcatcctggatgaagtggatgttcacattcaggcaaatctggaggatgagttagtaaaggaagctcttaaaacgggtgtagatctccgtcactattcaaagcaagttgagctggagctacagcagattgaacagaaatccattcgggattatattcaagagagtgagaatatagcatctctacacaaccagatcacagcctgtgatgctgtcctggagcgaatggagcagatgttgggagcttttcagagtgacctcagctccatcagctctgagatccggacactgcaggaacagtcaggagccatgaacattcgacttcgaaatcgccaggcagttcgggggaaacttggggagcttgttgatggtctggtggtgccttctgctctggtcacggcaattctggaggctccagtgacagagcccaggttcttggagcagctacaggagctggatgccaaggcagccgcagtcagagagcaggaagctagaggcacagcagcctgcgcagatgtcagaggcgtgctcgatcggctccgggtcaaggcagtgacgaagatccgagagtttatcctccagaagatttattccttcaggaaacccatgaccaactatcagatcccccagacggccctgctgaagtacaggttcttctatcagtttctgctgggcaatgaacgagcaacagcaaaggagatcagggatgaatatgtggagacgctgagcaagatttacctgtcttactaccgctcttacctggggcggctcatgaaggtgcagtatgaggaagtcgctgagaaagatgatctaatgggtgtggaagatacagcaaagaaaggattcttctcaaagccatcgctccgcagcaggaacaccattttcaccctaggaacccgcggctctgtcatctcccccactgaacttgaggcccccatcctggtgcctcacacagcgcagcgcggagagcagaggtatccatttgaggccctcttccgcagccagcactacgccctcctagacaattcctgccgcgaataccttttcatctgtgaattttttgttgtgtctggcccagctgcacacgacctgttccatgctgtcatgggccgtacactcagcatgaccctgaaacacctggattcttatctagctgactgctacgatgccattgctgtttttctctgtatccacattgttctccggttccgtaacattgcagcaaagagggatgttcctgccctggacaggtactgggaacaggtgcttgccttgctatggccacggtttgaactgatcctggagatgaatgttcagagcgtccgaagcactgacccccagcgcctaggggggttggatactcggccccactatatcacacgccgctatgcagagttctcctccgctcttgtcagtatcaaccagacaattcctaatgaacggaccatgcaattgctgggacagctgcaggtggaggtggagaattttgtcctccgagtggcagctgagttctcctcaaggaaggagcagcttgtgtttctgatcaacaactatgacatgatgctgggtgtgctgatggagcgggctgcagatgacagcaaagaggttgagagcttccagcagctgctcaatgctcggacacaggaattcattgaagagttgctgtctcccccttttgggggtttagtggcatttgtgaaggaggctgaggctttgattgagcgtggacaggctgagcgacttcgaggggaagaagcccgggtaactcagctgatccgtggctttggtagttcctggaaatcatcagtggaatctctgagtcaggatgtaatgcggagtttcaccaacttcagaaatggcaccagtatcattcagggagcgctgacccagctgatccagctctatcatcgcttccaccgggtgctgtcccagccgcagctccgagccctccctgcccgggctgagctcatcaacattcaccaccttatggtggagctcaagaagcataagcccaacttctgatgtgccagaaaccgccctgagatctgccggtcatctccatggacttctgcaccccattccatacccttcttcacctggggtaccccttccagttttccccttgcttcccaggcccttgacatggcttacctgccttcactcccagcaccttgcccaacaggataagctggatccccttggccttctgaatatcccagtgtcttcaggtttcccaagaccacttccctgtgggcttccaaaatggcctttatcatttctccagtctgtcaccctcctttcctgctcccatacacccaaggcttgtttcttcccctgtaaaaaccactgcctcaatctctggttcactcaactagtcaccatgtcctgaggcatgaagcctcctcagctcttggaattgctggcaaggggtgactgcctctgagtcattgtgtttttcaaagtgatttcttttctgtagctttttgacctaagatctcagcaatttgaacactaacctctcccctcctggctcaagaattactccgaagtcagtctgcagaaaataaatatttagtatgacatgaaaattaaaa

SEQ ID NO: 424256 - DNA, 3014 bp, Homo sapiens
ggctagtttgtgtttcagacttccatatttccatttgcagttgggtgaagtggttagagctgaaaggggacagctggagtcaaacaacttaactcaaatatctgggaacgatttcgcgctgaggaagaccctttgggacttgtagctccactccggggaacggactcgccgggactgacagttgccggaagtgaggctgcggggaatggccgccgctgcgaccatggcggctgcggcccgggaactggtgttgcgggctgggacctcagatatggaggaggaagagggcccgctggcgggtggtcctgggctccaggaaccactgcaacttggggagttggatatcacttctgatgaattcatcctggatgaagtggatgttcacattcaggcaaatctggaggatgagttagtaaaggaagctcttaaaacgggtgtagatctccgtcactattcaaagcaagttgagctggagctacagcagattgaacagaaatccattcgggattatattcaagagagtgagaatatagcatctctacacaaccagatcacagcctgtgatgctgtcctggagcgaatggagcagatgttgggagcttttcagagtgacctcagctccatcagctctgagatccggacactgcaggaacagtcaggagccatgaacattcgacttcgaaatcgccaggcagttcgggggaaacttggggagcttgttgatggtctggtggtgccttctgctctggtcacggcaattctggaggctccagtgacagagcccaggttcttggagcagctacaggagctggatgccaaggcagccgcagtcagagagcaggaagctagaggcacagcagcctgcgcagatgtcagaggcgtgctcgatcggctccgggtcaaggcagtgacgaagatccgagagtttatcctccagaagatttattccttcaggaaacccatgaccaactatcagatcccccagacggccctgctgaagtacaggttcttctatcagtttctgctgggcaatgaacgagcaacagcaaaggagatcagggatgaatatgtggagacgctgagcaagatttacctgtcttactaccgctcttacctggggcggctcatgaaggtgcagtatgaggaagtcgctgagaaagatgatctaatgggtgtggaagatacagcaaagaaaggattcttctcaaagccatcgctccgcagcaggaacaccattttcaccctaggaacccgcggctctgtcatctcccccactgaacttgaggcccccatcctggtgcctcacacagcgcagcgcggagagcagaggtatccatttgaggccctcttccgcagccagcactacgccctcctagacaattcctgccgcgaataccttttcatctgtgaattttttgttgtgtctggcccagctgcacacgacctgttccatgctgtcatgggccgtacactcagcatgaccctgaaacacctggattcttatctagctgactgctacgatgccattgctgtttttctctgtatccacattgttctccggttccgtaacattgcagcaaagagggatgttcctgccctggacaggtactgggaacaggtgcttgccttgctatggccacggtttgaactgatcctggagatgaatgttcagagcgtccgaagcactgacccccagcgcctaggggggttggatactcggccccactatatcacacgccgctatgcagagttctcctccgctcttgtcagtatcaaccagacaattcctaatgaacggaccatgcaattgctgggacagctgcaggtggaggtggagaattttgtcctccgagtggcagctgagttctcctcaaggaaggagcagcttgtgtttctgatcaacaactatgacatgatgctgggtgtgctgatggagcgggctgcagatgacagcaaagaggttgagagcttccagcagctgctcaatgctcggacacaggaattcattgaagagttgctgtctcccccttttgggggtttagtggcatttgtgaaggaggctgaggctttgattgagcgtggacaggctgagcgacttcgaggggaagaagcccgggtaactcagctgatccgtggctttggtagttcctggaaatcatcagtggaatctctgagtcaggatgtaatgcggagtttcaccaacttcagaaatggcaccagtatcattcagggagcgctgacccagctgatccagctctatcatcgcttccaccgggtgctgtcccagccgcagctccgagccctccctgcccgggctgagctcatcaacattcaccaccttatggtggagctcaagaagcataagcccaacttctgatgtgccagaaaccgccctgagatctgccggtcatctccatggacttctgcaccccattccatacccttcttcacctggggtaccccttccagttttccccttgcttcccaggcccttgacatggcttacctgccttcactcccagcaccttgcccaacaggataagctggatccccttggccttctgaatatcccagtgtcttcaggtttcccaagaccacttccctgtgggcttccaaaatggcctttatcatttctccagtctgtcaccctcctttcctgctcccatacacccaaggcttgtttcttcccctgtaaaaaccactgcctcaatctctggttcactcaactagtcaccatgtcctgaggcatgaagcctcctcagctcttggaattgctggcaaggggtgactgcctctgagtcattgtgtttttcaaagtgatttcttttctgtagctttttgacctaagatctcaggattgacataacttccctctggtcagatatcgaagtcagtgggaaataatatttgttgcaaaaaaaagggggggcaaaaatctcgaggcaattaggacagttttgtaaggccaagggggtaaaaagagggggtacggcgaagagggcggggactgggga

SEQ ID NO: 424257 - DNA, 2830 bp, Homo sapiens
ggctagtttgtgtttcagacttccatatttccatttgcagttgggtgaagtggttagagctgaaaggggacagctggagtcaaacaacttaactcaaatatctgggaacgatttcgcgctgaggaagaccctttgggacttgtagctccactccggggaacggactcgccgggactgacagttgccggaagtgaggctgcggggaatggccgccgctgcgaccatggcggctgcggcccgggaactggtgttgcgggctgggacctcagatatggaggaggaagagggcccgctggcgggtggtcctgggctccaggaaccactgcaacttggggagttggatatcacttctgatgaattcatcctggatgaagtggatgttcacattcaggcaaatctggaggatgagttagtaaaggaagctcttaaaacgggtgtagatctccgtcactattcaaagcaagttgagctggagctacagcagattgaacagaaatccattcgggattatattcaagagagtgagaatatagcatctctacacaaccagatcacagcctgtgatgctgtcctggagcgaatggagcagatgttgggagcttttcagagtgacctcagctccatcagctctgagatccggacactgcaggaacagtcaggagccatgaacattcgacttcgaaatcgccaggcagttcgggggaaacttggggagcttgttgatggtctggtggtgccttctgctctggtcacggcaattctggaggctccagtgacagagcccaggttcttggagcagctacaggagctggatgccaaggcagccgcagtcagagagcaggaagctagaggcacagcagcctgcgcagatgtcagaggcgtgctcgatcggctccgggtcaaggcagtgacgaagatccgagagtttatcctccagaagatttattccttcaggaaacccatgaccaactatcagatcccccagacggccctgctgaagtacaggttcttctatcagtttctgctgggcaatgaacgagcaacagcaaaggagatcagggatgaatatgtggagacgctgagcaagatttacctgtcttactaccgctcttacctggggcggctcatgaaggtgcagtatgaggaagtcgctgagaaagatgatctaatgggtgtggaagatacagcaaagaaaggattcttctcaaagccatcgctccgcagcaggaacaccattttcaccctaggaacccgcggctctgtcatctcccccactgaacttgaggcccccatcctggtgcctcacacagcgcagcgcggagagcagaggtatccatttgaggccctcttccgcagccagcactacgccctcctagacaattcctgccgcgaataccttttcatctgtgaattttttgttgtgtctggcccagctgcacacgacctgttccatgctgtcatgggccgtacactcagcatgaccctgaaacacctggattcttatctagctgactgctacgatgccattgctgtttttctctgtatccacattgttctccggttccgtaacattgcagcaaagagggatgttcctgccctggacaggtactgggaacaggtgcttgccttgctatggccacggtttgaactgatcctggagatgaatgttcagagcgtccgaagcactgacccccagcgcctaggggggttggatactcggccccactatatcacacgccgctatgcagagttctcctccgctcttgtcagtatcaaccagacaattcctaatgaacggaccatgcaattgctgggacagctgcaggtggaggtggagaattttgtcctccgagtggcagctgagttctcctcaaggaaggagcagcttgtgtttctgatcaacaactatgacatgatgctgggtgtgctgatggagcgggctgcagatgacagcaaagaggttgagagcttccagcagctgctcaatgctcggacacaggaattcattgaagagttgctgtctcccccttttgggggtttagtggcatttgtgaaggaggctgaggctttgattgagcgtggacaggctgagcgacttcgaggggaagaagggagcgctgacccagctgatccagctctatcatcgcttccaccgggtgctgtcccagccgcagctccgagccctccctgcccgggctgagctcatcaacattcaccaccttatggtggagctcaagaagcataagcccaacttctgatgtgccagaaaccgccctgagatctgccggtcatctccatggacttctgcaccccattccatacccttcttcacctggggtaccccttccagttttccccttgcttcccaggcccttgacatggcttacctgccttcactcccagcaccttgcccaacaggataagctggatccccttggccttctgaatatcccagtgtcttcaggtttcccaagaccacttccctgtgggcttccaaaatggcctttatcatttctccagtctgtcaccctcctttcctgctcccatacacccaaggcttgtttcttcccctgtaaaaaccactgcctcaatctctggttcactcaactagtcaccatgtcctgaggcatgaagcctcctcagctcttggaattgctggcaaggggtgactgcctctgagtcattgtgtttttcaaagtgatttcttttctgtagctttttgacctaagatctcagcaatttgaacactaacctctcccctcctggctcaagaattactccgaagtcagtctgcagaaaataaatatttagtatgacatgaaaattaaaa

SEQ ID NO: 424258 - DNA, 2720 bp, Homo sapiens
ggctagtttgtgtttcagacttccatatttccatttgcagttgggtgaagtggttagagctgaaaggggacagctggagtcaaacaacttaactcaaatatctgggaacgatttcgcgctgaggaagaccctttgggacttgtagctccactccggggaacggactcgccgggactgacagttgccggaagtgaggctgcggggaatggccgccgctgcgaccatggcggctgcggcccgggaactggtgttgcgggctgggacctcagatatggaggaggaagagggcccgctggcgggtggtcctgggctccaggaaccactgcaacttggggagttggatatcacttctgatgaattcatcctggatgaagtggatgttcacattcaggcaaatctggaggatgagttagtaaaggaagctcttaaaacgggtgtagatctccgtcactattcaaagcaagttgagctggagctacagcagattgaacagaaatccattcgggattatattcaagagagtgagaatatagcatctctacacaaccagatcacagcctgtgatgctgtcctggagcgaatggagcagatgttgggagcttttcagagtgacctcagctccatcagctctgagatccggacactgcaggaacagtcaggagccatgaacattcgacttcgaaatcgccaggcagttcgggggaaacttggggagcttgttgatggtctggtggtgccttctgctctggtcacggcaattctggaggctccagtgacagagcccaggttcttggagcagctacaggagctggatgccaaggcagccgcagtcagagagcaggaagctagaggcacagcagcctgcgcagatgtcagaggcgtgctcgatcggctccgggtcaaggcagtgacgaagatccgagagtttatcctccagaagatttattccttcaggaaacccatgaccaactatcagatcccccagacggccctgctgaagtacaggttcttctatcagtttctgctgggcaatgaacgagcaacagcaaaggagatcagggatgaatatgtggagacgctgagcaagatttacctgtcttactaccgctcttacctggggcggctcatgaaggtgcagtatgaggaagtcgctgagaaagatgatctaatgggtgtggaagatacagcaaagaaaggattcttctcaaagccatcgctccgcagcaggaacaccattttcaccctaggaacccgcggctctgtcatctcccccactgaacttgaggcccccatcctggtgcctcacacagcgcagcgcggagagcagaggtatccatttgaggccctcttccgcagccagcactacgccctcctagacaattcctgccgcgaataccttttcatctgtgaattttttgttgtgtctggcccagctgcacacgacctgttccatgctgtcatgggccgtacactcagcatgaccctgaaacacctggattcttatctagctgactgctacgatgccattgctgtttttctctgtatccacattgttctccggttccgtaacattgcagcaaagagggatgttcctgccctggacaggtactgggaacaggtgcttgccttgctatggccacggtttgaactgatcctggagatgaatgttcagagcgtccgaagcactgacccccagcgcctaggggggttggatactcggccccactatatcacacgccgctatgcagagttctcctccgctcttgtcagtatcaaccagacaattcctaatgaacggaccatgcaattgctgggacagctgcaggtggaggtggagaattttgtcctccgagtggcagctgagttctcctcaaggaaggagcagcttgtgtttctgatcaacaactatgacatgatgctgggtgtgctgatggagcgggctgcagatgacagcaaagaggttgagagcttccagcagctgctcaatgctcggacacaggaattcattgaagagttgctgtctcccccttttgggggtttagtggcatttgtgaaggaggctgaggctttgattgagcgtggacaggtgagctcatcaacattcaccaccttatggtggagctcaagaagcataagcccaacttctgatgtgccagaaaccgccctgagatctgccggtcatctccatggacttctgcaccccattccatacccttcttcacctggggtaccccttccagttttccccttgcttcccaggcccttgacatggcttacctgccttcactcccagcaccttgcccaacaggataagctggatccccttggccttctgaatatcccagtgtcttcaggtttcccaagaccacttccctgtgggcttccaaaatggcctttatcatttctccagtctgtcaccctcctttcctgctcccatacacccaaggcttgtttcttcccctgtaaaaaccactgcctcaatctctggttcactcaactagtcaccatgtcctgaggcatgaagcctcctcagctcttggaattgctggcaaggggtgactgcctctgagtcattgtgtttttcaaagtgatttcttttctgtagctttttgacctaagatctcagcaatttgaacactaacctctcccctcctggctcaagaattactccgaagtcagtctgcagaaaataaatatttagtatgacatgaaaattaaaa

SEQ ID NO: 424259 - DNA, 2079 bp, Homo sapiens
agcttcagtcacgaaagaggctctgagcacggtggggagggaaggccagacctcagggcagagcttcccaacctgcaggccctgtcttaatccccttagacttgggagtggccttctccaatcactccagcctgctgtgatgtgaaaagagctgggaaccattgacttaagggcatgcagaggggagagactggatgaggggaatgacagtcagaggcaggtgttgaggtggatgcaggagtagcaacagcaggtgggtgtaggccctttttgtacccctatgttcccccaccttttcagtgcccattcagcttgctcttagacagcccggacctagatagatgcgaagggtctgcctagctcttattactcaggtttactgattttccagccatatccatgggaagtcagtgttggggtccatcccttctgtttttcttctttactcctcctctcccagtatccatttgaggccctcttccgcagccagcactacgccctcctagacaattcctgccgcgaataccttttcatctgtgaattttttgttgtgtctggcccagctgcacacgacctgttccatgctgtcatgggccgtacactcagcatgaccctgaaacacctggattcttatctagctgactgctacgatgccattgctgtttttctctgtatccacattgttctccggttccgtaacattgcagcaaagagggatgttcctgccctggacaggtactgggaacaggtgcttgccttgctatggccacggtttgaactgatcctggagatgaatgttcagagcgtccgaagcactgacccccagcgcctaggggggttggatactcggccccactatatcacacgccgctatgcagagttctcctccgctcttgtcagtatcaaccagacaattcctaatgaacggaccatgcaattgctgggacagctgcaggtggaggtggagaattttgtcctccgagtggcagctgagttctcctcaaggaaggagcagcttgtgtttctgatcaacaactatgacatgatgctgggtgtgctgatggagcgggctgcagatgacagcaaagaggttgagagcttccagcagctgctcaatgctcggacacaggaattcattgaagagttgctgtctcccccttttgggggtttagtggcatttgtgaaggaggctgaggctttgattgagcgtggacaggctgagcgacttcgaggggaagaagcccgggtaactcagctgatccgtggctttggtagttcctggaaatcatcagtggaatctctgagtcaggatgtaatgcggagtttcaccaacttcagaaatggcaccagtatcattcagggagcgctgacccagctgatccagctctatcatcgcttccaccgggtgctgtcccagccgcagctccgagccctccctgcccgggctgagctcatcaacattcaccaccttatggtggagctcaagaagcataagcccaacttctgatgtgccagaaaccgccctgagatctgccggtcatctccatggacttctgcaccccattccatacccttcttcacctggggtaccccttccagttttccccttgcttcccaggcccttgacatggcttacctgccttcactcccagcaccttgcccaacaggataagctggatccccttggccttctgaatatcccagtgtcttcaggtttcccaagaccacttccctgtgggcttccaaaatggcctttatcatttctccagtctgtcaccctcctttcctgctcccatacacccaaggcttgtttcttcccctgtaaaaaccactgcctcaatctctggttcactcaactagtcaccatgtcctgaggcatgaagcctcctcagctcttggaattgctggcaaggggtgactgcctctgagtcattgtgtttttcaaagtgatttcttttctgtagctttttgacctaagatctcagcaatttgaacactaacctctcccctcctggctcaagaattactccgaagtcagtctgcagaaaataaatatttagtatgacatgaaaattaaaa

SEQ ID NO: 424260 - DNA, 1894 bp, Homo sapiens
gttctagaggatcccgaaaagcgacatagaggcaggtgttgaggtggatgcaggagtagcaacagcaggtgggtgtaggccctttttgtacccctatgttcccccaccttttcagtgcccattcagcttgctcttagacagcccggacctagatagatgcgaagggtctgcctagctcttattactcaggtttactgattttccagccatatccatgggaagtcagtgttggggtccatcccttctgtttttcttctttactcctcctctcccagtatccatttgaggccctcttccgcagccagcactacgccctcctagacaattcctgccgcgaataccttttcatctgtgaattttttgttgtgtctggcccagctgcacacgacctgttccatgctgtcatgggccgtacactcagcatgaccctgaaacacctggattcttatctagctgactgctacgatgccattgctgtttttctctgtatccacattgttctccggttccgtaacattgcagcaaagagggatgttcctgccctggacaggtactgggaacaggtgcttgccttgctatggccacggtttgaactgatcctggagatgaatgttcagagcgtccgaagcactgacccccagcgcctaggggggttggatactcggccccactatatcacacgccgctatgcagagttctcctccgctcttgtcagtatcaaccagacaattcctaatgaacggaccatgcaattgctgggacagctgcaggtggaggtggagaattttgtcctccgagtggcagctgagttctcctcaaggaaggagcagcttgtgtttctgatcaacaactatgacatgatgctgggtgtgctgatggagcgggctgcagatgacagcaaagaggttgagagcttccagcagctgctcaatgctcggacacaggaattcattgaagagttgctgtctcccccttttgggggtttagtggcatttgtgaaggaggctgaggctttgattgagcgtggacaggctgagcgacttcgaggggaagaagcccgggtaactcagctgatccgtggctttggtagttcctggaaatcatcagtggaatctctgagtcaggatgtaatgcggagtttcaccaacttcagaaatggcaccagtatcattcagggagcgctgacccagctgatccagctctatcatcgcttccaccgggtgctgtcccagccgcagctccgagccctccctgcccgggctgagctcatcaacattcaccaccttatggtggagctcaagaagcataagcccaacttctgatgtgccagaaaccgccctgagatctgccggtcatctccatggacttctgcaccccattccatacccttcttcacctggggtaccccttccagttttccccttgcttcccaggcccttgacatggcttacctgccttcactcccagcaccttgcccaacaggataagctggatccccttggccttctgaatatcccagtgtcttcaggtttcccaagaccacttccctgtgggcttccaaaatggcctttatcatttctccagtctgtcaccctcctttcctgctcccatacacccaaggcttgtttcttcccctgtaaaaaccactgcctcaatctctggttcactcaactagtcaccatgtcctgaggcatgaagcctcctcagctcttggaattgctggcaaggggtgactgcctctgagtcattgtgtttttcaaagtgatttcttttctgtagctttttgacctaagatctcagcaatttgaacactaacctctcccctcctggctcaagaattactccgaagtcagtctgcagaaaataaatatttagtatgacatgaaaattaaaa

SEQ ID NO: 424261 - DNA, 2363 bp, Homo sapiens
agcttcagtcacgaaagaggctctgagcacggtggggagggaaggccagacctcagggcagagcttcccaacctgcaggccctgtcttaatccccttagacttgggagtggccttctccaatcactccagcctgctgtgatgtgaaaagagctgggaaccattgacttaagggcatgcagaggggagagactggatgaggggaatgacagtcagaggcaggtgttgaggtggatgcaggagtagcaacagcaggtgggtgtaggccctttttgtacccctatgttcccccaccttttcagtgcccattcagcttgctcttagacagcccggacctagatagatgcgaagggtctgcctagctcttattactcaggtttactgattttccagccatatccatgggaagtcagtgttggggtccatcccttctgtttttcttctttactcctcctctcccagtatccatttgaggccctcttccgcagccagcactacgccctcctagacaattcctgccgcgaataccttttcatctgtgaattttttgttgtgtctggcccagctgcacacgacctgttccatgctgtcatgggccgtacactcagcatgaccctgaaacacctggattcttatctagctgactgctacgatgccattgctgtttttctctgtatccacattgttctccggttccgtaacattgcagcaaagagggatgttcctgccctggacaggtcactgaattctggtccttgatgcccaacaggccacgaactctcttggtcttgcatgactctgccctgaccttagactcctactgacctggtatcatcaacctttattcccattcatttgctccggaggcagtagtgctgctttttgactcacctttctccaaccactgccccccaacccccacaactagctattgaccattaaactgaatgatgccccactccctcccatccccctccaacattccttgctggctgacctctgattctgattaagcccacaggtactgggaacaggtgcttgccttgctatggccacggtttgaactgatcctggagatgaatgttcagagcgtccgaagcactgacccccagcgcctaggggggttggatactcggccccactatatcacacgccgctatgcagagttctcctccgctcttgtcagtatcaaccagacaattcctaatgaacggaccatgcaattgctgggacagctgcaggtggaggtggagaattttgtcctccgagtggcagctgagttctcctcaaggaaggagcagcttgtgtttctgatcaacaactatgacatgatgctgggtgtgctgatggagcgggctgcagatgacagcaaagaggttgagagcttccagcagctgctcaatgctcggacacaggaattcattgaagagttgctgtctcccccttttgggggtttagtggcatttgtgaaggaggctgaggctttgattgagcgtggacaggctgagcgacttcgaggggaagaagcccgggtaactcagctgatccgtggctttggtagttcctggaaatcatcagtggaatctctgagtcaggatgtaatgcggagtttcaccaacttcagaaatggcaccagtatcattcagggagcgctgacccagctgatccagctctatcatcgcttccaccgggtgctgtcccagccgcagctccgagccctccctgcccgggctgagctcatcaacattcaccaccttatggtggagctcaagaagcataagcccaacttctgatgtgccagaaaccgccctgagatctgccggtcatctccatggacttctgcaccccattccatacccttcttcacctggggtaccccttccagttttccccttgcttcccaggcccttgacatggcttacctgccttcactcccagcaccttgcccaacaggataagctggatccccttggccttctgaatatcccagtgtcttcaggtttcccaagaccacttccctgtgggcttccaaaatggcctttatcatttctccagtctgtcaccctcctttcctgctcccatacacccaaggcttgtttcttcccctgtaaaaaccactgcctcaatctctggttcactcaactagtcaccatgtcctgaggcatgaagcctcctcagctcttggaattgctggcaaggggtgactgcctctgagtcattgtgtttttcaaagtgatttcttttctgtagctttttgacctaagatctcagcaatttgaacactaacctctcccctcctggctcaagaattactccgaagtcagtctgcagaaaataaatatttagtatgacatgaaaattaaaa

SEQ ID NO: 424262 - DNA, 2733 bp, Homo sapiens
ggctagtttgtgtttcagacttccatatttccatttgcagttgggtgaagtggttagagctgaaaggggacagctggagtcaaacaacttaactcaaatatctgggaacgatttcgcgctgaggaagaccctttgggacttgtagctccactccggggaacggactcgccgggactgacagttgccggaagtgaggctgcggggaatggccgccgctgcgaccatggcggctgcggcccgggaactggtgttgcgggctgggacctcagatatggaggaggaagagggcccgctggcgggtggtcctgggctccaggaaccactgcaacttggggagttggatatcacttctgatgaattcatcctggatgaagtggatgttcacattcaggcaaatctggaggatgagttagtaaaggaagctcttaaaacgggtgtagatctccgtcactattcaaagcaagttgagctggagctacagcagattgaacagaaatccattcgggattatattcaagagagtgagaatatagcatctctacacaaccagatcacagcctgtgatgctgtcctggagcgaatggagcagatgttgggagcttttcagagtgacctcagctccatcagctctgagatccggacactgcaggaacagtcaggagccatgaacattcgacttcgaaatcgccaggcagttcgggggaaacttggggagcttgttgatggtctggtggtgccttctgctctggtcacggcaattctggaggctccagtgacagagcccaggttcttggagcagctacaggagctggatgccaaggcagccgcagtcagagagcaggaagctagaggcacagcagcctgcgcagatgtcagaggcgtgctcgatcggctccgggtcaaggcagtgacgaagatccgagagtttatcctccagaagatttattccttcaggaaacccatgaccaactatcagatcccccagacggccctgctgaagtacaggttcttctatcagtttctgctgggcaatgaacgagcaacagcaaaggagatcagggatgaatatgtggagacgctgagcaagatttacctgtcttactaccgctcttacctggggcggctcatgaaggtgcagtatgaggaagtcgctgagaaagatgatctaatgggtgtggaagatacagcaaagaaaggattcttctcaaagccatcgctccgcagcaggaacaccattttcaccctaggaacccgcggctctgtcatctcccccactgaacttgaggcccccatcctggtgcctcacacagcgcagcgcggagagcagaggtatccatttgaggccctcttccgcagccagcactacgccctcctagacaattcctgccgcgaataccttttcatctgtgaattttttgttgtgtctggcccagctgcacacgacctgttccatgctgtcatgggccgtacactcagcatgaccctgaaacacctggattcttatctagctgactgctacgatgccattgctgtttttctctgtatccacattgttctccggttccgtaacattgcagcaaagagggatgttcctgccctggacaggtactgggaacaggtgcttgccttgctatggccacggtttgaactgatcctggagatgaatgttcagagcgtccgaagcactgacccccagcgcctaggggggttggatactcggccccactatatcacacgccgctatgcagagttctcctccgctcttgtcagtatcaaccagacaattcctaatgaacggaccatgcaattgctgggacagctgcaggtggaggtggagaattttgtcctccgagtggcagctgagttctcctcaaggaaggagcagcttgtgtttctgatcaacaactatgacatgatgctgggtgtgctgatggagcgggctgcagatgacagcaaagaggttgagagcttccagcagctgctcaatgctcggacacaggaattcattgaagagttgctgtctcccccttttgggggtttagtggcatttgtgaaggaggctgaggctttgattgagcgtggacaggctgagcgacttcgaggggaagaagcccgggtaactcagctgatccgtggctttggtagttcctggaaatcatcagtggaatctctgagtcaggatgtaatgcggagtttcaccaacttcagaaatggcaccagtatcattcagggagcgctgacccagctgatccagctctatcatcgcttccaccgggtgctgtcccagccgcagctccgagccctccctgcccgggctgagctcatcaacattcaccaccttatggtggagctcaagaagcataagcccaacttctgatgtgccagaaaccgccctgagatctgccggtcatctccatggactttctgtcaccctcctttcctgctcccatacacccaaggcttgtttcttcccctgtaaaaaccactgcctcaatctctggttcactcaactagtcaccatgtcctgaggcatgaagcctcctcagctcttggaattgctggcaaggggtgactgcctctgagtcattgtgtttttcaaagtgatttcttttctgtagctttttgacctaagatctcagcaatttgaacactaacctctcccctcctggctcaagaattactccgaagtcagtctgcagaaaataaatatttagtatgacatgaaaattaaaa

SEQ ID NO: 424263 - DNA, 1665 bp, Homo sapiens
gttaaacctgacagtctgttcactgaacaggtccttagtttcctgtctgcctttattttcagtctctgcttatcagaatctcttggtcttgcatgactctgccctgaccttagactcctactgacctggtatcatcaacctttattcccattcatttgctccggaggcagtagtgctgctttttgactcacctttctccaaccactgccccccaacccccacaactagctattgaccattaaactgaatgatgccccactccctcccatccccctccaacattccttgctggctgacctctgattctgattaagcccacaggtactgggaacaggtgcttgccttgctatggccacggtttgaactgatcctggagatgaatgttcagagcgtccgaagcactgacccccagcgcctaggggggttggatactcggccccactatatcacacgccgctatgcagagttctcctccgctcttgtcagtatcaaccagacaattcctaatgaacggaccatgcaattgctgggacagctgcaggtggaggtggagaattttgtcctccgagtggcagctgagttctcctcaaggaaggagcagcttgtgtttctgatcaacaactatgacatgatgctgggtgtgctgatggagcgggctgcagatgacagcaaagaggttgagagcttccagcagctgctcaatgctcggacacaggaattcattgaagagttgctgtctcccccttttgggggtttagtggcatttgtgaaggaggctgaggctttgattgagcgtggacaggctgagcgacttcgaggggaagaagcccgggtaactcagctgatccgtggctttggtagttcctggaaatcatcagtggaatctctgagtcaggatgtaatgcggagtttcaccaacttcagaaatggcaccagtatcattcagggagcgctgacccagctgatccagctctatcatcgcttccaccgggtgctgtcccagccgcagctccgagccctccctgcccgggctgagctcatcaacattcaccaccttatggtggagctcaagaagcataagcccaacttctgatgtgccagaaaccgccctgagatctgccggtcatctccatggacttctgcaccccattccatacccttcttcacctggggtaccccttccagttttccccttgcttcccaggcccttgacatggcttacctgccttcactcccagcaccttgcccaacaggataagctggatccccttggccttctgaatatcccagtgtcttcaggtttcccaagaccacttccctgtgggcttccaaaatggcctttatcatttctccagtctgtcaccctcctttcctgctcccatacacccaaggcttgtttcttcccctgtaaaaaccactgcctcaatctctggttcactcaactagtcaccatgtcctgaggcatgaagcctcctcagctcttggaattgctggcaaggggtgactgcctctgagtcattgtgtttttcaaagtgatttcttttctgtagctttttgacctaagatctcagcaatttgaacactaacctctcccctcctggctcaagaattactccgaagtcagtctgcagaaaataaatatttagtatgacatgaaaattaaaa

SEQ ID NO: 424264 - DNA, 1358 bp, Homo sapiens
atggtgagtggtgcactgtgggtaggagggactgaaggtagagtcacatcacatggaggtgggttggctaaggaagttgggaggttgtgttggttgggccaggaggtgggtgtgattttccttcccactctctcctagatcacacgccgctatgcagagttctcctccgctcttgtcagtatcaaccagacaattcctaatgaacggaccatgcaattgctgggacagctgcaggtggaggtggagaattttgtcctccgagtggcagctgagttctcctcaaggaaggagcagcttgtgtttctgatcaacaactatgacatgatgctgggtgtgctgatggagcgggctgcagatgacagcaaagaggttgagagcttccagcagctgctcaatgctcggacacaggaattcattgaagagttgctgtctcccccttttgggggtttagtggcatttgtgaaggaggctgaggctttgattgagcgtggacaggctgagcgacttcgaggggaagaagcccgggtaactcagctgatccgtggctttggtagttcctggaaatcatcagtggaatctctgagtcaggatgtaatgcggagtttcaccaacttcagaaatggcaccagtatcattcagggagcgctgacccagctgatccagctctatcatcgcttccaccgggtgctgtcccagccgcagctccgagccctccctgcccgggctgagctcatcaacattcaccaccttatggtggagctcaagaagcataagcccaacttctgatgtgccagaaaccgccctgagatctgccggtcatctccatggacttctgcaccccattccatacccttcttcacctggggtaccccttccagttttccccttgcttcccaggcccttgacatggcttacctgccttcactcccagcaccttgcccaacaggataagctggatccccttggccttctgaatatcccagtgtcttcaggtttcccaagaccacttccctgtgggcttccaaaatggcctttatcatttctccagtctgtcaccctcctttcctgctcccatacacccaaggcttgtttcttcccctgtaaaaaccactgcctcaatctctggttcactcaactagtcaccatgtcctgaggcatgaagcctcctcagctcttggaattgctggcaaggggtgactgcctctgagtcattgtgtttttcaaagtgatttcttttctgtagctttttgacctaagatctcagcaatttgaacactaacctctcccctcctggctcaagaattactccgaagtcagtctgcagaaaataaatatttagtatgacatgaaaattaaaa

SEQ ID NO: 424265 - DNA, 1580 bp, Homo sapiens
atggtgagtggtgcactgtgggtaggagggactgaaggtagagtcacatcacatggaggtgggttggctaaggaagttgggaggttgtgttggttgggccaggaggtgggtgtgattttccttcccactctctcctagatcacacgccgctatgcagagttctcctccgctcttgtcagtatcaaccagacaattcctaatgaacggaccatgcaattgctgggacagctgcaggtggaggtggagaattttgtcctccgagtggcagctgagttctcctcaaggaaggagcagcttgtgtttctgatcaacaactatgacatgatgctgggtgtgctgatggtaataggtgctccttctccttgccttcctacccagaaaattcggtttcccccactgctgttagctctgtgagggcagagatgatgcctgtcttgttcagtgttttactcttggagtctggcacagtgtccagcttagtacaataagtgtggaatgaaggggacatcctgaagtgaaggactgctttccccaaactagacatttccctttgtcttcccttaggagcgggctgcagatgacagcaaagaggttgagagcttccagcagctgctcaatgctcggacacaggaattcattgaagagttgctgtctcccccttttgggggtttagtggcatttgtgaaggaggctgaggctttgattgagcgtggacaggctgagcgacttcgaggggaagaagcccgggtaactcagctgatccgtggctttggtagttcctggaaatcatcagtggaatctctgagtcaggatgtaatgcggagtttcaccaacttcagaaatggcaccagtatcattcagggagcgctgacccagctgatccagctctatcatcgcttccaccgggtgctgtcccagccgcagctccgagccctccctgcccgggctgagctcatcaacattcaccaccttatggtggagctcaagaagcataagcccaacttctgatgtgccagaaaccgccctgagatctgccggtcatctccatggacttctgcaccccattccatacccttcttcacctggggtaccccttccagttttccccttgcttcccaggcccttgacatggcttacctgccttcactcccagcaccttgcccaacaggataagctggatccccttggccttctgaatatcccagtgtcttcaggtttcccaagaccacttccctgtgggcttccaaaatggcctttatcatttctccagtctgtcaccctcctttcctgctcccatacacccaaggcttgtttcttcccctgtaaaaaccactgcctcaatctctggttcactcaactagtcaccatgtcctgaggcatgaagcctcctcagctcttggaattgctggcaaggggtgactgcctctgagtcattgtgtttttcaaagtgatttcttttctgtagctttttgacctaagatctcagcaatttgaacactaacctctcccctcctggctcaagaattactccgaagtcagtctgcagaaaataaatatttagtatgacatgaaaattaaaa

SEQ ID NO: 424266 - DNA, 1869 bp, Homo sapiens
ggctagtttgtgtttcagacttccatatttccatttgcagttgggtgaagtggttagagctgaaaggggacagctggagtcaaacaacttaactcaaatatctgggaacgatttcgcgctgaggaagaccctttgggacttgtagctccactccggggaacggactcgccgggactgacagttgccggaagtgaggctgcggggaatggccgccgctgcgaccatggcggctgcggcccgggaactggtgttgcgggctgggacctcagatatggaggaggaagagggcccgctggcgggtggtcctgggctccaggaaccactgcaacttggggagttggatatcacttctgatgaattcatcctggatgaagtggatgttcacattcaggcaaatctggaggatgagttagtaaaggaagctcttaaaacgggtgtagatctccgtcactattcaaagcaagttgagctggagctacagcagattgaacagaaatccattcgggattatattcaagagagtgagaatatagcatctctacacaaccagatcacagcctgtgatgctgtcctggagcgaatggagcagatgttgggagcttttcagagtgacctcagctccatcagctctgagatccggacactgcaggaacagtcaggagccatgaacattcgacttcgaaatcgccaggcagttcgggggaaacttggggagcttgttgatggtctggtggtgccttctgctctggtcacggcaattctggaggctccagtgacagagcccaggttcttggagcagctacaggagctggatgccaaggcagccgcagtcagagagcaggaagctagaggcacagcagcctgcgcagatgtcagaggcgtgctcgatcggctccgggtcaaggcagtgacgaagatccgagagtttatcctccagaagatttattccttcaggaaacccatgaccaactatcagatcccccagacggccctgctgaagtacaggttcttctatcagtttctgctgggcaatgaacgagcaacagcaaaggagatcagggatgaatatgtggagacgctgagcaagatttacctgtcttactaccgctcttacctggggcggctcatgaaggtgcagtatgaggaagtcgctgagaaagatgatctaatgggtgtggaagatacagcaaagaaaggattcttctcaaagccatcgctccgcagcaggaacaccattttcaccctaggaacccgcggctctgtcatctcccccactgaacttgaggcccccatcctggtgcctcacacagcgcagcgcggagagcagaggtatccatttgaggccctcttccgcagccagcactacgccctcctagacaattcctgccgcgaataccttttcatctgtgaattttttgttgtgtctggcccagctgcacacgacctgttccatgctgtcatgggccgtacactcagcatgaccctggtaagactcctgtttcctgtaccattcaacacctttgtccccagtcttcatcagcagcatagtggggtcatgactctggtagaactgaaatcaggatcgcctcattctaaaatgtctaagccttggctgggcgtggtagtgcacacccataatcccagcactttgggagtccaaggcagtaggattgcctgagctcaggagtttgagaccagcctgggcaacaacctcatctctacaaaaaatgaaaaattagccgggtgtgtgttgatgtgtgcctgtggtcacagctactaaagatgctgaggtggaaggattgcttgagcccaggaggtcaaggctgcagtgagccatgcactccagagtgagacctgtctcaaaaaaaa

SEQ ID NO: 424267 - DNA, 1427 bp, Homo sapiens
ggctagtttgtgtttcagacttccatatttccatttgcagttgggtgaagtggttagagctgaaaggggacagctggagtcaaacaacttaactcaaatatctgggaacgatttcgcgctgaggaagaccctttgggacttgtagctccactccggggaacggactcgccgggactgacagttgccggaagtgaggctgcggggaatggccgccgctgcgaccatggcggctgcggcccgggaactggtgttgcgggctgggacctcagatatggaggaggaagagggcccgctggcgggtggtcctgggctccaggaaccactgcaacttggggagttggatatcacttctgatgaattcatcctggatgaagtggatgttcacattcaggcaaatctggaggatgagttagtaaaggaagctcttaaaacgggtgtagatctccgtcactattcaaagcaagttgagctggagctacagcagattgaacagaaatccattcgggattatattcaagagagtgagaatatagcatctctacacaaccagatcacagcctgtgatgctgtcctggagcgaatggagcagatgttgggagcttttcagagtgacctcagctccatcagctctgagatccggacactgcaggaacagtcaggagccatgaacattcgacttcgaaatcgccaggcagttcgggggaaacttggggagcttgttgatggtctggtggtgccttctgctctggtcacggcaattctggaggctccagtgacagagcccaggttcttggagcagctacaggagctggatgccaaggcagccgcagtcagagagcaggaagctagaggcacagcagcctgcgcagatgtcagaggcgtgctcgatcggctccgggtcaaggcagtgacgaagatccgagagtttatcctccagaagatttattccttcaggaaacccatgaccaactatcagatcccccagacggccctgctgaagtacaggttcttctatcagtttctgctgggcaatgaacgagcaacagcaaaggagatcagggatgaatatgtggagacgctgagcaagatttacctgtcttactaccgctcttacctggggcggctcatgaaggtgcagtatgaggaagtcgctgagaaagatgatctaatgggtgtggaagatacagcaaagaaagatatcctagtactggggaaccctcatgccaggccttgagagtgggaggactttcgactccagccacccatgcactgctccttaccttttcctatgggactgaaaccttttagaatgtgatgaaagctatagcctccctccccagaaagatgcacacattattttgacacatagttttgcatatgattgcaagggagggagagacaccctgaagcccattcacagatgtcag

SEQ ID NO: 424268 - DNA, 999 bp, Homo sapiens
agcttcagtcacgaaagaggctctgagcacggtggggagggaaggccagacctcagggcagagcttcccaacctgcaggccctgtcttaatccccttagacttgggagtggccttctccaatcactccagcctgctgtgatgtgaaaagagctgggaaccattgacttaagggcatgcagaggggagagactggatgaggggaatgacagtcagaggcaggtgttgaggtggatgcaggagtagcaacagcaggtgggtgtaggccctttttgtacccctatgttcccccaccttttcagtgcccattcagcttgctcttagacagcccggacctagatagatgcgaagggtctgcctagctcttattactcaggtttactgattttccagccatatccatgggaagtcagtgttggggtccatcccttctgtttttcttctttactcctcctctcccagtatccatttgaggccctcttccgcagccagcactacgccctcctagacaattcctgccgcgaataccttttcatctgtgaattttttgttgtgtctggcccagctgcacacgacctgttccatgctgtcatgggccgtacactcagcatgaccctggtaagactcctgtttcctgtaccattcaacacctttgtccccagtcttcatcagcagcatagtggggtcatgactctggtagaactgaaatcaggatcgcctcattctaaaatgtctaagccttggctgggcgtggtagtgcacacccataatcccagcactttgggagtccaaggcagtaggattgcctgagctcaggagtttgagaccagcctgggcaacaacctcatctctacaaaaaatgaaaaattagccgggtgtgtgttgatgtgtgcctgtggtcacagctactaaagatgctgaggtggaaggattgcttgagcccaggaggtcaaggctgcagtgagccatgcactccagagtgagacctgtctcaaaaaaaa

SEQ ID NO: 424269 - DNA, 665 bp, Homo sapiens
ggctagtttgtgtttcagacttccatatttccatttgcagttgggtgaagtggttagagctgaaaggggacagctggagtcaaacaacttaactcaaatatctgggaacgatttcgcgctgaggaagaccctttgggacttgtagctccactccggggaacggactcgccgggactgacagttgccggaagtgaggctgcggggaatggccgccgctgcgaccatggcggctgcggcccgggaactggtgttgcgggctgggacctcagatatggaggaggaagagggcccgctggcgggtggtcctgggctccaggaaccactgcaacttggggagttggatatcacttctgatgaattcatcctggatgaagtggatgatacacccaaggcttgtttcttcccctgtaaaaaccactgcctcaatctctggttcactcaactagtcaccatgtcctgaggcatgaagcctcctcagctcttggaattgctggcaaggggtgactgcctctgagtcattgtgtttttcaaagtgatttcttttctgtagctttttgacctaagatctcagcaatttgaacactaacctctcccctcctggctcaagaattactccgaagtcagtctgcagaaaataaatatttagtatgacatgaaaattaaaa

SEQ ID NO: 424270 - DNA, 340 bp, Homo sapiens
tccatagaggattttccttaacttttgcagcagctgaaagatgccattcagatggatctacattagtcatgatgccagaattgggcaaatctgctgacaccaggacacctgtgtatatgtgtttgtgtctttccaggaattcattgaagagttgctgtctcccccttttgggggtttagtggcatttgtgaaggaggctgaggctttgattgagcgtggacaggctgagcgacttcgaggggaagaaggtatgaggaaaatatggtaatgatgggatcagtggtaagggaagtggaaaagaaaaatgaaaggatgcagattacatggtgggggaatagag

SEQ ID NO: 424271 - DNA, 2520 bp, Homo sapiens
atggcttgggtaccacaacttccggtgcgcctttctttacagttcgtaaggttcataggcgggtggtcctgggctccaggaaccactgcaacttggggagttggatatcacttctgatgaattcatcctggatgaagtggatgttcacattcaggcaaatctggaggatgagttagtaaaggaagctcttaaaacgggtgtagatctccgtcactattcaaagcaagttgagctggagctacagcagattgaacagaaatccattcgggattatattcaagagagtgagaatatagcatctctacacaaccagatcacagcctgtgatgctgtcctggagcgaatggagcagatgttgggagcttttcagagtgacctcagctccatcagctctgagatccggacactgcaggaacagtcaggagccatgaacattcgacttcgaaatcgccaggcagttcgggggaaacttggggagcttgttgatggtctggtggtgccttctgctctggtcacggcaattctggaggctccagtgacagagcccaggttcttggagcagctacaggagctggatgccaaggcagccgcagtcagagagcaggaagctagaggcacagcagcctgcgcagatgtcagaggcgtgctcgatcggctccgggtcaaggcagtgacgaagatccgagagtttatcctccagaagatttattccttcaggaaacccatgaccaactatcagatcccccagacggccctgctgaagtacaggttcttctatcagtttctgctgggcaatgaacgagcaacagcaaaggagatcagggatgaatatgtggagacgctgagcaagatttacctgtcttactaccgctcttacctggggcggctcatgaaggtgcagtatccatttgaggccctcttccgcagccagcactacgccctcctagacaattcctgccgcgaataccttttcatctgtgaattttttgttgtgtctggcccagctgcacacgacctgttccatgctgtcatgggccgtacactcagcatgaccctgaaacacctggattcttatctagctgactgctacgatgccattgctgtttttctctgtatccacattgttctccggttccgtaacattgcagcaaagagggatgttcctgccctggacaggtactgggaacaggtgcttgccttgctatggccacggtttgaactgatcctggagatgaatgttcagagcgtccgaagcactgacccccagcgcctaggggggttggatactcggccccactatatcacacgccgctatgcagagttctcctccgctcttgtcagtatcaaccagacaattcctaatgaacggaccatgcaattgctgggacagctgcaggtggaggtggagaattttgtcctccgagtggcagctgagttctcctcaaggaaggagcagcttgtgtttctgatcaacaactatgacatgatgctgggtgtgctgatggagcgggctgcagatgacagcaaagaggttgagagcttccagcagctgctcaatgctcggacacaggaattcattgaagagttgctgtctcccccttttgggggtttagtggcatttgtgaaggaggctgaggctttgattgagcgtggacaggctgagcgacttcgaggggaagaagcccgggtaactcagctgatccgtggctttggtagttcctggaaatcatcagtggaatctctgagtcaggatgtaatgcggagtttcaccaacttcagaaatggcaccagtatcattcagggagcgctgacccagctgatccagctctatcatcgcttccaccgggtgctgtcccagccgcagctccgagccctccctgcccgggctgagctcatcaacattcaccaccttatggtggagctcaagaagcataagcccaacttctgatgtgccagaaaccgccctgagatctgccggtcatctccatggacttctgcaccccattccatacccttcttcacctggggtaccccttccagttttccccttgcttcccaggcccttgacatggcttacctgccttcactcccagcaccttgcccaacaggataagctggatccccttggccttctgaatatcccagtgtcttcaggtttcccaagaccacttccctgtgggcttccaaaatggcctttatcatttctccagtctgtcaccctcctttcctgctcccatacacccaaggcttgtttcttcccctgtaaaaaccactgcctcaatctctggttcactcaactagtcaccatgtcctgaggcatgaagcctcctcagctcttggaattgctggcaaggggtgactgcctctgagtcattgtgtttttcaaagtgatttcttttctgtagctttttgacctaagatctcagcaatttgaacactaacctctcccctcctggctcaagaattactccgaagtcagtctgcagaaaataaatatttagtatgacatgaaaattaaaa

SEQ ID NO: 424272 - DNA, 3233 bp, Homo sapiens
ggctagtttgtgtttcagacttccatatttccatttgcagttgggtgaagtggttagagctgaaaggggacagctggagtcaaacaacttaactcaaatatctgggaacgatttcgcgctgaggaagaccctttgggacttgtagctccactccggggaacggactcgccgggactgacagttgccggaagtgaggctgcggggaatggccgccgctgcgaccatggcggctgcggcccgggaactggtgttgcgggctgggacctcagatatggaggaggaagagggcccgctggcgggtggtcctgggctccaggaaccactgcaacttggggagttggatatcacttctgatgaattcatcctggatgaagtggatgttcacattcaggcaaatctggaggatgagttagtaaaggaagctcttaaaacgggtgtagatctccgtcactattcaaagcaagttgagctggagctacagcagattgaacagaaatccattcgggattatattcaagagagtgagaatatagcatctctacacaaccagatcacagcctgtgatgctgtcctggagcgaatggagcagatgttgggagcttttcagagtgacctcagctccatcagctctgagatccggacactgcaggaacagtcaggagccatgaacattcgacttcgaaatcgccaggcagttcgggggaaacttggggagcttgttgatggtctggtggtgccttctgctctggtcacggcaattctggaggctccagtgacagagcccaggttcttggagcagctacaggagctggatgccaaggcagccgcagtcagagagcaggaagctagaggcacagcagcctgcgcagatgtcagaggcgtgctcgatcggctccgggtcaaggcagtgacgaagatccgagagtttatcctccagaagatttattccttcaggaaacccatgaccaactatcagatcccccagacggccctgctgaagtacaggttcttctatcagtttctgctgggcaatgaacgagcaacagcaaaggagatcagggatgaatatgtggagacgctgagcaagatttacctgtcttactaccgctcttacctggggcggctcatgaaggtgcagtatgaggaagtcgctgagaaagatgatctaatgggtgtggaagatacagcaaagaaaggattcttctcaaagccatcgctccgcagcaggaacaccattttcaccctaggaacccgcggctctgtcatctcccccactgaacttgaggcccccatcctggtgcctcacacagcgcagcgcggagagcagaggtatccatttgaggccctcttccgcagccagcactacgccctcctagacaattcctgccgcgaataccttttcatctgtgaattttttgttgtgtctggcccagctgcacacgacctgttccatgctgtcatgggccgtacactcagcatgaccctgaaacacctggattcttatctagctgactgctacgatgccattgctgtttttctctgtatccacattgttctccggttccgtaacattgcagcaaagagggatgttcctgccctggacaggtcactgaattctggtccttgatgcccaacaggccacgaactctcttggtcttgcatgactctgccctgaccttagactcctactgacctggtatcatcaacctttattcccattcatttgctccggaggcagtagtgctgctttttgactcacctttctccaaccactgccccccaacccccacaactagctattgaccattaaactgaatgatgccccactccctcccatccccctccaacattccttgctggctgacctctgattctgattaagcccacaggtactgggaacaggtgcttgccttgctatggccacggtttgaactgatcctggagatgaatgttcagagcgtccgaagcactgacccccagcgcctaggggggttggatactcggccccactatatcacacgccgctatgcagagttctcctccgctcttgtcagtatcaaccagacaattcctaatgaacggaccatgcaattgctgggacagctgcaggtggaggtggagaattttgtcctccgagtggcagctgagttctcctcaaggaaggagcagcttgtgtttctgatcaacaactatgacatgatgctgggtgtgctgatggagcgggctgcagatgacagcaaagaggttgagagcttccagcagctgctcaatgctcggacacaggaattcattgaagagttgctgtctcccccttttgggggtttagtggcatttgtgaaggaggctgaggctttgattgagcgtggacaggctgagcgacttcgaggggaagaagcccgggtaactcagctgatccgtggctttggtagttcctggaaatcatcagtggaatctctgagtcaggatgtaatgcggagtttcaccaacttcagaaatggcaccagtatcattcagggagcgctgacccagctgatccagctctatcatcgcttccaccgggtgctgtcccagccgcagctccgagccctccctgcccgggctgagctcatcaacattcaccaccttatggtggagctcaagaagcataagcccaacttctgatgtgccagaaaccgccctgagatctgccggtcatctccatggacttctgcaccccattccatacccttcttcacctggggtaccccttccagttttccccttgcttcccaggcccttgacatggcttacctgccttcactcccagcaccttgcccaacaggataagctggatccccttggccttctgaatatcccagtgtcttcaggtttcccaagaccacttccctgtgggcttccaaaatggcctttatcatttctccagtctgtcaccctcctttcctgctcccatacacccaaggcttgtttcttcccctgtaaaaaccactgcctcaatctctggttcactcaactagtcaccatgtcctgaggcatgaagcctcctcagctcttggaattgctggcaaggggtgactgcctctgagtcattgtgtttttcaaagtgatttcttttctgtagctttttgacctaagatctcagcaatttgaacactaacctctcccctcctggctcaagaattactccgaagtcagtctgcagaaaataaatatttagtatgacatgaaaattaaaa

SEQ ID NO: 424273 - DNA, 2844 bp, Homo sapiens
ggctagtttgtgtttcagacttccatatttccatttgcagttgggtgaagtggttagagctgaaaggggacagctggagtcaaacaacttaactcaaatatctgggaacgatttcgcgctgaggaagaccctttgggacttgtagctccactccggggaacggactcgccgggactgacagttgccggaagcgggtggtcctgggctccaggaaccactgcaacttggggagttggatatcacttctgatgaattcatcctggatgaagtggatgttcacattcaggcaaatctggaggatgagttagtaaaggaagctcttaaaacgggtgtagatctccgtcactattcaaagcaagttgagctggagctacagcagattgaacagaaatccattcgggattatattcaagagagtgagaatatagcatctctacacaaccagatcacagcctgtgatgctgtcctggagcgaatggagcagatgttgggagcttttcagagtgacctcagctccatcagctctgagatccggacactgcaggaacagtcaggagccatgaacattcgacttcgaaatcgccaggcagttcgggggaaacttggggagcttgttgatggtctggtggtgccttctgctctggtcacggcaattctggaggctccagtgacagagcccaggttcttggagcagctacaggagctggatgccaaggcagccgcagtcagagagcaggaagctagaggcacagcagcctgcgcagatgtcagaggcgtgctcgatcggctccgggtcaaggcagtgacgaagatccgagagtttatcctccagaagatttattccttcaggaaacccatgaccaactatcagatcccccagacggccctgctgaagtacaggttcttctatcagtttctgctgggcaatgaacgagcaacagcaaaggagatcagggatgaatatgtggagacgctgagcaagatttacctgtcttactaccgctcttacctggggcggctcatgaaggtgcagtatgaggaagtcgctgagaaagatgatctaatgggtgtggaagatacagcaaagaaaggattcttctcaaagccatcgctccgcagcaggaacaccattttcaccctaggaacccgcggctctgtcatctcccccactgaacttgaggcccccatcctggtgcctcacacagcgcagcgcggagagcagaggtatccatttgaggccctcttccgcagccagcactacgccctcctagacaattcctgccgcgaataccttttcatctgtgaattttttgttgtgtctggcccagctgcacacgacctgttccatgctgtcatgggccgtacactcagcatgaccctgaaacacctggattcttatctagctgactgctacgatgccattgctgtttttctctgtatccacattgttctccggttccgtaacattgcagcaaagagggatgttcctgccctggacaggtactgggaacaggtgcttgccttgctatggccacggtttgaactgatcctggagatgaatgttcagagcgtccgaagcactgacccccagcgcctaggggggttggatactcggccccactatatcacacgccgctatgcagagttctcctccgctcttgtcagtatcaaccagacaattcctaatgaacggaccatgcaattgctgggacagctgcaggtggaggtggagaattttgtcctccgagtggcagctgagttctcctcaaggaaggagcagcttgtgtttctgatcaacaactatgacatgatgctgggtgtgctgatggagcgggctgcagatgacagcaaagaggttgagagcttccagcagctgctcaatgctcggacacaggaattcattgaagagttgctgtctcccccttttgggggtttagtggcatttgtgaaggaggctgaggctttgattgagcgtggacaggctgagcgacttcgaggggaagaagcccgggtaactcagctgatccgtggctttggtagttcctggaaatcatcagtggaatctctgagtcaggatgtaatgcggagtttcaccaacttcagaaatggcaccagtatcattcagggagcgctgacccagctgatccagctctatcatcgcttccaccgggtgctgtcccagccgcagctccgagccctccctgcccgggctgagctcatcaacattcaccaccttatggtggagctcaagaagcataagcccaacttctgatgtgccagaaaccgccctgagatctgccggtcatctccatggacttctgcaccccattccatacccttcttcacctggggtaccccttccagttttccccttgcttcccaggcccttgacatggcttacctgccttcactcccagcaccttgcccaacaggataagctggatccccttggccttctgaatatcccagtgtcttcaggtttcccaagaccacttccctgtgggcttccaaaatggcctttatcatttctccagtctgtcaccctcctttcctgctcccatacacccaaggcttgtttcttcccctgtaaaaaccactgcctcaatctctggttcactcaactagtcaccatgtcctgaggcatgaagcctcctcagctcttggaattgctggcaaggggtgactgcctctgagtcattgtgtttttcaaagtgatttcttttctgtagctttttgacctaagatctcagcaatttgaacactaacctctcccctcctggctcaagaattactccgaagtcagtctgcagaaaataaatatttagtatgacatgaaaattaaaa

SEQ ID NO: 424274 - DNA, 3480 bp, Homo sapiens
ggctagtttgtgtttcagacttccatatttccatttgcagttgggtgaagtggttagagctgaaaggggacagctggagtcaaacaacttaactcaaatatctgggaacgatttcgcgctgaggaagaccctttgggacttgtagctccactccggggaacggactcgccgggactgacagttgccggaagtgaggctgcggggaatggccgccgctgcgaccatggcggctgcggcccgggaactggtgttgcgggctgggacctcagatatggaggaggaagagggcccgctggcgggtggtcctgggctccaggaaccactgcaacttggggagttggatatcacttctgatgaattcatcctggatgaagtggatgttcacattcaggcaaatctggaggatgagttagtaaaggaagctcttaaaacgggtgtagatctccgtcactattcaaagcaagttgagctggagctacagcagattgaacagaaatccattcgggattatattcaagagagtgagaatatagcatctctacacaaccagatcacagcctgtgatgctgtcctggagcgaatggagcagatgttgggagcttttcagagtgacctcagctccatcagctctgagatccggacactgcaggaacagtcaggagccatgaacattcgacttcgaaatcgccaggcagttcgggggaaacttggggagcttgttgatggtctggtggtgccttctgctctggtcacggcaattctggaggctccagtgacagagcccaggttcttggagcagctacaggagctggatgccaaggcagccgcagtcagagagcaggaagctagaggcacagcagcctgcgcagatgtcagaggcgtgctcgatcggctccgggtcaaggcagtgacgaagatccgagagtttatcctccagaagatttattccttcaggaaacccatgaccaactatcagatcccccagacggccctgctgaagtacaggttcttctatcagtttctgctgggcaatgaacgagcaacagcaaaggagatcagggatgaatatgtggagacgctgagcaagatttacctgtcttactaccgctcttacctggggcggctcatgaaggtgcagtatgaggaagtcgctgagaaagatgatctaatgggtgtggaagatacagcaaagaaaggattcttctcaaagccatcgctccgcagcaggaacaccattttcaccctaggaacccgcggctctgtcatctcccccactgaacttgaggcccccatcctggtgcctcacacagcgcagcgcggagagcagaggtatccatttgaggccctcttccgcagccagcactacgccctcctagacaattcctgccgcgaataccttttcatctgtgaattttttgttgtgtctggcccagctgcacacgacctgttccatgctgtcatgggccgtacactcagcatgaccctgaaacacctggattcttatctagctgactgctacgatgccattgctgtttttctctgtatccacattgttctccggttccgtaacattgcagcaaagagggatgttcctgccctggacaggtactgggaacaggtgcttgccttgctatggccacggtttgaactgatcctggagatgaatgttcagagcgtccgaagcactgacccccagcgcctaggggggttggatactcggccccactatatcacacgccgctatgcagagttctcctccgctcttgtcagtatcaaccagacaattcctaatgaacggaccatgcaattgctgggacagctgcaggtggaggtggagaattttgtcctccgagtggcagctgagttctcctcaaggaaggagcagcttgtgtttctgatcaacaactatgacatgatgctgggtgtgctgatggagcgggctgcagatgacagcaaagaggttgagagcttccagcagctgctcaatgctcggacacaggaattcattgaagagttgctgtctcccccttttgggggtttagtggcatttgtgaaggaggctgaggctttgattgagcgtggacaggctgagcgacttcgaggggaagaagcccgggtaactcagctgatccgtggctttggtagttcctggaaatcatcagtggaatctctgagtcaggatgtaatgcggagtttcaccaacttcagaaatggcaccagtatcattcaggtgacctgcaagtcccaggccccactcagatcccccatcattaattattttccccatctttttgctgggctcagcatcatctaagtgacccttggtcttcagttactagctgtgcccaaagttctgtatgagccctaacctgattctttttttgtttgtttgttttgttttttttttgagacagagtctagctctgttgtccaggctggagtgcagtggcacagtctcggctcactgcaacctctgcctcccaggttcaagtgattttcctgcctcagcctcccaagtagctgggattacaggtgcctgccaccacaaccagctaattttcgtatttgtagtagagatggggtttcactgtgttggccaggctggtctcgaattcctgacctcgtgatctgcccgccatggcctcccacagtgctgggattacaagtgtgagccactgcgcctggccgcctaacctgattcttaatcatcactattagcaccattttacggtttgatccctcaatgactttctttgaccagggagcgctgacccagctgatccagctctatcatcgcttccaccgggtgctgtcccagccgcagctccgagccctccctgcccgggctgagctcatcaacattcaccaccttatggtggagctcaagaagcataagcccaacttctgatgtgccagaaaccgccctgagatctgccggtcatctccatggacttctgcaccccattccatacccttcttcacctggggtaccccttccagttttccccttgcttcccaggcccttgacatggcttacctgccttcactcccagcaccttgcccaacaggataagctggatccccttggccttctgaatatcccagtgtcttcaggtttcccaagaccacttccctgtgggcttccaaaatggcctttatcatttctccagtctgtcaccctcctttcctgctcccatacacccaaggcttgtttcttcccctgtaaaaaccactgcctcaatctctggttcactcaactagtcaccatgtcctgaggcatgaagcctcctcagctcttggaattgctggcaaggggtgactgcctctgagtcattgtgtttttcaaagtgatttcttttctgtagctttttgacctaagatctcagcaatttgaacactaacctctcccctcctggctcaagaattactccgaagtcagtctgcagaaaataaatatttagtatgacatgaaaattaaaa

SEQ ID NO: 424275 - DNA, 2123 bp, Homo sapiens
  misc_feature (2123)..(2123): n is a, c, g, or t
gagtctgcctctggcctgcccctcaccagaggggtgtctctctgtcagcaaggccagtacctggggacccaggtccccacgtgggaccagctcccagatctgggcttcaggcctccgtaggccaggtcagtgacacctcctggctgggttgaaagagcaggtgcattaacaccacacatggccaggaacacgtgcctctgacgcacagggctgctgccctgccgtgctgccaggacagtagaaaccaccgcctatagggaccctttcacactcagacccttgaccacgtgttgcggagccttttgctggggactgggagggagatgactcctgcactctgcttgcccgcaggcatggatgagttgatggaggtgtctttctcgcccctggcggccacaggcaagcccctctcacgctgtgggaagtgccaccgcttcatgaagtacatccaggccaagccaagccgcctgcactgctcccactgcgatgagacctacacgctcccccagaacggcaccatcaagctctacaaggagctccgctgccctctggatgacttcgagctggtcctgtggtcatcaggctctcggggcaagagctacccgctgtgcccctactgctacaaccacccacccttccgagacatgaagaaaggtgagtgcagccactccctcctgtccacaggtagctgcagtctcttttcagtgccaacccctgccttgcaccaggctggactctgaggggacccctcaccctggcctttcctgcactcattggcactgagacgagagaccctggatgtagctggggcactgcttaggcctcagccagtggtgccaccctctctctgtgtcagaatcgagcaggcaaccctagtccaccctcaggacctgggcacaggtgtgcagtgctccctctggagctgagtgagcaagaggatgcagcagtcgggggacccacccggtgagcgggcacccccagtcagcgtccaccaccgtcctccatcctcatcctcgtcctcattactggaggagggagcgcatgtccaggcaggcaggacagagcaccgagccagaccaggaatcagcgggagtgaggcatctgcccacattcaccgtgtgctctgcagaaagctccctcaggcctcagtctgcacccaggctgccccgggagtgagaccccatccctgccctcctgctgccgccagagtagctgacagggtggttccatgtggcccagtgacatgagggtcatgtggcattaccagtaacaagctggcagcaaagcaaaggggggatggagtcagctgaaacccactgggatggtgccagcgaggggccttgaaagttgaggaggtttcaggtaagcagaaaacaggggtaatggcagccaggagccgaaacatgagcaaggctgtccccaagagcaaggccaagaagagttccttctgctgggacgagggatccaggagcttgaggcattgggagcaggcagcagagggcaggtgggcacagtgggcgtgcctttacagggctcccttctcccgccaggcatgggctgcaacgagtgtacgcacccctcctgccagcactcgctgagcatgctgggcatcggccagtgcgtggaatgtgagagcggggtgctggtgctggaccccacctcgggccccaagtggaaggtggcctgcaacaagtgcaacgtggtagcgcactgcttcgagaacgcccaccgcgtgcgggtgtccgccgacacctgcagtgtctgtgaggccgccttgcttgatgtggacttcaacaaggccaagtccccactcccgggcgatgagacgcagcacatgggctgcgtcttttgtgaccccgtcttccaggagctggtggagctgaagcatgcggcctcctgccaccccatgcaccgcggtggaccagggagaaggcagggtcgagggcggggccgggccaggaggccccctgggaagcccaaccccagacggcccaaggacaagatgtcagccctggccgcctactttgtatgatgaccctgtcctccctcacccaggctgcagtgccatgcagacacctcatggcacttcaaactattaaaatgcattttatcttatccagaan

SEQ ID NO: 424276 - DNA, 3211 bp, Homo sapiens
  misc_feature (3211)..(3211): n is a, c, g, or t
gactctaactatagctgggtctatatgtagctgaggatataggtgtggtgaatccggcttcgagtggttgccgccccgggaacaaggaccggagctggatccgcggtgcggctgtgggtgagcggcgggctgcgggaccctcgcccggcggctcagaaaggcgggaagcgcacgcatttttctggcttgtttcctgaacgttggccggcggaggacccgcgagctcgggagagcgcccgggccgggctctgcattcttgttgcctcttccctggcgggggtgatactctcccgcggggcttgctgtgggggttcagggaggtggagatgggcccgccatgtgcctgcagggagcaggcgctgtggttaatacttttcttcttcgaaccctcccacagctctttagggtgagatctgctgtaccagtctcacaggagtcagcattggtaatagtgctgtgctgcggaagagtggagtctaaactttttcattgccagtgccccgaaactggagtgtgaaggaccgagacaagatgaagactgtgctcatggttgctgaaaagccgtccttggcacagtcaattgccaaaatcctctctagagggagcctgtcctcacacaaagggctgaacggggcctgctcagtccacgagtacactgggacctttgctggccagccagtgcgcttcaagatgacgtctgtctgtggtcacgtgatgaccctggatttcctgggaaaatacaacaaatgggacaaagtggaccccgcagaactgttcagccaagctcccacggagaagaaagaagctaaccccaagctgaacatggtgaagttcctgcaggtggagggcagaggctgcgactacatcgtgctgtggctggactgcgacaaggagggggagaacatctgctttgaggttcttgatgctgttctgcccgtcatgaacaaggcccatggtggcgagaagaccgtgttccgggccaggtttagctccatcacggacacagacatctgtaatgccatggcctgcctaggcgagcctgaccacaacgaggcgctctcagtggatgctcgccaggagctggacctgcgaatcggctgtgcattcaccaggtttcagactaaatatttccaggggaaatacggtgatttagacagctctctcatctcctttgggccgtgtcagactccaaccctgggattctgtgtggagagacatgataaaatccagtccttcaaaccagagacctactgggtgctgcaggccaaggttaacactgacaaagacagatctctccttttggactgggaccgagtaagagtgtttgaccgggagatcgcacagatgtttttaaacatgacaaagctggagaaggaagcccaggtggaggccacaagcaggaaagaaaaggccaagcagaggcccctggccctgaacactgtggagatgctgcgtgtggccagctcttctctgggcatggggccgcagcacgccatgcagacggctgagcggctctacacgcaaggctacatcagctacccacggacagagaccacccactaccctgagaactttgacctgaagggctctctgcggcagcaggccaaccacccctactgggccgacacggtgaagcggttgttagcagaaggtatcaaccgcccgcggaaaggccatgacgccggcgaccatccccccatcacccccatgaagtctgccacagaggccgaattagggggtgacgcgtggcggctctatgagtacatcaccagacacttcatcgccacggtcagccatgactgcaagtacctgcagagcaccatctccttcagaattgggcccgagctcttcacctgctccgggaagaccgtcctctcaccaggcttcacggaggtcatgccctggcagagcgtgcccctggaggagagcctgcccacttgccagcggggtgatgccttccctgtgggcgaggtgaagatgctggagaagcagacgaacccacccgactacctgacggaggccgagctcatcacgctcatggagaagcatggcatcggcacggatgccagcatccctgtgcatatcaacaacatctgccagcgcaactatgtcacggtggagagcgggcgccggctcaagcccaccaacctcggcatcgtcctggtgcacggctactataagattgatgcagagctggtgctccccaccatccgcagtgcagtggagaagcagctgaacctgatcgcccagggcaaggccgactaccgccaggtcctgggccacaccctggacgtgttcaagaggaagttccactactttgtcgactccattgctggcatggatgagttgatggaggtgtctttctcgcccctggcggccacaggcaagcccctctcacgctgtgggaagtgccaccgcttcatgaagtacatccaggccaagccaagccgcctgcactgctcccactgcgatgagacctacacgctcccccagaacggcaccatcaagctctacaaggagctccgctgccctctggatgacttcgagctggtcctgtggtcatcaggctctcggggcaagagctacccgctgtgcccctactgctacaaccacccacccttccgagacatgaagaaaggcatgggctgcaacgagtgtacgcacccctcctgccagcactcgctgagcatgctgggcatcggccagtgcgtggaatgtgagagcggggtgctggtgctggaccccacctcgggccccaagtggaaggtggcctgcaacaagtgcaacgtggtagcgcactgcttcgagaacgcccaccgcgtgcgggtgtccgccgacacctgcagtgtctgtgaggccgccttgcttgatgtggacttcaacaaggccaagtccccactcccgggcgatgagacgcagcacatgggctgcgtcttttgtgaccccgtcttccaggagctggtggagctgaagcatgcggcctcctgccaccccatgcaccgcggtggaccagggagaaggcagggtcgagggcggggccgggccaggaggccccctgggaagcccaaccccagacggcccaaggacaagatgtcagccctggccgcctactttgtatgatgaccctgtcctccctcacccaggctgcagtgccatgcagacacctcatggcacttcaaactattaaaatgcattttatcttatccagaan

SEQ ID NO: 424277 - DNA, 2931 bp, Homo sapiens
  misc_feature (2931)..(2931): n is a, c, g, or t
gactctaactatagctgggtctatatgtagctgaggatataggtgtggtgaatccggcttcgagtggttgccgccccgggaacaaggaccggagctggatccgcggtgcggctgtggctctttagggtgagatctgctgtaccagtctcacaggagtcagcattggtaatagtgctgtgctgcggaagagtggagtctaaactttttcattgccagtgccccgaaactggagtgtgaaggaccgagacaagatgaagactgtgctcatggttgctgaaaagccgtccttggcacagtcaattgccaaaatcctctctagagggagcctgtcctcacacaaagggctgaacggggcctgctcagtccacgagtacactgggacctttgctggccagccagtgcgcttcaagatgacgtctgtctgtggtcacgtgatgaccctggatttcctgggaaaatacaacaaatgggacaaagtggaccccgcagaactgttcagccaagctcccacggagaagaaagaagctaaccccaagctgaacatggtgaagttcctgcaggtggagggcagaggctgcgactacatcgtgctgtggctggactgcgacaaggagggggagaacatctgctttgaggttcttgatgctgttctgcccgtcatgaacaaggcccatggtggcgagaagaccgtgttccgggccaggtttagctccatcacggacacagacatctgtaatgccatggcctgcctaggcgagcctgaccacaacgaggcgctctcagtggatgctcgccaggagctggacctgcgaatcggctgtgcattcaccaggtttcagactaaatatttccaggggaaatacggtgatttagacagctctctcatctcctttgggccgtgtcagactccaaccctgggattctgtgtggagagacatgataaaatccagtccttcaaaccagagacctactgggtgctgcaggccaaggttaacactgacaaagacagatctctccttttggactgggaccgagtaagagtgtttgaccgggagatcgcacagatgtttttaaacatgacaaagctggagaaggaagcccaggtggaggccacaagcaggaaagaaaaggccaagcagaggcccctggccctgaacactgtggagatgctgcgtgtggccagctcttctctgggcatggggccgcagcacgccatgcagacggctgagcggctctacacgcaaggctacatcagctacccacggacagagaccacccactaccctgagaactttgacctgaagggctctctgcggcagcaggccaaccacccctactgggccgacacggtgaagcggttgttagcagaaggtatcaaccgcccgcggaaaggccatgacgccggcgaccatccccccatcacccccatgaagtctgccacagaggccgaattagggggtgacgcgtggcggctctatgagtacatcaccagacacttcatcgccacggtcagccatgactgcaagtacctgcagagcaccatctccttcagaattgggcccgagctcttcacctgctccgggaagaccgtcctctcaccaggcttcacggaggtcatgccctggcagagcgtgcccctggaggagagcctgcccacttgccagcggggtgatgccttccctgtgggcgaggtgaagatgctggagaagcagacgaacccacccgactacctgacggaggccgagctcatcacgctcatggagaagcatggcatcggcacggatgccagcatccctgtgcatatcaacaacatctgccagcgcaactatgtcacggtggagagcgggcgccggctcaagcccaccaacctcggcatcgtcctggtgcacggctactataagattgatgcagagctggtgctccccaccatccgcagtgcagtggagaagcagctgaacctgatcgcccagggcaaggccgactaccgccaggtcctgggccacaccctggacgtgttcaagaggaagttccactactttgtcgactccattgctggcatggatgagttgatggaggtgtctttctcgcccctggcggccacaggcaagcccctctcacgctgtgggaagtgccaccgcttcatgaagtacatccaggccaagccaagccgcctgcactgctcccactgcgatgagacctacacgctcccccagaacggcaccatcaagctctacaaggagctccgctgccctctggatgacttcgagctggtcctgtggtcatcaggctctcggggcaagagctacccgctgtgcccctactgctacaaccacccacccttccgagacatgaagaaaggcatgggctgcaacgagtgtacgcacccctcctgccagcactcgctgagcatgctgggcatcggccagtgcgtggaatgtgagagcggggtgctggtgctggaccccacctcgggccccaagtggaaggtggcctgcaacaagtgcaacgtggtagcgcactgcttcgagaacgcccaccgcgtgcgggtgtccgccgacacctgcagtgtctgtgaggccgccttgcttgatgtggacttcaacaaggccaagtccccactcccgggcgatgagacgcagcacatgggctgcgtcttttgtgaccccgtcttccaggagctggtggagctgaagcatgcggcctcctgccaccccatgcaccgcggtggaccagggagaaggcagggtcgagggcggggccgggccaggaggccccctgggaagcccaaccccagacggcccaaggacaagatgtcagccctggccgcctactttgtatgatgaccctgtcctccctcacccaggctgcagtgccatgcagacacctcatggcacttcaaactattaaaatgcattttatcttatccagaan

SEQ ID NO: 424278 - DNA, 2858 bp, Homo sapiens
  misc_feature (2858)..(2858): n is a, c, g, or t
gcggctggacccggaaataggggttgtcggtagccgccccgggaacaaggaccggagctggatccgcggtgcggctgtgggagtcagcattggtaatagtgctgtgctgcggaagagtggagtctaaactttttcattgccagtgccccgaaactggagtgtgaaggaccgagacaagatgaagactgtgctcatggttgctgaaaagccgtccttggcacagtcaattgccaaaatcctctctagagggagcctgtcctcacacaaagggctgaacggggcctgctcagtccacgagtacactgggacctttgctggccagccagtgcgcttcaagatgacgtctgtctgtggtcacgtgatgaccctggatttcctgggaaaatacaacaaatgggacaaagtggaccccgcagaactgttcagccaagctcccacggagaagaaagaagctaaccccaagctgaacatggtgaagttcctgcaggtggagggcagaggctgcgactacatcgtgctgtggctggactgcgacaaggagggggagaacatctgctttgaggttcttgatgctgttctgcccgtcatgaacaaggcccatggtggcgagaagaccgtgttccgggccaggtttagctccatcacggacacagacatctgtaatgccatggcctgcctaggcgagcctgaccacaacgaggcgctctcagtggatgctcgccaggagctggacctgcgaatcggctgtgcattcaccaggtttcagactaaatatttccaggggaaatacggtgatttagacagctctctcatctcctttgggccgtgtcagactccaaccctgggattctgtgtggagagacatgataaaatccagtccttcaaaccagagacctactgggtgctgcaggccaaggttaacactgacaaagacagatctctccttttggactgggaccgagtaagagtgtttgaccgggagatcgcacagatgtttttaaacatgacaaagctggagaaggaagcccaggtggaggccacaagcaggaaagaaaaggccaagcagaggcccctggccctgaacactgtggagatgctgcgtgtggccagctcttctctgggcatggggccgcagcacgccatgcagacggctgagcggctctacacgcaaggctacatcagctacccacggacagagaccacccactaccctgagaactttgacctgaagggctctctgcggcagcaggccaaccacccctactgggccgacacggtgaagcggttgttagcagaaggtatcaaccgcccgcggaaaggccatgacgccggcgaccatccccccatcacccccatgaagtctgccacagaggccgaattagggggtgacgcgtggcggctctatgagtacatcaccagacacttcatcgccacggtcagccatgactgcaagtacctgcagagcaccatctccttcagaattgggcccgagctcttcacctgctccgggaagaccgtcctctcaccaggcttcacggaggtcatgccctggcagagcgtgcccctggaggagagcctgcccacttgccagcggggtgatgccttccctgtgggcgaggtgaagatgctggagaagcagacgaacccacccgactacctgacggaggccgagctcatcacgctcatggagaagcatggcatcggcacggatgccagcatccctgtgcatatcaacaacatctgccagcgcaactatgtcacggtggagagcgggcgccggctcaagcccaccaacctcggcatcgtcctggtgcacggctactataagattgatgcagagctggtgctccccaccatccgcagtgcagtggagaagcagctgaacctgatcgcccagggcaaggccgactaccgccaggtcctgggccacaccctggacgtgttcaagaggaagttccactactttgtcgactccattgctggcatggatgagttgatggaggtgtctttctcgcccctggcggccacaggcaagcccctctcacgctgtgggaagtgccaccgcttcatgaagtacatccaggccaagccaagccgcctgcactgctcccactgcgatgagacctacacgctcccccagaacggcaccatcaagctctacaaggagctccgctgccctctggatgacttcgagctggtcctgtggtcatcaggctctcggggcaagagctacccgctgtgcccctactgctacaaccacccacccttccgagacatgaagaaaggcatgggctgcaacgagtgtacgcacccctcctgccagcactcgctgagcatgctgggcatcggccagtgcgtggaatgtgagagcggggtgctggtgctggaccccacctcgggccccaagtggaaggtggcctgcaacaagtgcaacgtggtagcgcactgcttcgagaacgcccaccgcgtgcgggtgtccgccgacacctgcagtgtctgtgaggccgccttgcttgatgtggacttcaacaaggccaagtccccactcccgggcgatgagacgcagcacatgggctgcgtcttttgtgaccccgtcttccaggagctggtggagctgaagcatgcggcctcctgccaccccatgcaccgcggtggaccagggagaaggcagggtcgagggcggggccgggccaggaggccccctgggaagcccaaccccagacggcccaaggacaagatgtcagccctggccgcctactttgtatgatgaccctgtcctccctcacccaggctgcagtgccatgcagacacctcatggcacttcaaactattaaaatgcattttatcttatccagaan

SEQ ID NO: 424279 - DNA, 2838 bp, Homo sapiens
  misc_feature (2838)..(2838): n is a, c, g, or t
ctggattccgcggtgcggctgtggctcttttaggtgagatctgctgtaccagtctcacaggagtcagcattggtaatagtgctgtgctgcggaagagtggagtctaaactttttcattgccagtgccccgaaactggagtgtgaaggaccgagacaagatgaagactgtgctcatggttgctgaaaagccgtccttggcacagtcaattgccaaaatcctctctagagggagcctgtcctcacacaaagggctgaacggggcctgctcagtccacgagtacactgggacctttgctggccagccagtgcgcttcaagatgacgtctgtctgtggtcacgtgatgaccctggatttcctgggaaaatacaacaaatgggacaaagtggaccccgcagaactgttcagccaagctcccacggagaagaaagaagctaaccccaagctgaacatggtgaagttcctgcaggtggagggcagaggctgcgactacatcgtgctgtggctggactgcgacaaggagggggagaacatctgctttgaggttcttgatgctgttctgcccgtcatgaacaaggcccatggtggcgagaagaccgtgttccgggccaggtttagctccatcacggacacagacatctgtaatgccatggcctgcctaggcgagcctgaccacaacgaggcgctctcagtggatgctcgccaggagctggacctgcgaatcggctgtgcattcaccaggtttcagactaaatatttccaggggaaatacggtgatttagacagctctctcatctcctttgggccgtgtcagactccaaccctgggattctgtgtggagagacatgataaaatccagtccttcaaaccagagacctactgggtgctgcaggccaaggttaacactgacaaagacagatctctccttttggactgggaccgagtaagagtgtttgaccgggagatcgcacagatgtttttaaacatgacaaagctggagaaggaagcccaggtggaggccacaagcaggaaagaaaaggccaagcagaggcccctggccctgaacactgtggagatgctgcgtgtggccagctcttctctgggcatggggccgcagcacgccatgcagacggctgagcggctctacacgcaaggctacatcagctacccacggacagagaccacccactaccctgagaactttgacctgaagggctctctgcggcagcaggccaaccacccctactgggccgacacggtgaagcggttgttagcagaaggtatcaaccgcccgcggaaaggccatgacgccggcgaccatccccccatcacccccatgaagtctgccacagaggccgaattagggggtgacgcgtggcggctctatgagtacatcaccagacacttcatcgccacggtcagccatgactgcaagtacctgcagagcaccatctccttcagaattgggcccgagctcttcacctgctccgggaagaccgtcctctcaccaggcttcacggaggtcatgccctggcagagcgtgcccctggaggagagcctgcccacttgccagcggggtgatgccttccctgtgggcgaggtgaagatgctggagaagcagacgaacccacccgactacctgacggaggccgagctcatcacgctcatggagaagcatggcatcggcacggatgccagcatccctgtgcatatcaacaacatctgccagcgcaactatgtcacggtggagagcgggcgccggctcaagcccaccaacctcggcatcgtcctggtgcacggctactataagattgatgcagagctggtgctccccaccatccgcagtgcagtggagaagcagctgaacctgatcgcccagggcaaggccgactaccgccaggtcctgggccacaccctggacgtgttcaagaggaagttccactactttgtcgactccattgctggcatggatgagttgatggaggtgtctttctcgcccctggcggccacaggcaagcccctctcacgctgtgggaagtgccaccgcttcatgaagtacatccaggccaagccaagccgcctgcactgctcccactgcgatgagacctacacgctcccccagaacggcaccatcaagctctacaaggagctccgctgccctctggatgacttcgagctggtcctgtggtcatcaggctctcggggcaagagctacccgctgtgcccctactgctacaaccacccacccttccgagacatgaagaaaggcatgggctgcaacgagtgtacgcacccctcctgccagcactcgctgagcatgctgggcatcggccagtgcgtggaatgtgagagcggggtgctggtgctggaccccacctcgggccccaagtggaaggtggcctgcaacaagtgcaacgtggtagcgcactgcttcgagaacgcccaccgcgtgcgggtgtccgccgacacctgcagtgtctgtgaggccgccttgcttgatgtggacttcaacaaggccaagtccccactcccgggcgatgagacgcagcacatgggctgcgtcttttgtgaccccgtcttccaggagctggtggagctgaagcatgcggcctcctgccaccccatgcaccgcggtggaccagggagaaggcagggtcgagggcggggccgggccaggaggccccctgggaagcccaaccccagacggcccaaggacaagatgtcagccctggccgcctactttgtatgatgaccctgtcctccctcacccaggctgcagtgccatgcagacacctcatggcacttcaaactattaaaatgcattttatcttatccagaan

SEQ ID NO: 424280 - DNA, 3425 bp, Homo sapiens
  misc_feature (3425)..(3425): n is a, c, g, or t
gactctaactatagctgggtctatatgtagctgaggatataggtgtggtgaatccggcttcgagtggttgccgccccgggaacaaggaccggagctggatccgcggtgcggctgtgggtgagcggcgggctgcgggaccctcgcccggcggctcagaaaggcgggaagcgcacgcatttttctggcttgtttcctgaacgttggccggcggaggacccgcgagctcgggagagcgcccgggccgggctctgcattcttgttgcctcttccctggcgggggtgatactctcccgcggggcttgctgtgggggttcagggaggtggagatgggcccgccatgtgcctgcagggagcaggcgctgtggttaatacttttcttcttcgaaccctcccacagctctttagggtgagatctgctgtaccagtctcacaggtagggaaactgaggctcagggaagctgtgcagccaccggggcccagatcggtgcggtacacacccaggcagcttccactcgccgccccctaggccctggctgggttttgagggcacccaggttctctgacctgttatctgtaaatgaagtagggtacttttgtgaacaaattagctggaatccaggggcaataatttctcgcagaagtgaaaggagtcagcattggtaatagtgctgtgctgcggaagagtggagtctaaactttttcattgccagtgccccgaaactggagtgtgaaggaccgagacaagatgaagactgtgctcatggttgctgaaaagccgtccttggcacagtcaattgccaaaatcctctctagagggagcctgtcctcacacaaagggctgaacggggcctgctcagtccacgagtacactgggacctttgctggccagccagtgcgcttcaagatgacgtctgtctgtggtcacgtgatgaccctggatttcctgggaaaatacaacaaatgggacaaagtggaccccgcagaactgttcagccaagctcccacggagaagaaagaagctaaccccaagctgaacatggtgaagttcctgcaggtggagggcagaggctgcgactacatcgtgctgtggctggactgcgacaaggagggggagaacatctgctttgaggttcttgatgctgttctgcccgtcatgaacaaggcccatggtggcgagaagaccgtgttccgggccaggtttagctccatcacggacacagacatctgtaatgccatggcctgcctaggcgagcctgaccacaacgaggcgctctcagtggatgctcgccaggagctggacctgcgaatcggctgtgcattcaccaggtttcagactaaatatttccaggggaaatacggtgatttagacagctctctcatctcctttgggccgtgtcagactccaaccctgggattctgtgtggagagacatgataaaatccagtccttcaaaccagagacctactgggtgctgcaggccaaggttaacactgacaaagacagatctctccttttggactgggaccgagtaagagtgtttgaccgggagatcgcacagatgtttttaaacatgacaaagctggagaaggaagcccaggtggaggccacaagcaggaaagaaaaggccaagcagaggcccctggccctgaacactgtggagatgctgcgtgtggccagctcttctctgggcatggggccgcagcacgccatgcagacggctgagcggctctacacgcaaggctacatcagctacccacggacagagaccacccactaccctgagaactttgacctgaagggctctctgcggcagcaggccaaccacccctactgggccgacacggtgaagcggttgttagcagaaggtatcaaccgcccgcggaaaggccatgacgccggcgaccatccccccatcacccccatgaagtctgccacagaggccgaattagggggtgacgcgtggcggctctatgagtacatcaccagacacttcatcgccacggtcagccatgactgcaagtacctgcagagcaccatctccttcagaattgggcccgagctcttcacctgctccgggaagaccgtcctctcaccaggcttcacggaggtcatgccctggcagagcgtgcccctggaggagagcctgcccacttgccagcggggtgatgccttccctgtgggcgaggtgaagatgctggagaagcagacgaacccacccgactacctgacggaggccgagctcatcacgctcatggagaagcatggcatcggcacggatgccagcatccctgtgcatatcaacaacatctgccagcgcaactatgtcacggtggagagcgggcgccggctcaagcccaccaacctcggcatcgtcctggtgcacggctactataagattgatgcagagctggtgctccccaccatccgcagtgcagtggagaagcagctgaacctgatcgcccagggcaaggccgactaccgccaggtcctgggccacaccctggacgtgttcaagaggaagttccactactttgtcgactccattgctggcatggatgagttgatggaggtgtctttctcgcccctggcggccacaggcaagcccctctcacgctgtgggaagtgccaccgcttcatgaagtacatccaggccaagccaagccgcctgcactgctcccactgcgatgagacctacacgctcccccagaacggcaccatcaagctctacaaggagctccgctgccctctggatgacttcgagctggtcctgtggtcatcaggctctcggggcaagagctacccgctgtgcccctactgctacaaccacccacccttccgagacatgaagaaaggcatgggctgcaacgagtgtacgcacccctcctgccagcactcgctgagcatgctgggcatcggccagtgcgtggaatgtgagagcggggtgctggtgctggaccccacctcgggccccaagtggaaggtggcctgcaacaagtgcaacgtggtagcgcactgcttcgagaacgcccaccgcgtgcgggtgtccgccgacacctgcagtgtctgtgaggccgccttgcttgatgtggacttcaacaaggccaagtccccactcccgggcgatgagacgcagcacatgggctgcgtcttttgtgaccccgtcttccaggagctggtggagctgaagcatgcggcctcctgccaccccatgcaccgcggtggaccagggagaaggcagggtcgagggcggggccgggccaggaggccccctgggaagcccaaccccagacggcccaaggacaagatgtcagccctggccgcctactttgtatgatgaccctgtcctccctcacccaggctgcagtgccatgcagacacctcatggcacttcaaactattaaaatgcattttatcttatccagaan

SEQ ID NO: 424281 - DNA, 2991 bp, Homo sapiens
  misc_feature (2991)..(2991): n is a, c, g, or t
ccacattcccaggatcatctcagccacttcagctgacctggtagttttttcttgtttttaatctcagatgtcttcaagtttccctaattccctaatttttcttcttcttgcctcaggttggtcttgttttttctttgttaaagtgattttccttgtagtggtgtaggttctattgacagcattgctatcctgagtgtcttttcttctctttaggagtcagcattggtaatagtgctgtgctgcggaagagtggagtctaaactttttcattgccagtgccccgaaactggagtgtgaaggaccgagacaagatgaagactgtgctcatggttgctgaaaagccgtccttggcacagtcaattgccaaaatcctctctagagggagcctgtcctcacacaaagggctgaacggggcctgctcagtccacgagtacactgggacctttgctggccagccagtgcgcttcaagatgacgtctgtctgtggtcacgtgatgaccctggatttcctgggaaaatacaacaaatgggacaaagtggaccccgcagaactgttcagccaagctcccacggagaagaaagaagctaaccccaagctgaacatggtgaagttcctgcaggtggagggcagaggctgcgactacatcgtgctgtggctggactgcgacaaggagggggagaacatctgctttgaggttcttgatgctgttctgcccgtcatgaacaaggcccatggtggcgagaagaccgtgttccgggccaggtttagctccatcacggacacagacatctgtaatgccatggcctgcctaggcgagcctgaccacaacgaggcgctctcagtggatgctcgccaggagctggacctgcgaatcggctgtgcattcaccaggtttcagactaaatatttccaggggaaatacggtgatttagacagctctctcatctcctttgggccgtgtcagactccaaccctgggattctgtgtggagagacatgataaaatccagtccttcaaaccagagacctactgggtgctgcaggccaaggttaacactgacaaagacagatctctccttttggactgggaccgagtaagagtgtttgaccgggagatcgcacagatgtttttaaacatgacaaagctggagaaggaagcccaggtggaggccacaagcaggaaagaaaaggccaagcagaggcccctggccctgaacactgtggagatgctgcgtgtggccagctcttctctgggcatggggccgcagcacgccatgcagacggctgagcggctctacacgcaaggctacatcagctacccacggacagagaccacccactaccctgagaactttgacctgaagggctctctgcggcagcaggccaaccacccctactgggccgacacggtgaagcggttgttagcagaaggtatcaaccgcccgcggaaaggccatgacgccggcgaccatccccccatcacccccatgaagtctgccacagaggccgaattagggggtgacgcgtggcggctctatgagtacatcaccagacacttcatcgccacggtcagccatgactgcaagtacctgcagagcaccatctccttcagaattgggcccgagctcttcacctgctccgggaagaccgtcctctcaccaggcttcacggaggtcatgccctggcagagcgtgcccctggaggagagcctgcccacttgccagcggggtgatgccttccctgtgggcgaggtgaagatgctggagaagcagacgaacccacccgactacctgacggaggccgagctcatcacgctcatggagaagcatggcatcggcacggatgccagcatccctgtgcatatcaacaacatctgccagcgcaactatgtcacggtggagagcgggcgccggctcaagcccaccaacctcggcatcgtcctggtgcacggctactataagattgatgcagagctggtgctccccaccatccgcagtgcagtggagaagcagctgaacctgatcgcccagggcaaggccgactaccgccaggtcctgggccacaccctggacgtgttcaagaggaagttccactactttgtcgactccattgctggcatggatgagttgatggaggtgtctttctcgcccctggcggccacaggcaagcccctctcacgctgtgggaagtgccaccgcttcatgaagtacatccaggccaagccaagccgcctgcactgctcccactgcgatgagacctacacgctcccccagaacggcaccatcaagctctacaaggagctccgctgccctctggatgacttcgagctggtcctgtggtcatcaggctctcggggcaagagctacccgctgtgcccctactgctacaaccacccacccttccgagacatgaagaaaggcatgggctgcaacgagtgtacgcacccctcctgccagcactcgctgagcatgctgggcatcggccagtgcgtggaatgtgagagcggggtgctggtgctggaccccacctcgggccccaagtggaaggtggcctgcaacaagtgcaacgtggtagcgcactgcttcgagaacgcccaccgcgtgcgggtgtccgccgacacctgcagtgtctgtgaggccgccttgcttgatgtggacttcaacaaggccaagtccccactcccgggcgatgagacgcagcacatgggctgcgtcttttgtgaccccgtcttccaggagctggtggagctgaagcatgcggcctcctgccaccccatgcaccgcggtggaccagggagaaggcagggtcgagggcggggccgggccaggaggccccctgggaagcccaaccccagacggcccaaggacaagatgtcagccctggccgcctactttgtatgatgaccctgtcctccctcacccaggctgcagtgccatgcagacacctcatggcacttcaaactattaaaatgcattttatcttatccagaan

SEQ ID NO: 424282 - DNA, 3293 bp, Homo sapiens
  misc_feature (3293)..(3293): n is a, c, g, or t
gactctaactatagctgggtctatatgtagctgaggatataggtgtggtgaatccggcttcgagtggttgccgccccgggaacaaggaccggagctggatccgcggtgcggctgtgggtgagcggcgggctgcgggaccctcgcccggcggctcagaaaggcgggaagcgcacgcatttttctggcttgtttcctgaacgttggccggcggaggacccgcgagctcgggagagcgcccgggccgggctctgcattcttgttgcctcttccctggcgggggtgatactctcccgcggggcttgctgtgggggttcagggaggtggagatgggcccgccatgtgcctgcagggagcaggcgctgtggttaatacttttcttcttcgaaccctcccacagctctttagggtgagatctgctgtaccagtctcacaggagtcagcattggtaatagtgctgtgctgcggaagagtggagtctaaactttttcattgccagtgccccgaaactggagtgtgaaggaccgagacaagatgaagactgtgctcatggttgctgaaaagccgtccttggcacagtcaattgccaaaatcctctctagagggagcctgtcctcacacaaagggctgaacggggcctgctcagtccacgagtacactgggacctttgctggccagccagtgcgcttcaagatgacgtctgtctgtggtcacgtgatgaccctggatttcctgggaaaatacaacaaatgggacaaagtggaccccgcagaactgttcagccaagctcccacggagaagaaagaagctaaccccaagctgaacatggtgaagttcctgcaggtggagggcagaggctgcgactacatcgtgctgtggctggactgcgacaaggagggggagaacatctgctttgagaaatgaagccacttattcccagtaaggaagctgcgtggccaggctccggcggcgaccctagtcccactgcacggccttcctagttcttgatgctgttctgcccgtcatgaacaaggcccatggtggcgagaagaccgtgttccgggccaggtttagctccatcacggacacagacatctgtaatgccatggcctgcctaggcgagcctgaccacaacgaggcgctctcagtggatgctcgccaggagctggacctgcgaatcggctgtgcattcaccaggtttcagactaaatatttccaggggaaatacggtgatttagacagctctctcatctcctttgggccgtgtcagactccaaccctgggattctgtgtggagagacatgataaaatccagtccttcaaaccagagacctactgggtgctgcaggccaaggttaacactgacaaagacagatctctccttttggactgggaccgagtaagagtgtttgaccgggagatcgcacagatgtttttaaacatgacaaagctggagaaggaagcccaggtggaggccacaagcaggaaagaaaaggccaagcagaggcccctggccctgaacactgtggagatgctgcgtgtggccagctcttctctgggcatggggccgcagcacgccatgcagacggctgagcggctctacacgcaaggctacatcagctacccacggacagagaccacccactaccctgagaactttgacctgaagggctctctgcggcagcaggccaaccacccctactgggccgacacggtgaagcggttgttagcagaaggtatcaaccgcccgcggaaaggccatgacgccggcgaccatccccccatcacccccatgaagtctgccacagaggccgaattagggggtgacgcgtggcggctctatgagtacatcaccagacacttcatcgccacggtcagccatgactgcaagtacctgcagagcaccatctccttcagaattgggcccgagctcttcacctgctccgggaagaccgtcctctcaccaggcttcacggaggtcatgccctggcagagcgtgcccctggaggagagcctgcccacttgccagcggggtgatgccttccctgtgggcgaggtgaagatgctggagaagcagacgaacccacccgactacctgacggaggccgagctcatcacgctcatggagaagcatggcatcggcacggatgccagcatccctgtgcatatcaacaacatctgccagcgcaactatgtcacggtggagagcgggcgccggctcaagcccaccaacctcggcatcgtcctggtgcacggctactataagattgatgcagagctggtgctccccaccatccgcagtgcagtggagaagcagctgaacctgatcgcccagggcaaggccgactaccgccaggtcctgggccacaccctggacgtgttcaagaggaagttccactactttgtcgactccattgctggcatggatgagttgatggaggtgtctttctcgcccctggcggccacaggcaagcccctctcacgctgtgggaagtgccaccgcttcatgaagtacatccaggccaagccaagccgcctgcactgctcccactgcgatgagacctacacgctcccccagaacggcaccatcaagctctacaaggagctccgctgccctctggatgacttcgagctggtcctgtggtcatcaggctctcggggcaagagctacccgctgtgcccctactgctacaaccacccacccttccgagacatgaagaaaggcatgggctgcaacgagtgtacgcacccctcctgccagcactcgctgagcatgctgggcatcggccagtgcgtggaatgtgagagcggggtgctggtgctggaccccacctcgggccccaagtggaaggtggcctgcaacaagtgcaacgtggtagcgcactgcttcgagaacgcccaccgcgtgcgggtgtccgccgacacctgcagtgtctgtgaggccgccttgcttgatgtggacttcaacaaggccaagtccccactcccgggcgatgagacgcagcacatgggctgcgtcttttgtgaccccgtcttccaggagctggtggagctgaagcatgcggcctcctgccaccccatgcaccgcggtggaccagggagaaggcagggtcgagggcggggccgggccaggaggccccctgggaagcccaaccccagacggcccaaggacaagatgtcagccctggccgcctactttgtatgatgaccctgtcctccctcacccaggctgcagtgccatgcagacacctcatggcacttcaaactattaaaatgcattttatcttatccagaan

SEQ ID NO: 424283 - DNA, 3013 bp, Homo sapiens
  misc_feature (3013)..(3013): n is a, c, g, or t
gactctaactatagctgggtctatatgtagctgaggatataggtgtggtgaatccggcttcgagtggttgccgccccgggaacaaggaccggagctggatccgcggtgcggctgtggctctttagggtgagatctgctgtaccagtctcacaggagtcagcattggtaatagtgctgtgctgcggaagagtggagtctaaactttttcattgccagtgccccgaaactggagtgtgaaggaccgagacaagatgaagactgtgctcatggttgctgaaaagccgtccttggcacagtcaattgccaaaatcctctctagagggagcctgtcctcacacaaagggctgaacggggcctgctcagtccacgagtacactgggacctttgctggccagccagtgcgcttcaagatgacgtctgtctgtggtcacgtgatgaccctggatttcctgggaaaatacaacaaatgggacaaagtggaccccgcagaactgttcagccaagctcccacggagaagaaagaagctaaccccaagctgaacatggtgaagttcctgcaggtggagggcagaggctgcgactacatcgtgctgtggctggactgcgacaaggagggggagaacatctgctttgagaaatgaagccacttattcccagtaaggaagctgcgtggccaggctccggcggcgaccctagtcccactgcacggccttcctagttcttgatgctgttctgcccgtcatgaacaaggcccatggtggcgagaagaccgtgttccgggccaggtttagctccatcacggacacagacatctgtaatgccatggcctgcctaggcgagcctgaccacaacgaggcgctctcagtggatgctcgccaggagctggacctgcgaatcggctgtgcattcaccaggtttcagactaaatatttccaggggaaatacggtgatttagacagctctctcatctcctttgggccgtgtcagactccaaccctgggattctgtgtggagagacatgataaaatccagtccttcaaaccagagacctactgggtgctgcaggccaaggttaacactgacaaagacagatctctccttttggactgggaccgagtaagagtgtttgaccgggagatcgcacagatgtttttaaacatgacaaagctggagaaggaagcccaggtggaggccacaagcaggaaagaaaaggccaagcagaggcccctggccctgaacactgtggagatgctgcgtgtggccagctcttctctgggcatggggccgcagcacgccatgcagacggctgagcggctctacacgcaaggctacatcagctacccacggacagagaccacccactaccctgagaactttgacctgaagggctctctgcggcagcaggccaaccacccctactgggccgacacggtgaagcggttgttagcagaaggtatcaaccgcccgcggaaaggccatgacgccggcgaccatccccccatcacccccatgaagtctgccacagaggccgaattagggggtgacgcgtggcggctctatgagtacatcaccagacacttcatcgccacggtcagccatgactgcaagtacctgcagagcaccatctccttcagaattgggcccgagctcttcacctgctccgggaagaccgtcctctcaccaggcttcacggaggtcatgccctggcagagcgtgcccctggaggagagcctgcccacttgccagcggggtgatgccttccctgtgggcgaggtgaagatgctggagaagcagacgaacccacccgactacctgacggaggccgagctcatcacgctcatggagaagcatggcatcggcacggatgccagcatccctgtgcatatcaacaacatctgccagcgcaactatgtcacggtggagagcgggcgccggctcaagcccaccaacctcggcatcgtcctggtgcacggctactataagattgatgcagagctggtgctccccaccatccgcagtgcagtggagaagcagctgaacctgatcgcccagggcaaggccgactaccgccaggtcctgggccacaccctggacgtgttcaagaggaagttccactactttgtcgactccattgctggcatggatgagttgatggaggtgtctttctcgcccctggcggccacaggcaagcccctctcacgctgtgggaagtgccaccgcttcatgaagtacatccaggccaagccaagccgcctgcactgctcccactgcgatgagacctacacgctcccccagaacggcaccatcaagctctacaaggagctccgctgccctctggatgacttcgagctggtcctgtggtcatcaggctctcggggcaagagctacccgctgtgcccctactgctacaaccacccacccttccgagacatgaagaaaggcatgggctgcaacgagtgtacgcacccctcctgccagcactcgctgagcatgctgggcatcggccagtgcgtggaatgtgagagcggggtgctggtgctggaccccacctcgggccccaagtggaaggtggcctgcaacaagtgcaacgtggtagcgcactgcttcgagaacgcccaccgcgtgcgggtgtccgccgacacctgcagtgtctgtgaggccgccttgcttgatgtggacttcaacaaggccaagtccccactcccgggcgatgagacgcagcacatgggctgcgtcttttgtgaccccgtcttccaggagctggtggagctgaagcatgcggcctcctgccaccccatgcaccgcggtggaccagggagaaggcagggtcgagggcggggccgggccaggaggccccctgggaagcccaaccccagacggcccaaggacaagatgtcagccctggccgcctactttgtatgatgaccctgtcctccctcacccaggctgcagtgccatgcagacacctcatggcacttcaaactattaaaatgcattttatcttatccagaan

SEQ ID NO: 424284 - DNA, 3050 bp, Homo sapiens
  misc_feature (3050)..(3050): n is a, c, g, or t
gactctaactatagctgggtctatatgtagctgaggatataggtgtggtgaatccggcttcgagtggttgccgccccgggaacaaggaccggagctggatccgcggtgcggctgtgggtgagcggcgggctgcgggaccctcgcccggcggctcagaaaggcgggaagcgcacgcatttttctggcttgtttcctgaacgttggccggcggaggacccgcgagctcgggagagcgcccgggccgggctctgcattcttgttgcctcttccctggcgggggtgatactctcccgcggggcttgctgtgggggttcagggaggtggagatgggcccgccatgtgcctgcagggagcaggcgctgtggttaatacttttcttcttcgaaccctcccacagctctttagggtgagatctgctgtaccagtctcacaggagtcagcattggtaatagtgctgtgctgcggaagagtggagtctaaactttttcattgccagtgccccgaaactggagtgtgaaggaccgagacaagatgaagactgtgctcatggttgctgaaaagccgtccttggcacagtcaattgccaaaatcctctctagagggagcctgtcctcacacaaagggctgaacggggcctgctcagtccacgagtacactgggacctttgctggccagccagtgcgcttcaagatgacgtctgtctgtggtcacgtgatgaccctggatttcctgggaaaatacaacaaatgggacaaagtggaccccgcagaactgttcagccaagctcccacggagaagaaagaagctaaccccaagctgaacatggtgaagttcctgcaggtggagggcagaggctgcgactacatcgtgctgtggctggactgcgacaaggagggggagaacatctgctttgaggttcttgatgctgttctgcccgtcatgaacaaggcccatggtggcgagaagaccgtgttccgggccaggtttagctccatcacggacacagacatctgtaatgccatggcctgcctaggcgagcctgaccacaacgaggcgctctcagtggatgctcgccaggagctggacctgcgaatcggctgtgcattcaccaggtttcagactaaatatttccaggggaaatacggtgatttagacagctctctcatctcctttgggccgtgtcagactccaaccctgggattctgtgtggagagacatgataaaatccagtccttcaaaccagagacctactgggtgctgcaggccaaggttaacactgacaaagacagatctctccttttggactgggaccgagtaagagtgtttgaccgggagatcgcacagatgtttttaaacatgacaaagctacatcagctacccacggacagagaccacccactaccctgagaactttgacctgaagggctctctgcggcagcaggccaaccacccctactgggccgacacggtgaagcggttgttagcagaaggtatcaaccgcccgcggaaaggccatgacgccggcgaccatccccccatcacccccatgaagtctgccacagaggccgaattagggggtgacgcgtggcggctctatgagtacatcaccagacacttcatcgccacggtcagccatgactgcaagtacctgcagagcaccatctccttcagaattgggcccgagctcttcacctgctccgggaagaccgtcctctcaccaggcttcacggaggtcatgccctggcagagcgtgcccctggaggagagcctgcccacttgccagcggggtgatgccttccctgtgggcgaggtgaagatgctggagaagcagacgaacccacccgactacctgacggaggccgagctcatcacgctcatggagaagcatggcatcggcacggatgccagcatccctgtgcatatcaacaacatctgccagcgcaactatgtcacggtggagagcgggcgccggctcaagcccaccaacctcggcatcgtcctggtgcacggctactataagattgatgcagagctggtgctccccaccatccgcagtgcagtggagaagcagctgaacctgatcgcccagggcaaggccgactaccgccaggtcctgggccacaccctggacgtgttcaagaggaagttccactactttgtcgactccattgctggcatggatgagttgatggaggtgtctttctcgcccctggcggccacaggcaagcccctctcacgctgtgggaagtgccaccgcttcatgaagtacatccaggccaagccaagccgcctgcactgctcccactgcgatgagacctacacgctcccccagaacggcaccatcaagctctacaaggagctccgctgccctctggatgacttcgagctggtcctgtggtcatcaggctctcggggcaagagctacccgctgtgcccctactgctacaaccacccacccttccgagacatgaagaaaggcatgggctgcaacgagtgtacgcacccctcctgccagcactcgctgagcatgctgggcatcggccagtgcgtggaatgtgagagcggggtgctggtgctggaccccacctcgggccccaagtggaaggtggcctgcaacaagtgcaacgtggtagcgcactgcttcgagaacgcccaccgcgtgcgggtgtccgccgacacctgcagtgtctgtgaggccgccttgcttgatgtggacttcaacaaggccaagtccccactcccgggcgatgagacgcagcacatgggctgcgtcttttgtgaccccgtcttccaggagctggtggagctgaagcatgcggcctcctgccaccccatgcaccgcggtggaccagggagaaggcagggtcgagggcggggccgggccaggaggccccctgggaagcccaaccccagacggcccaaggacaagatgtcagccctggccgcctactttgtatgatgaccctgtcctccctcacccaggctgcagtgccatgcagacacctcatggcacttcaaactattaaaatgcattttatcttatccagaan

SEQ ID NO: 424285 - DNA, 1379 bp, Homo sapiens
gactctaactatagctgggtctatatgtagctgaggatataggtgtggtgaatccggcttcgagtggttgccgccccgggaacaaggaccggagctggatccgcggtgcggctgtgggtgagcggcgggctgcgggaccctcgcccggcggctcagaaaggcgggaagcgcacgcatttttctggcttgtttcctgaacgttggccggcggaggacccgcgagctcgggagagcgcccgggccgggctctgcattcttgttgcctcttccctggcgggggtgatactctcccgcggggcttgctgtgggggttcagggaggtggagatgggcccgccatgtgcctgcagggagcaggcgctgtggttaatacttttcttcttcgaaccctcccacagctctttagggtgagatctgctgtaccagtctcacaggagtcagcattggtaatagtgctgtgctgcggaagagtggagtctaaactttttcattgccagtgccccgaaactggagtgtgaaggaccgagacaagatgaagactgtgctcatggttgctgaaaagccgtccttggcacagtcaattgccaaaatcctctctagagggagcctgtcctcacacaaagggctgaacggggcctgctcagtccacgagtacactgggacctttgctggccagccagtgcgcttcaagatgacgtctgtctgtggtcacgtgatgaccctggatttcctgggaaaatacaacaaatgggacaaagtggaccccgcagaactgttcagccaagctcccacggagaagaaagaagctaaccccaagctgaacatggtgaagttcctgcaggtggagggcagaggctgcgactacatcgtgctgtggctggactgcgacaaggagggggagaacatctgctttgaggttcttgatgctgttctgcccgtcatgaacaaggcccatggtggcgagaagaccgtgttccgggccaggtttagctccatcacggacacagacatctgtaatgccatggcctgcctaggcgagcctgaccacaacgaggcgctctcagtggatgctcgccaggagctggacctgcgaatcggctgtgcattcaccaggtgctggccacacccgcagagtcctgggcacaccctcactctccctcagccagagacctgcctctactggtccccctccggggcccctaggcctcctcgagccaggatgagcaacaggggatttcaccaaccctgaagaaggccaggcacagtggctaacacctgtaatccctgcactttgggagaccaggataggaggattgcttgaggttggcagtttgagaccagcctgggcagcataacaagaccccatctctacaaaaaaaa

SEQ ID NO: 424286 - DNA, 545 bp, Homo sapiens
tcctgagactggctgcctggttttggggcaagtggtggagagggccagatgtcagcttgcgtatctgcccacctgaacaggtacagctgtgagccattacagccagggctatttggctcccagacaaggaccagcttcatctgtcctggttcttcctggcgttgggctcacctggagactttttcttgtgcgttcaccctttatcctttttcctgcaggttaacactgacaaagacagatctctccttttggactgggaccgagtaagagtgtttgaccgggagatcgcacagatgtttttaaacatgacaaagctggagaaggaagcccaggtgtgcctgctccacccacatctatcacagttgccttgggtgagggtggcccttggatgcctcccgctggaggaacagcctgtgatcctagtccacgtctttctccccctttctgaaacacagacatctttttggaaagctgaatggttactccctcatatactcctaagatatttctgcccagtgcaatagtcacagtgtactgcatgcccg

SEQ ID NO: 424287 - DNA, 458 bp, Homo sapiens
gtacacacagagattttagaactgccttttctgcacgcgtggagcaagagccagagactcatgctccttgcctggcagtgtgtcacaggttctgcatgacagattacatactttgtattatgagaggagtgggggtgggtgccaagtcggtggccccagtgaccctcacgccacctgcctggcattgccgcaggccaagccaagccgcctgcactgctcccactgcgatgagacctacacgctcccccagaacggcaccatcaagctctacaaggagctccgctgccctctggatgacttcgagctggtcctgtggtcatcaggctctcggggcaagagctacccgctgtgcccctactgctacaaccacccacccttccgagacatgaagaaaggtgagtgcagccactccctcctgtccacaggtagctgcagtctcttttcagtgccaacccctg

SEQ ID NO: 424288 - DNA, 2977 bp, Homo sapiens
  misc_feature (2977)..(2977): n is a, c, g, or t
gactctaactatagctgggtctatatgtagctgaggatataggtgtggtgaatccggcttcgagtggttgccgccccgggaacaaggaccggagctggatccgcggtgcggctgtgggagtcagcattggtaatagtgctgtgctgcggaagagtggagtctaaactttttcattgccagtgccccgaaactggagtgtgaaggaccgagacaagatgaagactgtgctcatggttgctgaaaagccgtccttggcacagtcaattgccaaaatcctctctagagggagcctgtcctcacacaaagggctgaacggggcctgctcagtccacgagtacactgggacctttgctggccagccagtgcgcttcaagatgacgtctgtctgtggtcacgtgatgaccctggatttcctgggaaaatacaacaaatgggacaaagtggaccccgcagaactgttcagccaagctcccacggagaagaaagaagctaaccccaagctgaacatggtgaagttcctgcaggtggagggcagaggctgcgactacatcgtgctgtggctggactgcgacaaggagggggagaacatctgctttgagaaatgaagccacttattcccagtaaggaagctgcgtggccaggctccggcggcgaccctagtcccactgcacggccttcctagttcttgatgctgttctgcccgtcatgaacaaggcccatggtggcgagaagaccgtgttccgggccaggtttagctccatcacggacacagacatctgtaatgccatggcctgcctaggcgagcctgaccacaacgaggcgctctcagtggatgctcgccaggagctggacctgcgaatcggctgtgcattcaccaggtttcagactaaatatttccaggggaaatacggtgatttagacagctctctcatctcctttgggccgtgtcagactccaaccctgggattctgtgtggagagacatgataaaatccagtccttcaaaccagagacctactgggtgctgcaggccaaggttaacactgacaaagacagatctctccttttggactgggaccgagtaagagtgtttgaccgggagatcgcacagatgtttttaaacatgacaaagctggagaaggaagcccaggtggaggccacaagcaggaaagaaaaggccaagcagaggcccctggccctgaacactgtggagatgctgcgtgtggccagctcttctctgggcatggggccgcagcacgccatgcagacggctgagcggctctacacgcaaggctacatcagctacccacggacagagaccacccactaccctgagaactttgacctgaagggctctctgcggcagcaggccaaccacccctactgggccgacacggtgaagcggttgttagcagaaggtatcaaccgcccgcggaaaggccatgacgccggcgaccatccccccatcacccccatgaagtctgccacagaggccgaattagggggtgacgcgtggcggctctatgagtacatcaccagacacttcatcgccacggtcagccatgactgcaagtacctgcagagcaccatctccttcagaattgggcccgagctcttcacctgctccgggaagaccgtcctctcaccaggcttcacggaggtcatgccctggcagagcgtgcccctggaggagagcctgcccacttgccagcggggtgatgccttccctgtgggcgaggtgaagatgctggagaagcagacgaacccacccgactacctgacggaggccgagctcatcacgctcatggagaagcatggcatcggcacggatgccagcatccctgtgcatatcaacaacatctgccagcgcaactatgtcacggtggagagcgggcgccggctcaagcccaccaacctcggcatcgtcctggtgcacggctactataagattgatgcagagctggtgctccccaccatccgcagtgcagtggagaagcagctgaacctgatcgcccagggcaaggccgactaccgccaggtcctgggccacaccctggacgtgttcaagaggaagttccactactttgtcgactccattgctggcatggatgagttgatggaggtgtctttctcgcccctggcggccacaggcaagcccctctcacgctgtgggaagtgccaccgcttcatgaagtacatccaggccaagccaagccgcctgcactgctcccactgcgatgagacctacacgctcccccagaacggcaccatcaagctctacaaggagctccgctgccctctggatgacttcgagctggtcctgtggtcatcaggctctcggggcaagagctacccgctgtgcccctactgctacaaccacccacccttccgagacatgaagaaaggcatgggctgcaacgagtgtacgcacccctcctgccagcactcgctgagcatgctgggcatcggccagtgcgtggaatgtgagagcggggtgctggtgctggaccccacctcgggccccaagtggaaggtggcctgcaacaagtgcaacgtggtagcgcactgcttcgagaacgcccaccgcgtgcgggtgtccgccgacacctgcagtgtctgtgaggccgccttgcttgatgtggacttcaacaaggccaagtccccactcccgggcgatgagacgcagcacatgggctgcgtcttttgtgaccccgtcttccaggagctggtggagctgaagcatgcggcctcctgccaccccatgcaccgcggtggaccagggagaaggcagggtcgagggcggggccgggccaggaggccccctgggaagcccaaccccagacggcccaaggacaagatgtcagccctggccgcctactttgtatgatgaccctgtcctccctcacccaggctgcagtgccatgcagacacctcatggcacttcaaactattaaaatgcattttatcttatccagaan

SEQ ID NO: 424289 - DNA, 2416 bp, Homo sapiens
  misc_feature (2416)..(2416): n is a, c, g, or t
gactctaactatagctgggtctatatgtagctgaggatataggtgtggtgaatccggcttcgagtggttgccgccccgggaacaaggaccggagctggatccgcggtgcggctgtggctctttagggtgagatctgctgtaccagtctcacaggagtcagcattggtaatagtgctgtgctgcggaagagtggagtctaaactttttcattgccagtgccccgaaactggagtgtgaaggaccgagacaagatgaagactgtgctcatggttgctgaaaagccgtccttggcacagtcaattgccaaaatcctctctagagggagcctgtcctcacacaaagggctgaacggggcctgctcagtccacgagtacactgggacctttgctggccagccagtgcgcttcaagatgacgtctgtctgtggtcacgtgatgaccctggatttcctgggaaaatacaacaaatgggacaaagtggaccccgcagaactgttcagccaagctcccacggagaagaaagaagctaaccccaagctgaacatggtgaagttcctgcaggtggagggcagaggctgcgactacatcgtgctgtggctggactgcgacaaggagggggagaacatctgctttgaggttaacactgacaaagacagatctctccttttggactgggaccgagtaagagtgtttgaccgggagatcgcacagatgtttttaaacatgacaaagctacatcagctacccacggacagagaccacccactaccctgagaactttgacctgaagggctctctgcggcagcaggccaaccacccctactgggccgacacggtgaagcggttgttagcagaaggtatcaaccgcccgcggaaaggccatgacgccggcgaccatccccccatcacccccatgaagtctgccacagaggccgaattagggggtgacgcgtggcggctctatgagtacatcaccagacacttcatcgccacggtcagccatgactgcaagtacctgcagagcaccatctccttcagaattgggcccgagctcttcacctgctccgggaagaccgtcctctcaccaggcttcacggaggtcatgccctggcagagcgtgcccctggaggagagcctgcccacttgccagcggggtgatgccttccctgtgggcgaggtgaagatgctggagaagcagacgaacccacccgactacctgacggaggccgagctcatcacgctcatggagaagcatggcatcggcacggatgccagcatccctgtgcatatcaacaacatctgccagcgcaactatgtcacggtggagagcgggcgccggctcaagcccaccaacctcggcatcgtcctggtgcacggctactataagattgatgcagagctggtgctccccaccatccgcagtgcagtggagaagcagctgaacctgatcgcccagggcaaggccgactaccgccaggtcctgggccacaccctggacgtgttcaagaggaagttccactactttgtcgactccattgctggcatggatgagttgatggaggtgtctttctcgcccctggcggccacaggcaagcccctctcacgctgtgggaagtgccaccgcttcatgaagtacatccaggccaagccaagccgcctgcactgctcccactgcgatgagacctacacgctcccccagaacggcaccatcaagctctacaaggagctccgctgccctctggatgacttcgagctggtcctgtggtcatcaggctctcggggcaagagctacccgctgtgcccctactgctacaaccacccacccttccgagacatgaagaaaggcatgggctgcaacgagtgtacgcacccctcctgccagcactcgctgagcatgctgggcatcggccagtgcgtggaatgtgagagcggggtgctggtgctggaccccacctcgggccccaagtggaaggtggcctgcaacaagtgcaacgtggtagcgcactgcttcgagaacgcccaccgcgtgcgggtgtccgccgacacctgcagtgtctgtgaggccgccttgcttgatgtggacttcaacaaggccaagtccccactcccgggcgatgagacgcagcacatgggctgcgtcttttgtgaccccgtcttccaggagctggtggagctgaagcatgcggcctcctgccaccccatgcaccgcggtggaccagggagaaggcagggtcgagggcggggccgggccaggaggccccctgggaagcccaaccccagacggcccaaggacaagatgtcagccctggccgcctactttgtatgatgaccctgtcctccctcacccaggctgcagtgccatgcagacacctcatggcacttcaaactattaaaatgcattttatcttatccagaan

SEQ ID NO: 424290 - DNA, 2554 bp, Homo sapiens
  misc_feature (2554)..(2554): n is a, c, g, or t
gactctaactatagctgggtctatatgtagctgaggatataggtgtggtgaatccggcttcgagtggttgccgccccgggaacaaggaccggagctggatccgcggtgcggctgtgggtgagcggcgggctgcgggaccctcgcccggcggctcagaaaggcgggaagcgcacgcatttttctggcttgtttcctgaacgttggccggcggaggacccgcgagctcgggagagcgcccgggccgggctctgcattcttgttgcctcttccctggcgggggtgatactctcccgcggggcttgctgtgggggttcagggaggtggagatgggcccgccatgtgcctgcagggagcaggcgctgtggttaatacttttcttcttcgaaccctcccacagctctttagggtgagatctgctgtaccagtctcacaggagtcagcattggtaatagtgctgtgctgcggaagagtggagtctaaactttttcattgccagtgccccgaaactggagtgtgaaggaccgagacaagatgaagactgtgctcatggttgctgaaaagccgtccttggcacagtcaattgccaaaatcctctctagagggagcctgtcctcacacaaagggctgaacggggcctgctcagtccacgagtacactgggacctttgctggccagccagtgcgcttcaagatgacgtctgtctgtggtcacgtgatgaccctggatttcctgggaaaatacaacaaatgggacaaagtggaccccgcagaactgttcagccaagctcccacggagaagaaagaagctaaccccaagctgaacatggtgaagttcctgcaggtggagggcagaggctgcgactacatcgtgctgtggctggactgcgacaaggagggggagaacatctgctttgagaaatgaagccacttattcccagtaaggaagctgcgtggccaggctccggcggcgaccctagtcccactgcacggccttcctagttcttgatgctgttctgcccgtcatgaacaaggcccatggtggcgagaagaccgtgttccgggccaggtttagctccatcacggacacagacatctgtaatgccatggcctgcctaggcgagcctgaccacaacgaggcgctctcagtggatgctcgccaggagctggacctgcgaatcggctgtgcattcaccaggtttcagactaaatatttccaggggaaatacggtgatttagacagctctctcatctcctttgggccgtgtcagactccaaccctgggattctgtgtggagagacatgataaaatccagtccttcaaaccagagacctactgggtgctgcaggccaaggttaacactgacaaagacagatctctccttttggactgggaccgagtaagagtgtttgaccgggagatcgcacagatgtttttaaacatgacaaagctggagaaggaagcccaggtggaggccacaagcaggaaagaaaaggccaagcagaggcccctggccctgaacactgtggagatgctgcgtgtggccagctcttctctgggcatggggccgcagcacgccatgcagacggctgagcggctctacacgcaaggctacatcagctacccacggacagagaccacccactaccctgagaactttgacctgaagggctctctgcggcagcaggccaaccacccctactgggccgacacggtgaagcggttgttagcagaaggtatcaaccgcccgcggaaaggccatgacgccggcgaccatccccccatcacccccatgaagtctgccacagaggccgaattagggggtgacgcgtggcggctctatgagtacatcaccagacacttcatcgccacggtcagccatgactgcaagtacctgcagagcaccatctccttcagaattgggcccgagctcttcacctgctccgggaagaccgtcctctcaccaggcttcacggaggtcatgccctggcagagcgtgcccctggaggagagcctgcccacttgccagcggggtgatgccttccctgtgggcgaggtgaagatgctggagaagcagacgaacccacccgactacctgacggaggccgagctcatcacgctcatggagaagcatggcatcggcacggatgccagcatccctgtgcatatcaacaacatctgccagcgcaactatgtcacggtggagagcgggcgccggctcaagcccaccaacctcggcatcgtcctggtgcacggctactataagattgatgcagagctggtgctccccaccatccgcagtgcagtggagaagcagctgaacctgatcgcccagggcaaggccgactaccgccaggtcctgggccacaccctggacgtgttcaagaggaagttccactactttgtcgactccattgctggcatggatgagttgatggaggtgtctttctcgcctactttgtatgatgaccctgtcctccctcacccaggctgcagtgccatgcagacacctcatggcacttcaaactattaaaatgcattttatcttatccagaan

SEQ ID NO: 424291 - DNA, 1026 bp, Homo sapiens
gcggctggacccggaaataggggttgtcggtagccgccccgggaacaaggaccggagctggatccgcggtgcggctgtgggagtcagcattggtaatagtgctgtgctgcggaagagtggagtctaaactttttcattgccagtgccccgaaactggagtgtgaaggaccgagacaagatgaagactgtgctcatggttgctgaaaagccgtccttggcacagtcaattgccaaaatcctctctagagggagcctgtcctcacacaaagggctgaacggggcctgctcagtccacgagtacactgggacctttgctggccagccagtgcgcttcaagatgacgtctgtctgtggtcacgtgatgaccctggatttcctgggaaaatacaacaaatgggacaaagtggaccccgcagaactgttcagccaagctcccacggagaagaaagaagctaaccccaagctgaacatggtgaagttcctgcaggtggagggcagaggctgcgactacatcgtgctgtggctggactgcgacaaggagggggagaacatctgctttgaggttcttgatgctgttctgcccgtcatgaacaaggcccatggtggcgagaagaccgtgttccgggccaggtttagctccatcacggacacagacatctgtaatgccatggcctgcctaggcgagcctgaccacaacgaggcgctctcagtggatgctcgccaggagctggacctgcgaatcggctgtgcattcaccaggtgctggccacacccgcagagtcctgggcacaccctcactctccctcagccagagacctgcctctactggtccccctccggggcccctaggcctcctcgagccaggatgagcaacaggggatttcaccaaccctgaagaaggccaggcacagtggctaacacctgtaatccctgcactttgggagaccaggataggaggattgcttgaggttggcagtttgagaccagcctgggcagcataacaagaccccatctctacaaaaaaaa

SEQ ID NO: 424292 - DNA, 524 bp, Homo sapiens
tttttttttttaagtgtttctgcttaatgatattttatttaatatactcatggcaacagcactataactcatgattgaacaaagtttatctaacacatatgttttctcaataagatacatcacagccttcttccatttaagaacactagaaagcacttcagtactacacttgggggccatttaaacagtgaaatcaccaacaaaaagcacaaacaggttaaaaaaaaaagcactaaatcaaccacaaaaagacaattgtttatagtgtgagaactgaagtaagaagacaatgttgccttgttcagcctcaattgggaacgagtcatcaggtgacttaaattttgaaccactctgcacatgtccacaaatgaccatgcaagtcctgagtactgattttggagttacaaataaattttagtgagtaggtgaatttgtaaatacagaatccttgaatgaggctcaactgaatagatatacagaagtccctcgctctggggttttgctttccatgatttcagttacct

SEQ ID NO: 424293 - DNA, 763 bp, Homo sapiens
cagctaacagtgagtaccccccactaaccctttggccaacttgagagctgatgctggccaaggattgagttgacagaggggagcgctttgctgatgagattggcgggagcaggcggatgtgggagcccagagccttgtatcagtagcacccagcaagggggcagagggcctccaccactttcccgtttgggaactgttctggaggggcagatgttttgaagctttgaattgctagggacctcggagaagctgctctggtagctgagagaaagagggaggaggtgacagatgtgatggcctctgtgcatcctctgtcacttccgcgcctcctctctcccctcgccatgctctcctcttccttcccagtgagcagctccggctcctacagcactcccattcgcaagtccctgaggcgggcagcaccacctttcagggcataattgaggccaaccggaggtggctggaacgtgtcaagaatgaccccaggttacctctcttctcttcaacacccaagccaaaagctactttgagcctcctgcagctgggccttgatgagcacaacagagtgaaggtgtatcgcttctgaggccctgagcaggggcttggggcagcccagcctctcctccacccagaccaagtgcctgaggagctgcctgccttcttccatctgagaaagcaccctccttccccctttgacttgcaggagccaccagggaccagggggttgagtggaacagtaaagccacacattctgtgactatat

SEQ ID NO: 424294 - DNA, 5810 bp, Homo sapiens
aaagttttaatctcctgacacttgtgatgtcttcaaaggaaccactgatgacactgtgggtgctatcttccatatttttttatgcttatgcagatgtaaatgtatatacctacatatttatgcatatatgcacagcccattctttttaatttttacagaaatgagatcataatgttattgttctaacatgtgtttttttttttttttttgatacgtggtcttgctctgtcactcaggctgcagtgcagtggcatgatcatggctcgctgcggccttgacctcctgtgctcaagtgacccttccacatcagcctctgtagatgagactacaggtgtttgagcccagatgagtcatggctggacgacccctccgcataggagatcagctggttctggaagaagattatgatgagacctacattcctagtgagcaagaaattcttgaatttgcccgggagattggtattgatcccatcaaggaaccagaactgatgtggctggcgcgagagggcatcgtggccccactgcctggagagtggaaaccatgccaggacatcacaggtgacatttactatttcaacttcgccaacgggcagtctatgtgggaccatccatgtgacgaacactatcggagcttggtgatccaagagcgggcaaagctgtcaacttctggggccattaagaagaagaaaaaaaaaaaggaaaagaaagacaagaaggacagagacccccccaaaagttcgctggccttgggttcctcattagccccagttcatgttcctcttgggggcctggctcctttacgaggtcttgtggataccccaccctctgctcttcgtggatctcaaagcgtgagcctggggagctcagtggagtctggacgtcagcttggagaactcatgctgccttcacagggtctcaagacctctgcttatacaaagggtctcttgggctccatatatgaggacaagactgctctcagcctcttgggtttaggagaagaaaccaatgaggaggatgaggaggaaagtgacaaccagagtgtccacagctcaagtgagcctcttaggaacctacacctggacattggggcactggggggtgactttgagtatgaggagtctctgagaacaagccagccagaggagaagaaggatgtttctctggattcagatgctgccggtccccctactccctgcaagccctccagcccaggtgcagacagcagtctgagcagtgctgttggcaaagggcgacagggaagtggagcaagacctggtcttccagaaaaagaggaaaatgagaagagtgaacctaagatttgcaggaatctggtgacccccaaggcagaccctacaggcagtgagcctgccaaagcctctgaaaaggaagcaccagaggacacagtagatgcaggagaggagggttccaggagggaagaggcagccaaggagccaaagaagaaggcttctgctctggaagagggcagttcagacgccagccaagaactggaaattagtgaacacatgaaggaaccacagctctcagactccatagcttctgaccccaagtccttccatggcctggacttcggttttcgcagccggatctcggagcacctgctggatgttgatgtgctttccccagtcctgggtggagcttgtcggcaggcccagcaaccactgggaatagaagacaaggatgacagccagtccagccaagatgagctgcagagcaagcagtccaaaggcctggaggagaggtaccataggttatctcctccacttccacacgaggagcgggcccagagtccccctcgcagcctggccactgaagaagagcccccccagggccccgaggggcagcccgagtggaaggaggcagaggagcttggggaggactctgcagccagcctcagcctgcagctgtccctccagagggagcaggccccaagcccacctgctgcctgtgagaagggcaaggagcagcattcccaggccgaggagctgggccctgggcaggaagaggcagaggatcctgaggagaaggtggcggtcagccccaccccgccagtctctccagaggtgcgatccacagagcctgtggctcccccagagcagctctcagaggctgcactaaaggccatggaagaggcagtggcccaagtactcgagcaagaccagaggcacctgctggaatccaagcaagagaagatgcagcaactgcgggagaagctgtgccaagaggaggaagaggagatcctccggcttcaccagcagaaagagcaatctctcagttccttgagggagcggctgcagaaagccattgaggaggaggaggcccggatgagagaggaggaaagccagaggctatcctggctccgagctcaggtccagtccagcacacaagcagatgaggaccaaatcagggctgagcaagaggcttccctgcagaaactgagagaagagttggagtctcaacagaaggctgagagggccagcttggaacagaaaaataggcaaatgctggagcagctcaaggaagagatagaggcttcggagaagagcgagcaggctgccctgaatgctgcaaaggagaaggctctgcagcagctgagggagcagctggaaggggagaggaaagaagctgtggcaacgctggagaaggagcacagtgctgagctggagcggctctgctcctcattggaggccaagcaccgggaggtggtctccagcctccagaagaagatacaggaagctcaacagaaagaggaggcccagctgcagaagtgccttgggcaagtggagcacagagttcaccagaagtcttatcacgtggctgggtatgagcacgagctcagcagtctcctgcgagagaagcgccaggaagtggaaggggagcatgagaggaggttggacaagatgaaggaggagcaccagcaagtgatggctaaggccagagagcagtatgaagctgaggagaggaagcagcgggctgagcttctggggcacctgaccggagagctggagcgcctgcagagggcccatgaacgagaactggagactgtgaggcaggagcaacacaagcgtcttgaggacttgcggcgccggcacagggagcaggaaaggaagctccaggatttagagttggaccttgaaaccagagctaaagatgtcaaggccagattggctctgctggaggtccaggaggagaccgcccggagggagaagcagcagctgcttgatgtgcagaggcaggttgctctgaagagtgaggaagccacagccacccatcagcagctggaggaggcacagaaggagcacacccacctgttgcagtcaaaccagcagctccgagaaattcttgatgagctgcaggcccgcaagctgaagctggagtcccaagtggatctgctgcaggctcagagccagcaactgcagaaacacttcagcagcctggaggctgaagctcaaaagaagcagcacctgttgagagaagtgacagttgaggaaaataatgcttccccacattttgagccagatctccatattgaggacctgaggaaatcccttggaacaaaccagaccaaagaggtgtcttcttctctctcccagagcaaggaggacttatacttggacagcctgtcctcccacaatgtctggcacctcctctctgctgagggggtagccctccgtagtgccaaggagttccttgtgcagcagacacgctccatgcggaggcggcagacagctctgaaagctgcccagcagcattggcgccatgagctggccagtgcgcaggaggtggccaaagacccaccaggcatcaaggccctggaagatatgcgcaagaacctggagaaggagaccaggcacctggatgagatgaagtcggccatgcggaaaggccacaacctgctgaagaagaaagaggagaagctgaatcagttggagtcctctctttgggaagaggcctcagatgagggcactctgggaggatcccccaccaagaaggcagtaaccttcgacctcagtgacatggacagcctgagcagtgaaagttctgaatctttttccccgcctcacctcgactcaaccccgagtctcacctcccgcaagatccacgggcttagccactccctccggcagatcagcagccagctgagcagtgtcctcagcatcctggacagcctcaaccctcagtcgccgccgccgctcctcgcctccatgccagcccagctccctccccgggaccctaagagcacccccacccccacctactatggctccctggccaggttctcagccttatcatctgctacacccacgtccacccaatgggcctgggattcagggcaggggcccaggctcccctcctctgtggctcaaacggtggacgacttcctgttggagaagtggcgcaagtattttccatctggcatcccgctgctcagcaacagccccaccccgctggagagcaggctgggttacatgtctgccagtgagcagctccggctcctacagcactcccattcgcaagtccctgaggcgggcagcaccacctttcagggcataattgaggccaaccggaggtggctggaacgtgtcaagaatgaccccaggttacctctcttctcttcaacacccaagccaaaagctactttgagcctcctgcagctgggccttgatgagcacaacagagtgaaggtgtatcgcttctgaggccctgagcaggggcttggggcagcccagcctctcctccacccagaccaagtgcctgaggagctgcctgccttcttccatctgagaaagcaccctccttccccctttgacttgcaggagccaccagggaccagggggttgagtggaacagtaaagccacacattctgtgactatataacctatctcaggctaaaatgtgtggacttgtacgagctcttgtcattgacatggcaagctgatggcgtgcggtggctgcggggtatcagggccgggagccctttgggaggaagggaggcgttagaggagctgccttcggaggctcagggagtccctttggagctggttgtttccttggccctgcagcgcactgctcggggctcccaaggaggttgtgtgtatggttcttaattcatcaggacaaagacccccagcatgtgtgtaccctgggacccgatttctctgggcccacatctatctccaatacctcagcctcagatcagaccctttcttttttgtctttcttctcttaatttttaaatgcctcttttcttgagcattccatctctctttttgaccctctcaggactgggcttagctgtccagagccctgccggagggtgctgggggctgtccctctgcaggcactgtgttttcctcaggggctgtcctcagaacacccctcctgctccctggggctcctcagggagccatttcagctggagtctcaggtctcaaaaacaacttctccaggaggccaaaaaaagactgggttggcttctggtcctcatgatggcttttatcctcctgggacactttgggtatattcatgggcattgtttccatctgtcttttctacctgtgccacccctgccctgattccacggctgcctcaggcaggcaggcaaggagctaggccggtgcccggccctggcagcaaggggtctttgtgcagttggagatgctgccgttgtggcagagcgtcctgcagccccgcttccatcagcaggctctggggtgggggctttgcaggggatgctctctgatgtttgttccgttgtttaaataaaatgcacttatttttgttttttt

SEQ ID NO: 424295 - DNA, 5036 bp, Homo sapiens
atgaggtctctctgttgaccagactggtttcaaactcccggtctcaagcagtccttccatcttggtctcccaaagtgctggaattacaggagtctctgagaacaagccagccagaggagaagaaggatgtttctctggattcagatgctgccggtccccctactccctgcaagccctccagcccaggtgcagacagcagtctgagcagtgctgttggcaaagggcgacagggaagtggagcaagacctggtcttccagaaaaagaggaaaatgagaagagtgaacctaagatttgcaggaatctggtgacccccaaggcagaccctacaggcagtgagcctgccaaagcctctgaaaaggaagcaccagaggacacagtagatgcaggagaggagggttccaggagggaagaggcagccaaggagccaaagaagaaggcttctgctctggaagagggcagttcagacgccagccaagaactggaaattagtgaacacatgaaggaaccacagctctcagactccatagcttctgaccccaagtccttccatggcctggacttcggttttcgcagccggatctcggagcacctgctggatgttgatgtgctttccccagtcctgggtggagcttgtcggcaggcccagcaaccactgggaatagaagacaaggatgacagccagtccagccaagatgagctgcagagcaagcagtccaaaggcctggaggagaggtaccataggttatctcctccacttccacacgaggagcgggcccagagtccccctcgcagcctggccactgaagaagagcccccccagggccccgaggggcagcccgagtggaaggaggcagaggagcttggggaggactctgcagccagcctcagcctgcagctgtccctccagagggagcaggccccaagcccacctgctgcctgtgagaagggcaaggagcagcattcccaggccgaggagctgggccctgggcaggaagaggcagaggatcctgaggagaaggtggcggtcagccccaccccgccagtctctccagaggtgcgatccacagagcctgtggctcccccagagcagctctcagaggctgcactaaaggccatggaagaggcagtggcccaagtactcgagcaagaccagaggcacctgctggaatccaagcaagagaagatgcagcaactgcgggagaagctgtgccaagaggaggaagaggagatcctccggcttcaccagcagaaagagcaatctctcagttccttgagggagcggctgcagaaagccattgaggaggaggaggcccggatgagagaggaggaaagccagaggctatcctggctccgagctcaggtccagtccagcacacaagcagatgaggaccaaatcagggctgagcaagaggcttccctgcagaaactgagagaagagttggagtctcaacagaaggctgagagggccagcttggaacagaaaaataggcaaatgctggagcagctcaaggaagagatagaggcttcggagaagagcgagcaggctgccctgaatgctgcaaaggagaaggctctgcagcagctgagggagcagctggaaggggagaggaaagaagctgtggcaacgctggagaaggagcacagtgctgagctggagcggctctgctcctcattggaggccaagcaccgggaggtggtctccagcctccagaagaagatacaggaagctcaacagaaagaggaggcccagctgcagaagtgccttgggcaagtggagcacagagttcaccagaagtcttatcacgtggctgggtatgagcacgagctcagcagtctcctgcgagagaagcgccaggaagtggaaggggagcatgagaggaggttggacaagatgaaggaggagcaccagcaagtgatggctaaggccagagagcagtatgaagctgaggagaggaagcagcgggctgagcttctggggcacctgaccggagagctggagcgcctgcagagggcccatgaacgagaactggagactgtgaggcaggagcaacacaagcgtcttgaggacttgcggcgccggcacagggagcaggaaaggaagctccaggatttagagttggaccttgaaaccagagctaaagatgtcaaggccagattggctctgctggaggtccaggaggagaccgcccggagggagaagcagcagctgcttgatgtgcagaggcaggttgctctgaagagtgaggaagccacagccacccatcagcagctggaggaggcacagaaggagcacacccacctgttgcagtcaaaccagcagctccgagaaattcttgatgagctgcaggcccgcaagctgaagctggagtcccaagtggatctgctgcaggctcagagccagcaactgcagaaacacttcagcagcctggaggctgaagctcaaaagaagcagcacctgttgagagaagtgacagttgaggaaaataatgcttccccacattttgagccagatctccatattgaggacctgaggaaatcccttggaacaaaccagaccaaagaggtgtcttcttctctctcccagagcaaggaggacttatacttggacagcctgtcctcccacaatgtctggcacctcctctctgctgagggggtagccctccgtagtgccaaggagttccttgtgcagcagacacgctccatgcggaggcggcagacagctctgaaagctgcccagcagcattggcgccatgagctggccagtgcgcaggaggtggccaaagacccaccaggcatcaaggccctggaagatatgcgcaagaacctggagaaggagaccaggcacctggatgagatgaagtcggccatgcggaaaggccacaacctgctgaagaagaaagaggagaagctgaatcagttggagtcctctctttgggaagaggcatttgggacatatgctgagccttgcctccctcccaccctgctgtgaggcagcctgtgtgatttgcttcgcccagggtacctggtggaactctgggccccagaggagtctactcaccaagtcctcagttcccacacatcacaagggcgacagcctacataccaccttgaatttgtagcaacaaaattgctaggagaacaaatggagatggccatatttcatggatttgcgcctcagatgagggcactctgggaggatcccccaccaagaaggcagtaaccttcgacctcagtgacatggacagcctgagcagtgaaagttctgaatctttttccccgcctcaccgtgagtggtggcggcagcagaggatcgactcaaccccgagtctcacctcccgcaagatccacgggcttagccactccctccggcagatcagcagccagctgagcagtgtcctcagcatcctggacagcctcaaccctcagtcgccgccgccgctcctcgcctccatgccagcccagctccctccccgggaccctaagagcacccccacccccacctactatggctccctggccaggttctcagccttatcatctgctacacccacgtccacccaatgggcctgggattcagggcaggggcccaggctcccctcctctgtggctcaaacggtggacgacttcctgttggagaagtggcgcaagtattttccatctggcatcccgctgctcagcaacagccccaccccgctggagagcaggctgggttacatgtctgccagtgagcagctccggctcctacagcactcccattcgcaagtccctgaggcgggcagcaccacctttcagggcataattgaggccaaccggaggtggctggaacgtgtcaagaatgaccccaggttacctctcttctcttcaacacccaagccaaaagctactttgagcctcctgcagctgggccttgatgagcacaacagagtgaaggtgtatcgcttctgaggccctgagcaggggcttggggcagcccagcctctcctccacccagaccaagtgcctgaggagctgcctgccttcttccatctgagaaagcaccctccttccccctttgacttgcaggagccaccagggaccagggggttgagtggaacagtaaagccacacattctgtgactatataacctatctcaggctaaaatgtgtggacttgtacgagctcttgtcattgacatggcaagctgatggcgtgcggtggctgcggggtatcagggccgggagccctttgggaggaagggaggcgttagaggagctgccttcggaggctcagggagtccctttggagctggttgtttccttggccctgcagcgcactgctcggggctcccaaggaggttgtgtgtatggttcttaattcatcaggacaaagacccccagcatgtgtgtaccctgggacccgatttctctgggcccacatctatctccaatacctcagcctcagatcagaccctttcttttttgtctttcttctcttaatttttaaatgcctcttttcttgagcattccatctctctttttgaccctctcaggactgggcttagctgtccagagccctgccggagggtgctgggggctgtccctctgcaggcactgtgttttcctcaggggctgtcctcagaacacccctcctgctccctggggctcctcagggagccatttcagctggagtctcaggtctcaaaaacaacttctccaggaggccaaaaaaagactgggttggcttctggtcctcatgatggcttttatcctcctgggacactttgggtatattcatgggcattgtttccatctgtcttttctacctgtgccacccctgccctgattccacggctgcctcaggcaggcaggcaaggagctaggccggtgcccggccctggcagcaaggggtctttgtgcagttggagatgctgccgttgtggcagagcgtcctgcagccccgcttccatcagcaggctctggggtgggggctttgcaggggatgctctctgatgtttgttccgttgtttaaataaaatgcacttatttttgttttttt

SEQ ID NO: 424296 - DNA, 1969 bp, Homo sapiens
acgcgtccggcagtatgaagctgaggagaggaagcagcgggctgagcttctggggcacctgaccggagagctggagcgcctgcagagggcccatgaacgagaactggagactgtgaggcaggagcaacacaagcgtcttgaggacttgcggcgccggcacagggagcaggaaaggaagctccaggatttagagttggaccttgaaaccagagctaaagatgtcaaggccagattggctctgctggaggtccaggaggagaccgcccggagggagaagcagcagctgcttgatgtgcagaggcaggttgctctgaagagtgaggaagccacagccacccatcagcagctggaggaggcacagaaggagcacacccacctgttgcagtcaaaccagcagctccgagaaattcttgatgagctgcaggcccgcaagctgaagctggagtcccaagtggatctgctgcaggctcagagccagcaactgcagaaacacttcagcagcctggaggctgaagctcaaaagaagcagcacctgttgagagaagtgacagttgaggaaaataatgcttccccacattttgagccagatctccatattgaggacctgaggaaatcccttggaacaaaccagaccaaagaggtgtcttcttctctctcccagagcaaggaggacttatacttggacagcctgtcctcccacaatgtctggcacctcctctctgctgagggggtagccctccgtagtgccaaggagttccttgtgcagcagacacgctccatgcggaggcggcagacagctctgaaagctgcccagcagcattggcgccatgagctggccagtgcgcaggaggtggccaaagacccaccaggcatcaaggccctggaagatatgcgcaagaacctggagaaggagaccaggcacctggatgagatgaagtcggccatgcggaaaggccacaacctgctgaagaagaaagaggagaagctgaatcagttggagtcctctctttgggaagaggcctcagatgagggcactctgggaggatcccccaccaagaaggcagtaaccttcgacctcagtgacatggacagcctgagcagtgaaagttctgaatctttttccccgcctcaccgtgagtggtggcggcagcagaggatcgactcaaccccgagtctcacctcccgcaagatccacgggcttagccactccctccggcagatcagcagccagctgagcagtgtcctcagcatcctggacagcctcaaccctcagtcgccgccgccgctcctcgcctccatgccagcccagctccctccccgggaccctaagagcacccccacccccacctactatggctccctggccaggttctcagccttatcatctgctacacccacgtccacccaatgggcctgggattcagggcaggggcccaggctcccctcctctgtggctcaaacggtggacgacttcctgttggagaagtggcgcaagtattttccatctggcatcccgctgctcagcaacagccccaccccgctggagagcaggctgggttacatgtctgccagtgagcagctccggctcctacagcactcccattcgcaagtccctgaggcgggcagcaccacctttcagggcataattgaggccaaccggaggtggctggaacgtgtcaagaatgaccccaggttacctctcttctcttcaacacccaagccaaaagctactttgagcctcctgcagctgggccttgatgagcacaacagagtgaaggtgtatcgcttctgaggccctgagcaggggcttggggcagcccagcctctcctccacccagaccaagtgcctgaggagctgcctgccttcttccatctgagaaagcaccctccttccccctttgacttgcaggagccaccagggaccagggggttgagtggaacagtaaagccacacattctgtgactatat

SEQ ID NO: 424297 - DNA, 5468 bp, Homo sapiens
  misc_feature (4)..(4): n is a, c, g, or t
gggnggggactgagggaagaagtgaaaatcggactgccaggcgacagttcctccgtttgaaatctcgccggctcctgagcgggccaccgggcccgggctgggggtctggcgggtgtttgagcccagatgagtcatggctggacgacccctccgcataggagatcagctggttctggaagaagattatgatgagacctacattcctagtgagcaagaaattcttgaatttgcccgggagattggtattgatcccatcaaggaaccagaactgatgtggctggcgcgagagggcatcgtggccccactgcctggagagtggaaaccatgccaggacatcacaggtgacatttactatttcaacttcgccaacgggcagtctatgtgggaccatccatgtgacgaacactatcggagcttggtgatccaagagcgggcaaagctgtcaacttctggggccattaagaagaagaaaaaaaaaaaggaaaagaaagacaagaaggacagagacccccccaaaagttcgctggccttgggttcctcattagccccagttcatgttcctcttgggggcctggctcctttacgaggtcttgtggataccccaccctctgctcttcgtggatctcaaagcgtgagcctggggagctcagtggagtctggacgtcagcttggagaactcatgctgccttcacagggtctcaagacctctgcttatacaaagggtctcttgggctccatatatgaggacaagactgctctcagcctcttgggtttaggagaagaaaccaatgaggaggatgaggaggaaagtgacaaccagagtgtccacagctcaagtgagcctcttaggaacctacacctggacattggggcactggggggtgactttgagtatgaggagtctctgagaacaagccagccagaggagaagaaggatgtttctctggattcagatgctgccggtccccctactccctgcaagccctccagcccaggtgcagacagcagtctgagcagtgctgttggcaaagggcgacagggaagtggagcaagacctggtcttccagaaaaagaggaaaatgagaagagtgaacctaagatttgcaggaatctggtgacccccaaggcagaccctacaggcagtgagcctgccaaagcctctgaaaaggaagcaccagaggacacagtagatgcaggagaggagggttccaggagggaagaggcagccaaggagccaaagaagaaggcttctgctctggaagagggcagttcagacgccagccaagaactggaaattagtgaacacatgaaggaaccacagctctcagactccatagcttctgaccccaagtccttccatggcctggacttcggttttcgcagccggatctcggagcacctgctggatgttgatgtgctttccccagtcctgggtggagcttgtcggcaggcccagcaaccactgggaatagaagacaaggatgacagccagtccagccaagatgagctgcagagcaagcagtccaaaggcctggaggagaggtaccataggttatctcctccacttccacacgaggagcgggcccagagtccccctcgcagcctggccactgaagaagagcccccccagggccccgaggggcagcccgagtggaaggaggcagaggagcttggggaggactctgcagccagcctcagcctgcagctgtccctccagaggcgatccacagagcctgtggctcccccagagcagctctcagaggctgcactaaaggccatggaagaggcagtggcccaagtactcgagcaagaccagaggcacctgctggaatccaagcaagagaagatgcagcaactgcgggagaagctgtgccaagaggaggaagaggagatcctccggcttcaccagcagaaagagcaatctctcagttccttgagggagcggctgcagaaagccattgaggaggaggaggcccggatgagagaggaggaaagccagaggctatcctggctccgagctcaggtccagtccagcacacaagcagatgaggaccaaatcagggctgagcaagaggcttccctgcagaaactgagagaagagttggagtctcaacagaaggctgagagggccagcttggaacagaaaaataggcaaatgctggagcagctcaaggaagagatagaggcttcggagaagagcgagcaggctgccctgaatgctgcaaaggagaaggctctgcagcagctgagggagcagctggaaggggagaggaaagaagctgtggcaacgctggagaaggagcacagtgctgagctggagcggctctgctcctcattggaggccaagcaccgggaggtggtctccagcctccagaagaagatacaggaagctcaacagaaagaggaggcccagctgcagaagtgccttgggcaagtggagcacagagttcaccagaagtcttatcacgtggctgggtatgagcacgagctcagcagtctcctgcgagagaagcgccaggaagtggaaggggagcatgagaggaggttggacaagatgaaggaggagcaccagcaagtgatggctaaggccagagagcagtatgaagctgaggagaggaagcagcgggctgagcttctggggcacctgaccggagagctggagcgcctgcagagggcccatgaacgagaactggagactgtgaggcaggagcaacacaagcgtcttgaggacttgcggcgccggcacagggagcaggaaaggaagctccaggatttagagttggaccttgaaaccagagctaaagatgtcaaggccagattggctctgctggaggtccaggaggagaccgcccggagggagaagcagcagctgcttgatgtgcagaggcaggttgctctgaagagtgaggaagccacagccacccatcagcagctggaggaggcacagaaggagcacacccacctgttgcagtcaaaccagcagctccgagaaattcttgatgagctgcaggcccgcaagctgaagctggagtcccaagtggatctgctgcaggctcagagccagcaactgcagaaacacttcagcagcctggaggctgaagctcaaaagaagcagcacctgttgagagaagtgacagttgaggaaaataatgcttccccacattttgagccagatctccatattgaggacctgaggaaatcccttggaacaaaccagaccaaagaggtgtcttcttctctctcccagagcaaggaggacttatacttggacagcctgtcctcccacaatgtctggcacctcctctctgctgagggggtagccctccgtagtgccaaggagttccttgtgcagcagacacgctccatgcggaggcggcagacagctctgaaagctgcccagcagcattggcgccatgagctggccagtgcgcaggaggtggccaaagacccaccaggcatcaaggccctggaagatatgcgcaagaacctggagaaggagaccaggcacctggatgagatgaagtcggccatgcggaaaggccacaacctgctgaagaagaaagaggagaagctgaatcagttggagtcctctctttgggaagaggcctcagatgagggcactctgggaggatcccccaccaagaaggcagtaaccttcgacctcagtgacatggacagcctgagcagtgaaagttctgaatctttttccccgcctcaccgtgagtggtggcggcagcagaggatcgactcaaccccgagtctcacctcccgcaagatccacgggcttagccactccctccggcagatcagcagccagctgagcagtgtcctcagcatcctggacagcctcaaccctcagtcgccgccgccgctcctcgcctccatgccagcccagctccctccccgggaccctaagagcacccccacccccacctactatggctccctggccaggttctcagccttatcatctgctacacccacgtccacccaatgggcctgggattcagggcaggggcccaggctcccctcctctgtggctcaaacggtggacgacttcctgttggagaagtggcgcaagtattttccatctggcatcccgctgctcagcaacagccccaccccgctggagagcaggctgggttacatgtctgccagtgagcagctccggctcctacagcactcccattcgcaagtccctgaggcgggcagcaccacctttcagggcataattgaggccaaccggaggtggctggaacgtgtcaagaatgaccccaggttacctctcttctcttcaacacccaagccaaaagctactttgagcctcctgcagctgggccttgatgagcacaacagagtgaaggtgtatcgcttctgaggccctgagcaggggcttggggcagcccagcctctcctccacccagaccaagtgcctgaggagctgcctgccttcttccatctgagaaagcaccctccttccccctttgacttgcaggagccaccagggaccagggggttgagtggaacagtaaagccacacattctgtgactatataacctatctcaggctaaaatgtgtggacttgtacgagctcttgtcattgacatggcaagctgatggcgtgcggtggctgcggggtatcagggccgggagccctttgggaggaagggaggcgttagaggagctgccttcggaggctcagggagtccctttggagctggttgtttccttggccctgcagcgcactgctcggggctcccaaggaggttgtgtgtatggttcttaattcatcaggacaaagacccccagcatgtgtgtaccctgggacccgatttctctgggcccacatctatctccaatacctcagcctcagatcagaccctttcttttttgtctttcttctcttaatttttaaatgcctcttttcttgagcattccatctctctttttgaccctctcaggactgggcttagctgtccagagccctgccggagggtgctgggggctgtccctctgcaggcactgtgttttcctcaggggctgtcctcagaacacccctcctgctccctggggctcctcagggagccatttcagctggagtctcaggtctcaaaaacaacttctccaggaggccaaaaaaagactgggttggcttctggtcctcatgatggcttttatcctcctgggacactttgggtatattcatgggcattgtttccatctgtcttttctacctgtgccacccctgccctgattccacggctgcctcaggcaggcaggcaaggagctaggccggtgcccggccctggcagcaaggggtctttgtgcagttggagatgctgccgttgtggcagagcgtcctgcagccccgcttccatcagcaggctctggggtgggggctttgcaggggatgctctctgatgtttgttccgttgtttaaataaaatgcacttatttttgttttttt

SEQ ID NO: 424298 - DNA, 5923 bp, Homo sapiens
gccccatctgccaccgggttcctggtccttttctgctcagctttttagtcagcagtggtcaggcctgcgtcgcctctgactgtgtgtgtagcacagtggggcatcatgtctgcaggatgttacgggttcttctgagggttgggagcacattcccacttcagcttatgtactgttgaaagaagcccttttcctttggtgttttcttcctgcttggaggtggcatggtgggaatgaggggcagaagctggctcccttcaggttcagtgcactgacaaagggaaccatgtcttgtgagtcctaaggcaggactcctctgttgcccacccgttagctgtcatggtacagaggggggccatagtaaacaatccctgatggatcctttgttgcttgtcaggggtctctaggaaccttggaataggttcagagtctccagatccagccatttcctttctaggccagatcttgactttttttttttttttttcaaccaggagaaataactttatttggactgagagctggagaatgagaataggacctgagagtatattgggctaaggaggagaggtgtttgagcccagatgagtcatggctggacgacccctccgcataggagatcagctggttctggaagaagattatgatgagacctacattcctagtgagcaagaaattcttgaatttgcccgggagattggtattgatcccatcaaggaaccagaactgatgtggctggcgcgagagggcatcgtggccccactgcctggagagtggaaaccatgccaggacatcacaggtgacatttactatttcaacttcgccaacgggcagtctatgtgggaccatccatgtgacgaacactatcggagcttggtgatccaagagcgggcaaagctgtcaacttctggggccattaagaagaagaaaaaaaaaaaggaaaagaaagacaagaaggacagagacccccccaaaagttcgctggccttgggttcctcattagccccagttcatgttcctcttgggggcctggctcctttacgaggtcttgtggataccccaccctctgctcttcgtggatctcaaagcgtgagcctggggagctcagtggagtctggacgtcagcttggagaactcatgctgccttcacagggtctcaagacctctgcttatacaaagggtctcttgggctccatatatgaggacaagactgctctcagcctcttgggtttaggagaagaaaccaatgaggaggatgaggaggaaagtgacaaccagagtgtccacagctcaagtgagcctcttaggaacctacacctggacattggggcactggggggtgactttgagtatgaggagtctctgagaacaagccagccagaggagaagaaggatgtttctctggattcagatgctgccggtccccctactccctgcaagccctccagcccaggtgcagacagcagtctgagcagtgctgttggcaaagggcgacagggaagtggagcaagacctggtcttccagaaaaagaggaaaatgagaagagtgaacctaagatttgcaggaatctggtgacccccaaggcagaccctacaggcagtgagcctgccaaagcctctgaaaaggaagcaccagaggacacagtagatgcaggagaggagggttccaggagggaagaggcagccaaggagccaaagaagaaggcttctgctctggaagagggcagttcagacgccagccaagaactggaaattagtgaacacatgaaggaaccacagctctcagactccatagcttctgaccccaagtccttccatggcctggacttcggttttcgcagccggatctcggagcacctgctggatgttgatgtgctttccccagtcctgggtggagcttgtcggcaggcccagcaaccactgggaatagaagacaaggatgacagccagtccagccaagatgagctgcagagcaagcagtccaaaggcctggaggagaggtaccataggttatctcctccacttccacacgaggagcgggcccagagtccccctcgcagcctggccactgaagaagagcccccccagggccccgaggggcagcccgagtggaaggaggcagaggagcttggggaggactctgcagccagcctcagcctgcagctgtccctccagaggcgatccacagagcctgtggctcccccagagcagctctcagaggctgcactaaaggccatggaagaggcagtggcccaagtactcgagcaagaccagaggcacctgctggaatccaagcaagagaagatgcagcaactgcgggagaagctgtgccaagaggaggaagaggagatcctccggcttcaccagcagaaagagcaatctctcagttccttgagggagcggctgcagaaagccattgaggaggaggaggcccggatgagagaggaggaaagccagaggctatcctggctccgagctcaggtccagtccagcacacaagcagatgaggaccaaatcagggctgagcaagaggcttccctgcagaaactgagagaagagttggagtctcaacagaaggctgagagggccagcttggaacagaaaaataggcaaatgctggagcagctcaaggaagagatagaggcttcggagaagagcgagcaggctgccctgaatgctgcaaaggagaaggctctgcagcagctgagggagcagctggaaggggagaggaaagaagctgtggcaacgctggagaaggagcacagtgctgagctggagcggctctgctcctcattggaggccaagcaccgggaggtggtctccagcctccagaagaagatacaggaagctcaacagaaagaggaggcccagctgcagaagtgccttgggcaagtggagcacagagttcaccagaagtcttatcacgtggctgggtatgagcacgagctcagcagtctcctgcgagagaagcgccaggaagtggaaggggagcatgagaggaggttggacaagatgaaggaggagcaccagcaagtgatggctaaggccagagagcagtatgaagctgaggagaggaagcagcgggctgagcttctggggcacctgaccggagagctggagcgcctgcagagggcccatgaacgagaactggagactgtgaggcaggagcaacacaagcgtcttgaggacttgcggcgccggcacagggagcaggaaaggaagctccaggatttagagttggaccttgaaaccagagctaaagatgtcaaggccagattggctctgctggaggtccaggaggagaccgcccggagggagaagcagcagctgcttgatgtgcagaggcaggttgctctgaagagtgaggaagccacagccacccatcagcagctggaggaggcacagaaggagcacacccacctgttgcagtcaaaccagcagctccgagaaattcttgatgagctgcaggcccgcaagctgaagctggagtcccaagtggatctgctgcaggctcagagccagcaactgcagaaacacttcagcagcctggaggctgaagctcaaaagaagcagcacctgttgagagaagtgacagttgaggaaaataatgcttccccacattttgagccagatctccatattgaggacctgaggaaatcccttggaacaaaccagaccaaagaggtgtcttcttctctctcccagagcaaggaggacttatacttggacagcctgtcctcccacaatgtctggcacctcctctctgctgagggggtagccctccgtagtgccaaggagttccttgtgcagcagacacgctccatgcggaggcggcagacagctctgaaagctgcccagcagcattggcgccatgagctggccagtgcgcaggaggtggccaaagacccaccaggcatcaaggccctggaagatatgcgcaagaacctggagaaggagaccaggcacctggatgagatgaagtcggccatgcggaaaggccacaacctgctgaagaagaaagaggagaagctgaatcagttggagtcctctctttgggaagaggcctcagatgagggcactctgggaggatcccccaccaagaaggcagtaaccttcgacctcagtgacatggacagcctgagcagtgaaagttctgaatctttttccccgcctcaccgtgagtggtggcggcagcagaggatcgactcaaccccgagtctcacctcccgcaagatccacgggcttagccactccctccggcagatcagcagccagctgagcagtgtcctcagcatcctggacagcctcaaccctcagtcgccgccgccgctcctcgcctccatgccagcccagctccctccccgggaccctaagagcacccccacccccacctactatggctccctggccaggttctcagccttatcatctgctacacccacgtccacccaatgggcctgggattcagggcaggggcccaggctcccctcctctgtggctcaaacggtggacgacttcctgttggagaagtggcgcaagtattttccatctggcatcccgctgctcagcaacagccccaccccgctggagagcaggctgggttacatgtctgccagtgagcagctccggctcctacagcactcccattcgcaagtccctgaggcgggcagcaccacctttcagggcataattgaggccaaccggaggtggctggaacgtgtcaagaatgaccccaggttacctctcttctcttcaacacccaagccaaaagctactttgagcctcctgcagctgggccttgatgagcacaacagagtgaaggtgtatcgcttctgaggccctgagcaggggcttggggcagcccagcctctcctccacccagaccaagtgcctgaggagctgcctgccttcttccatctgagaaagcaccctccttccccctttgacttgcaggagccaccagggaccagggggttgagtggaacagtaaagccacacattctgtgactatataacctatctcaggctaaaatgtgtggacttgtacgagctcttgtcattgacatggcaagctgatggcgtgcggtggctgcggggtatcagggccgggagccctttgggaggaagggaggcgttagaggagctgccttcggaggctcagggagtccctttggagctggttgtttccttggccctgcagcgcactgctcggggctcccaaggaggttgtgtgtatggttcttaattcatcaggacaaagacccccagcatgtgtgtaccctgggacccgatttctctgggcccacatctatctccaatacctcagcctcagatcagaccctttcttttttgtctttcttctcttaatttttaaatgcctcttttcttgagcattccatctctctttttgaccctctcaggactgggcttagctgtccagagccctgccggagggtgctgggggctgtccctctgcaggcactgtgttttcctcaggggctgtcctcagaacacccctcctgctccctggggctcctcagggagccatttcagctggagtctcaggtctcaaaaacaacttctccaggaggccaaaaaaagactgggttggcttctggtcctcatgatggcttttatcctcctgggacactttgggtatattcatgggcattgtttccatctgtcttttctacctgtgccacccctgccctgattccacggctgcctcaggcaggcaggcaaggagctaggccggtgcccggccctggcagcaaggggtctttgtgcagttggagatgctgccgttgtggcagagcgtcctgcagccccgcttccatcagcaggctctggggtgggggctttgcaggggatgctctctgatgtttgttccgttgtttaaataaaatgcacttatttttgttttttt

SEQ ID NO: 424299 - DNA, 5544 bp, Homo sapiens
  misc_feature (4)..(4): n is a, c, g, or t
gggnggggactgagggaagaagtgaaaatcggactgccaggcgacagttcctccgtttgaaatctcgccggctcctgagcgggccaccgggcccgggctgggggtctggcgggagaaataactttatttggactgagagctggagaatgagaataggacctgagagtatattgggctaaggaggagaggtgtttgagcccagatgagtcatggctggacgacccctccgcataggagatcagctggttctggaagaagattatgatgagacctacattcctagtgagcaagaaattcttgaatttgcccgggagattggtattgatcccatcaaggaaccagaactgatgtggctggcgcgagagggcatcgtggccccactgcctggagagtggaaaccatgccaggacatcacaggtgacatttactatttcaacttcgccaacgggcagtctatgtgggaccatccatgtgacgaacactatcggagcttggtgatccaagagcgggcaaagctgtcaacttctggggccattaagaagaagaaaaaaaaaaaggaaaagaaagacaagaaggacagagacccccccaaaagttcgctggccttgggttcctcattagccccagttcatgttcctcttgggggcctggctcctttacgaggtcttgtggataccccaccctctgctcttcgtggatctcaaagcgtgagcctggggagctcagtggagtctggacgtcagcttggagaactcatgctgccttcacagggtctcaagacctctgcttatacaaagggtctcttgggctccatatatgaggacaagactgctctcagcctcttgggtttaggagaagaaaccaatgaggaggatgaggaggaaagtgacaaccagagtgtccacagctcaagtgagcctcttaggaacctacacctggacattggggcactggggggtgactttgagtatgaggagtctctgagaacaagccagccagaggagaagaaggatgtttctctggattcagatgctgccggtccccctactccctgcaagccctccagcccaggtgcagacagcagtctgagcagtgctgttggcaaagggcgacagggaagtggagcaagacctggtcttccagaaaaagaggaaaatgagaagagtgaacctaagatttgcaggaatctggtgacccccaaggcagaccctacaggcagtgagcctgccaaagcctctgaaaaggaagcaccagaggacacagtagatgcaggagaggagggttccaggagggaagaggcagccaaggagccaaagaagaaggcttctgctctggaagagggcagttcagacgccagccaagaactggaaattagtgaacacatgaaggaaccacagctctcagactccatagcttctgaccccaagtccttccatggcctggacttcggttttcgcagccggatctcggagcacctgctggatgttgatgtgctttccccagtcctgggtggagcttgtcggcaggcccagcaaccactgggaatagaagacaaggatgacagccagtccagccaagatgagctgcagagcaagcagtccaaaggcctggaggagaggtaccataggttatctcctccacttccacacgaggagcgggcccagagtccccctcgcagcctggccactgaagaagagcccccccagggccccgaggggcagcccgagtggaaggaggcagaggagcttggggaggactctgcagccagcctcagcctgcagctgtccctccagaggcgatccacagagcctgtggctcccccagagcagctctcagaggctgcactaaaggccatggaagaggcagtggcccaagtactcgagcaagaccagaggcacctgctggaatccaagcaagagaagatgcagcaactgcgggagaagctgtgccaagaggaggaagaggagatcctccggcttcaccagcagaaagagcaatctctcagttccttgagggagcggctgcagaaagccattgaggaggaggaggcccggatgagagaggaggaaagccagaggctatcctggctccgagctcaggtccagtccagcacacaagcagatgaggaccaaatcagggctgagcaagaggcttccctgcagaaactgagagaagagttggagtctcaacagaaggctgagagggccagcttggaacagaaaaataggcaaatgctggagcagctcaaggaagagatagaggcttcggagaagagcgagcaggctgccctgaatgctgcaaaggagaaggctctgcagcagctgagggagcagctggaaggggagaggaaagaagctgtggcaacgctggagaaggagcacagtgctgagctggagcggctctgctcctcattggaggccaagcaccgggaggtggtctccagcctccagaagaagatacaggaagctcaacagaaagaggaggcccagctgcagaagtgccttgggcaagtggagcacagagttcaccagaagtcttatcacgtggctgggtatgagcacgagctcagcagtctcctgcgagagaagcgccaggaagtggaaggggagcatgagaggaggttggacaagatgaaggaggagcaccagcaagtgatggctaaggccagagagcagtatgaagctgaggagaggaagcagcgggctgagcttctggggcacctgaccggagagctggagcgcctgcagagggcccatgaacgagaactggagactgtgaggcaggagcaacacaagcgtcttgaggacttgcggcgccggcacagggagcaggaaaggaagctccaggatttagagttggaccttgaaaccagagctaaagatgtcaaggccagattggctctgctggaggtccaggaggagaccgcccggagggagaagcagcagctgcttgatgtgcagaggcaggttgctctgaagagtgaggaagccacagccacccatcagcagctggaggaggcacagaaggagcacacccacctgttgcagtcaaaccagcagctccgagaaattcttgatgagctgcaggcccgcaagctgaagctggagtcccaagtggatctgctgcaggctcagagccagcaactgcagaaacacttcagcagcctggaggctgaagctcaaaagaagcagcacctgttgagagaagtgacagttgaggaaaataatgcttccccacattttgagccagatctccatattgaggacctgaggaaatcccttggaacaaaccagaccaaagaggtgtcttcttctctctcccagagcaaggaggacttatacttggacagcctgtcctcccacaatgtctggcacctcctctctgctgagggggtagccctccgtagtgccaaggagttccttgtgcagcagacacgctccatgcggaggcggcagacagctctgaaagctgcccagcagcattggcgccatgagctggccagtgcgcaggaggtggccaaagacccaccaggcatcaaggccctggaagatatgcgcaagaacctggagaaggagaccaggcacctggatgagatgaagtcggccatgcggaaaggccacaacctgctgaagaagaaagaggagaagctgaatcagttggagtcctctctttgggaagaggcctcagatgagggcactctgggaggatcccccaccaagaaggcagtaaccttcgacctcagtgacatggacagcctgagcagtgaaagttctgaatctttttccccgcctcaccgtgagtggtggcggcagcagaggatcgactcaaccccgagtctcacctcccgcaagatccacgggcttagccactccctccggcagatcagcagccagctgagcagtgtcctcagcatcctggacagcctcaaccctcagtcgccgccgccgctcctcgcctccatgccagcccagctccctccccgggaccctaagagcacccccacccccacctactatggctccctggccaggttctcagccttatcatctgctacacccacgtccacccaatgggcctgggattcagggcaggggcccaggctcccctcctctgtggctcaaacggtggacgacttcctgttggagaagtggcgcaagtattttccatctggcatcccgctgctcagcaacagccccaccccgctggagagcaggctgggttacatgtctgccagtgagcagctccggctcctacagcactcccattcgcaagtccctgaggcgggcagcaccacctttcagggcataattgaggccaaccggaggtggctggaacgtgtcaagaatgaccccaggttacctctcttctcttcaacacccaagccaaaagctactttgagcctcctgcagctgggccttgatgagcacaacagagtgaaggtgtatcgcttctgaggccctgagcaggggcttggggcagcccagcctctcctccacccagaccaagtgcctgaggagctgcctgccttcttccatctgagaaagcaccctccttccccctttgacttgcaggagccaccagggaccagggggttgagtggaacagtaaagccacacattctgtgactatataacctatctcaggctaaaatgtgtggacttgtacgagctcttgtcattgacatggcaagctgatggcgtgcggtggctgcggggtatcagggccgggagccctttgggaggaagggaggcgttagaggagctgccttcggaggctcagggagtccctttggagctggttgtttccttggccctgcagcgcactgctcggggctcccaaggaggttgtgtgtatggttcttaattcatcaggacaaagacccccagcatgtgtgtaccctgggacccgatttctctgggcccacatctatctccaatacctcagcctcagatcagaccctttcttttttgtctttcttctcttaatttttaaatgcctcttttcttgagcattccatctctctttttgaccctctcaggactgggcttagctgtccagagccctgccggagggtgctgggggctgtccctctgcaggcactgtgttttcctcaggggctgtcctcagaacacccctcctgctccctggggctcctcagggagccatttcagctggagtctcaggtctcaaaaacaacttctccaggaggccaaaaaaagactgggttggcttctggtcctcatgatggcttttatcctcctgggacactttgggtatattcatgggcattgtttccatctgtcttttctacctgtgccacccctgccctgattccacggctgcctcaggcaggcaggcaaggagctaggccggtgcccggccctggcagcaaggggtctttgtgcagttggagatgctgccgttgtggcagagcgtcctgcagccccgcttccatcagcaggctctggggtgggggctttgcaggggatgctctctgatgtttgttccgttgtttaaataaaatgcacttatttttgttttttt

SEQ ID NO: 424300 - DNA, 1676 bp, Homo sapiens
cagctaacagtgagtaccccccactaaccctttggccaacttgagagctgatgctggccaaggattgagttgacagaggggagcgctttgctgatgagattggcgggagcaggcggatgtgggagcccagagccttgtatcagtagcacccagcaagggggcagagggcctccaccactttcccgtttgggaactgttctggaggggcagatgttttgaagctttgaattgctagggacctcggagaagctgctctggtagctgagagaaagagggaggaggtgacagatgtgatggcctctgtgcatcctctgtcacttccgcgcctcctctctcccctcgccatgctctcctcttccttcccagtgagcagctccggctcctacagcactcccattcgcaagtccctgaggcgggcagcaccacctttcagggcataattgaggccaaccggaggtggctggaacgtgtcaagaatgaccccaggttacctctcttctcttcaacacccaagccaaaagctactttgagcctcctgcagctgggccttgatgagcacaacagagtgaaggtgtatcgcttctgaggccctgagcaggggcttggggcagcccagcctctcctccacccagaccaagtgcctgaggagctgcctgccttcttccatctgagaaagcaccctccttccccctttgacttgcaggagccaccagggaccagggggttgagtggaacagtaaagccacacattctgtgactatataacctatctcaggctaaaatgtgtggacttgtacgagctcttgtcattgacatggcaagctgatggcgtgcggtggctgcggggtatcagggccgggagccctttgggaggaagggaggcgttagaggagctgccttcggaggctcagggagtccctttggagctggttgtttccttggccctgcagcgcactgctcggggctcccaaggaggttgtgtgtatggttcttaattcatcaggacaaagacccccagcatgtgtgtaccctgggacccgatttctctgggcccacatctatctccaatacctcagcctcagatcagaccctttcttttttgtctttcttctcttaatttttaaatgcctcttttcttgagcattccatctctctttttgaccctctcaggactgggcttagctgtccagagccctgccggagggtgctgggggctgtccctctgcaggcactgtgttttcctcaggggctgtcctcagaacacccctcctgctccctggggctcctcagggagccatttcagctggagtctcaggtctcaaaaacaacttctccaggaggccaaaaaaagactgggttggcttctggtcctcatgatggcttttatcctcctgggacactttgggtatattcatgggcattgtttccatctgtcttttctacctgtgccacccctgccctgattccacggctgcctcaggcaggcaggcaaggagctaggccggtgcccggccctggcagcaaggggtctttgtgcagttggagatgctgccgttgtggcagagcgtcctgcagccccgcttccatcagcaggctctggggtgggggctttgcaggggatgctctctgatgtttgttccgttgtttaaataaaatgcacttatttttgttttttt

SEQ ID NO: 424301 - DNA, 358 bp, Homo sapiens
gccccacttttccctctgcacacccctcaccctgggttgaccagtttcttcagagttaccacttgtcatcatttttgtttctagagtgtccacagctcaagtgagcctcttaggaacctacacctggacattggggcactggggggtgactttgagtatgaggtaagagccctaatccctacaggcacatgtgtcagcctggcatatccctcctgtttttattaagccctgctactttgttgtaatgcatatttggaaaaagaaccattttgtcccagtccttccagatgagatttctggggtttggggaaggacaagaataaatgaatggattcctgtcccttccagaccctgcctc

SEQ ID NO: 424302 - DNA, 720 bp, Homo sapiens
  misc_feature (525)..(525): n is a, c, g, or t
  misc_feature (620)..(620): n is a, c, g, or t
  misc_feature (677)..(677): n is a, c, g, or t
  misc_feature (695)..(695): n is a, c, g, or t
cggacgcggtgggcggacgcgtggtcttgtgctgactttctcctgtcctcttccagtttagaataagacaggggagaaaaaggcttttcgagtgtgggacaaggtctgatgtcagtgaacggaactgaagagcaagacatggagcctggctggggctaagcagccccctcctccggatggcacaggctctgctaggttccggacacaggcttctgggggaagggtctcccttggccatcacgggaatggagtccatgctagaaagagctcagtgttgggctgggtttgccagtagaacactgcgttccagtcaccccggtcttgccagaagaaaccagcacctctttcccgtggctcctgtgttcagaatgtggtattggctctggcccagccttctcccctgttacccataattcttgcctctttccataatccgtggtttcagtttgactttgtatataaagttggggtttttttttttttttttggcttgttttttaaataaaccaaagtcaaaaacaaaanaaaaaaaaaaaaaaaaaaaaaaaaagtctagtctctgagaaggctttgggctccacccaggtcctgatgctacagtggggaccaggccccctggnaatggtggcctcctgcttggtgctgtggctctgagctaaagcctctccctccccttnaggaaccaggctgtgcgnatccagggagggccggtaccgccac

SEQ ID NO: 424303 - DNA, 889 bp, Homo sapiens
agtagctgggactgcaggcacgcaccaccaggcccagctaatttttgtatttttagtagagacggggtttcaccatgttggccaggatggtctcgatctcttgacctcgtgatctgcccgccttggcctcccaaagtgctgggatcacaggcgtgagccaccgcgcccggccaaatttactttaaaggacgcatagcatggatccatatatgcgtctcttgtttttaaaagaaaaatcatttttttctcatttcaaaaaaatcacgttaactataattaatgaagtgcagaaaaatagaaaattattcgtaagctttccagaggcttccatcattaatattttatttcctttcagtcttctaaagttgtttttgcagtagctgaggcctactgtgtatacaatgttgcagagtgtgctttttgcttaacaggaatgtttattaaaacagtaaatatccattttaatatctttataacattctgtcatatggctgttagcatggattctttttccatttattgaatgtgagggatttcgattgtttccagttcttttagttcagtttgtattgaatacatataacaatgtggtttcttactgttggtgatgggtcaacctctagtgatgactatgactccaagaaacgcaaacagcgggctggtggagagccctggggtgctaagaagccaaggcatgacctgcctccttaccgggtccacctcactccttacactgtggacaggtgagtggcgaggctgaggtgggctgagtcttgctgctggtaatagtttcttatgtaaatgagatggcgtctatgcaagtgcacatgtatgttcttacagccttttcttacaaaacgaaaagcacatggaaacctgttgtacatac

SEQ ID NO: 424304 - DNA, 3704 bp, Homo sapiens
accagtggtcgcgcttccggagaggcgcttccggtggcggcggcagcagcggctgtggtggttccgggtgtctttgtccccccggtgtcgctgccctggcccgcagccttttccccacgactctgaaagaggacagcgttcccaatgtcccagtttaagcgccagcggatcaacccgcttccagggggacgcaacttctcaggcacagcttcaacatctcttctgggccctcctcctggtttgctcactcctcctgtggccacagaactgtcccagaatgccaggcaccttcagggtggggagaaacagcgggtcttcactggtattgttaccagcttgcatgactactttggggttgtggatgaagaggtcttttttcagctaagtgtggtgaagggccgtctgccccagctgggtgagaaggtgctggtgaaggctgcatacaacccaggccaggcagtgccctggaatgctgtcaaggtgcaaacgctctccaaccagcccctactgaagtccccagcacctcctcttctgcatgtagcagccctgggccagaagcaagggatcctgggagctcagcctcagttgatcttccagcctcaccggattcccccactctttcctcagaagcctctgagtctcttccaaacatcccacacacttcacctgagccacctgaacagatttcctgcccggggccctcatggacggttggatcagggccgaagtgatgactatgactccaagaaacgcaaacagcgggctggtggagagccctggggtgctaagaagccaaggcatgacctgcctccttaccgggtccacctcactccttacactgtggacagccccatctgtgacttcctagaactccagcgccgttaccgcagcctcctggtcccctcagattttctgtccgtgcatctgagttggctatcagccttccccctgagccagcccttttccctccatcatccaagccggatccaggtctcttctgaaaaggaggcagctccagacgctggtgctgagcccatcactgcagacagtgaccccgcttatagttcgaaggtactgctgctctcttccccggggttggaggaattgtatcgttgttgcatgctctttgtggatgacatggctgagccaagggagacgccagagcatcctctgaagcagattaagtttttgctgggcaggaaagaagaggaggcagtgctggttgggggtgaatggtctccttccctggatggcctcgacccccaggctgacccgcaggtgctggtgcgtaccgccatccgctgtgcgcaggcccagactggcattgatttgagcggctgtaccaagtggtggcgctttgccgagtttcagtacctgcagccgggacccccccggcggcttcagacagtggtggtgtacctgccggatgtctggaccatcatgcctactttggaggagtgggaggccctgtgccagcagaaagctgcagaggcagctcccccaacccaggaggcacaaggggaaacggagcctactgaacaggcacctgatgccttggagcaagcagcagacacttctagacggaacgcagaaactccagaggccaccacacagcaggaaacggacactgatctcccagaggcccctccaccccccctagaacctgctgtcatcgcacgccctggctgtgtaaacctgtccctccatgggattgtggaggatcggaggccaaaggaaaggatctcttttgaggtgatggtgctggccgagctgtttctggagatgctccagagggattttggctatagagtttataagatgctactgagccttcctgaaaaggtcgtgtccccacctgaacctgagaaggaggaggcggccaaggaagaagccaccaaggaggaagaagccatcaaagaggaggtggtcaaggagcccaaggatgaggcacagaatgagggcccggctacagagtcagaggccccgctgaaggaggatgggcttttgcccaaaccactctcttctgggggagaggaagaagaaaaaccccggggcgaggcttctgaggacctgtgtgagatggccctggacccagaactgttgcttctgagggatgatggagaggaggagtttgcaggagcaaagctggaggattcggaggtccggtccgttgcctcaaaccagtcagagatggagttctcttcacttcaggacatgcccaaggagctggatccctctgctgtgctccccttagactgtctgcttgcttttgtgttctttgatgccaactggtgtggctacttgcaccggcgagacttagagaggatcctccttacccttgggatccggctcagtgcagagcaggccaagcagctggtcagcagggtggtgacccagaacatctgccagtaccggagccttcagtacagccgccaggagggcctggatggtggccttcccgaggaggtgctcttcggaaacctggacctgctgccccctcctgggaaaagcacgaagccaggtgctgcccccacagaacacaaagccttggtgtcccacaatggcagcctgattaacgtggggagcctgctgcagcgcgcggagcagcaggacagcggccggctctacctagagaacaagatccacacactggagctgaagctggaggagagccataaccgtttctcagccactgaagtaaccaataagacgctggcggcagagatgcaggagctgcgagtccggctggcggaggccgaggagaccgcccggacggcggagcgacagaagagccagctccagcggctgctgcaggagctccgcaggcgtctgacccccctgcagctggagatccagcgggtggtggaaaaggctgacagctgggtggagaaggaggagccggcacctagcaactgacggcctcgcacggaactgccatcctgtgagggcagcggtggcgcccggcaaagttggagcccttgcggtaccagaaagcagcgagagcgagacctgggagccagggcaggggtggctgaccccatgctcagcctctaggggacggcaggccatcaggctgggggctgtgctatgtgggatggatgtgtgaggaaccccggttccacttaacaactaaatacaacatcttttgcacccctagaatgtcattttgccctcaaccttggtatttctcctggggcccttttagtcttgtgctgactttctcctgtcctcttccagtttagaataagacaggggagaaaaaggcttttcgagtgtgggacaaggtctgatgtcagtgaacggaactgaagagcaagacatggagcctggctggggctaagcagccccctcctccggatggcacaggctctgctaggttccggacacaggcttctgggggaagggtctcccttggccatcacgggaatggagtccatgctagaaagagctcagtgttgggctgggtttgccagtagaacactgcgttccagtcaccccggtcttgccagaagaaaccagcacctctttcccgtggctcctgtgttcagaatgtggtattggctctggcccagccttctcccctgttacccataattcttgcctctttccataatccgtggtttcagtttgactttgtatataaagttggggtttttttttttttttttggcttgttttttaaataaaccaaagtcaaaaacaaa

SEQ ID NO: 424305 - DNA, 4924 bp, Homo sapiens
  misc_feature (4924)..(4924): n is a, c, g, or t
accagtggtcgcgcttccggagaggcgcttccggtggcggcggcagcagcggctgtggtggttccgggtgtctttgtccccccggtgtcgctgccctggcccgcagccttttccccacgactctgaaagaggacagcgttcccaatgtcccactgtctccttctcttacagggtggggagaaacagcgggtcttcactggtattgttaccagcttgcatgactactttggggttgtggatgaagaggtcttttttcagctaagtgtggtgaagggccgtctgccccagctgggtgagaaggtgctggtgaaggctgcatacaacccaggccaggcagtgccctggaatgctgtcaaggtgcaaacgctctccaaccagcccctactgaagtccccagcacctcctcttctgcatgtagcagccctgggccagaagcaagggatcctgggagctcagcctcagttgatcttccagcctcaccggattcccccactctttcctcagaagcctctgagtctcttccaaacatcccacacacttcacctgagccacctgaacagatttcctgcccggggccctcatggacggttggatcagggccgaagtgatgactatgactccaagaaacgcaaacagcgggctggtggagagccctggggtgctaagaagccaaggcatgacctgcctccttaccgggtccacctcactccttacactgtggacagccccatctgtgacttcctagaactccagcgccgttaccgcagcctcctggtcccctcagattttctgtccgtgcatctgagttggctatcagccttccccctgagccagcccttttccctccatcatccaagccggatccaggtctcttctgaaaaggaggcagctccagacgctggtgctgagcccatcactgcagacagtgaccccgcttatagttcgaaggtactgctgctctcttccccggggttggaggaattgtatcgttgttgcatgctctttgtggatgacatggctgagccaagggagacgccagagcatcctctgaagcagattaagtttttgctgggcaggaaagaagaggaggcagtgctggttgggggtgaatggtctccttccctggatggcctcgacccccaggctgacccgcaggtgctggtgcgtaccgccatccgctgtgcgcaggcccagactggcattgatttgagcggctgtaccaagtggtggcgctttgccgagtttcagtacctgcagccgggacccccccggcggcttcagacagtggtggtgtacctgccggatgtctggaccatcatgcctactttggaggagtgggaggccctgtgccagcagaaagctgcagaggcagctcccccaacccaggaggcacaaggggaaacggagcctactgaacaggcacctgatgccttggagcaagcagcagacacttctagacggaacgcagaaactccagaggccaccacacagcaggaaacggacactgatctcccagaggcccctccaccccccctagaacctgctgtcatcgcacgccctggctgtgtaaacctgtccctccatgggattgtggaggatcggaggccaaaggaaaggatctcttttgaggtgatggtgctggccgagctgtttctggagatgctccagagggattttggctatagagtttataagatgctactgagccttcctgaaaaggtcgtgtccccacctgaacctgagaaggaggaggcggccaaggaagaagccaccaaggaggaagaagccatcaaagaggaggtggtcaaggagcccaaggatgaggcacagaatgagggcccggctacagagtcagaggccccgctgaaggaggatgggcttttgcccaaaccactctcttctgggggagaggaagaagaaaaaccccggggcgaggcttctgaggacctgtgtgagatggccctggacccagaactgttgcttctgagggatgatggagaggaggagtttgcaggagcaaagctggaggattcggaggtccggtccgttgcctcaaaccagtcagagatggagttctcttcacttcaggacatgcccaaggagctggatccctctgctgtgctccccttagactgtctgcttgcttttgtgttctttgatgccaactggtgtggctacttgcaccggcgagacttagagaggatcctccttacccttgggatccggctcagtgcagagcaggccaagcagctggtcagcagggtggtgacccagaacatctgccagtaccggagccttcagtacagccgccaggagggcctggatggtggccttcccgaggaggtgctcttcggaaacctggacctgctgccccctcctgggaaaagcacgaagccaggtgctgcccccacagaacacaaagccttggtgtcccacaatggcagcctgattaacgtggggagcctgctgcagcgcgcggagcagcaggacagcggccggctctacctagagaacaagatccacacactggagctgaagctggaggagagccataaccgtttctcagccactgaagtaaccaataagacgctggcggcagagatgcaggagctgcgagtccggctggcggaggccgaggagaccgcccggacggcggagcgacagaagagccagctccagcggctgctgcaggagctccgcaggcgtctgacccccctgcagctggagatccagcgggtggtggaaaaggctgacagctgggtggagaaggaggagccggcacctagcaactgacggcctcgcacggaactgccatcctgtgagggcagcggtggcgcccggcaaagttggagcccttgcggtaccagaaagcagcgagagcgagacctgggagccagggcaggggtggctgaccccatgctcagcctctaggggacggcaggccatcaggctgggggctgtgctatgtgggatggatgtgtgaggaaccccggttccacttaacaactaaatacaacatcttttgcacccctagaatgtcattttgccctcaaccttggtatttctcctggggcccttttagtcttgtgctgactttctcctgtcctcttccagtttagaataagacaggggagaaaaaggcttttcgagtgtgggacaaggtctgatgtcagtgaacggaactgaagagcaagacatggagcctggctggggctaagcagccccctcctccggatggcacaggctctgctaggttccggacacaggcttctgggggaagggtctcccttggccatcacgggaatggagtccatgctagaaagagctcagtgttgggctgggtttgccagtagaacactgcgttccagtcaccccggtcttgccagaagaaaccagcacctctttcccgtggctcctgtgttcagaatgtggtattggctctggcccagccttctcccctgttacccataattcttgcctctttccataatccgtggtttcagtttgactttgtatataaagttggggtttttttttttttttttggcttgttttttaaataaaccaaagtcaaaaacaaactgagagtgtgtcctccacagctcttcctactctcctaggcttgcccgcgtgccctcccacccagcgcctctgctggaccacggtgcagttcgctccagaaggtgggccagggccggggaggtgcgcacacacccctggcatgctgggctgcctgctggagggtgctgctgctccgtggagggcagcaggcccaggaaggggtttcctctgctcgcctaagttacagcacaatactatgtggacgtttcattgaaaattttacttgaaaaaataaaattccagatactcaggtgagacacaaacccactgttcctgctttgagacctgtgaattcttgtgggacagttccactgacagcttgcgttcccgaggtaccagtcctcagtgacctcgggaaccccaaccacttaggtcccaaagccacaagggtgccctttgtcttgctgggaagctggctgagggcctgccagggctggaggaccagctctcccgcacagggttcagggcctctcccagaaaaaagaggttttgaagtgaaaaggcaacgaggggccagagggctccccaggatgggtcttttggaggtagatttgatgcccacaacgcatgcaaggctaagacccccaacttagccaacgaagcccatggcctcagaagggctgcagcttgctcaggccgtgggccaggatgcatgctggacggttctccaaataaaaaagccccaagggtttgtctacactgcttacctgctggggctgtgagtggggagacggcggcctgcctagggctcctggtgccaggctcaggaagagtcattcattgcaaagggccggcaagtgaaccagggccacctctgtccccagcctgtgagaggagcagctagccctgagaagggcaaggatgaatgaggctgaccacgtcacaggagtcctccaagagtgacggggattcagtcatcggccacaatggagagggcccggagctcactgagtttggcctcgttctcccgctcccgctgctcatcggagtggcctggctggtcaagctgatgggacaggtctccaaagatcttgtgcatttccgagtagtacacaacctgggggaggcgacaggggttggcacgtgctggctccagggaaccgtgtgcttcagggggccagaggctcacacttctctgctaccccctgcccttacccatctggagcggccaccactgtgctttgcgcatattcaggcacactggaagtatttagctgccagtaaaccgaaaccagtcgccgaacgacaaggtcagcagcaggaggaggacagcagcaggaggaggacagccgcaggaagacgn

SEQ ID NO: 424306 - DNA, 5329 bp, Homo sapiens
  misc_feature (5329)..(5329): n is a, c, g, or t
accagtggtcgcgcttccggagaggcgcttccggtggcggcggcagcagcggctgtggtggttccgggtgtctttgtccccccggtgtcgctgccctggcccgcagccttttccccacgactctgaaagaggacagcgttcccaatgtcccagtttaagcgccagcggatcaacccgcttccagggggacgcaacttctcaggcacagcttcaacatctcttctgggccctcctcctggtttgctcactcctcctgtggccacagaactgtcccagaatgccaggcaccttcagggtggggagaaacagcgggtcttcactggtattgttaccagcttgcatgactactttggggttgtggatgaagaggtcttttttcagctaagtgtggtgaagggccgtctgccccagctgggtgagaaggtgctggtgaaggctgcatacaacccaggccaggcagtgccctggaatgctgtcaaggtgcaaacgctctccaaccagcccctactgaagtccccagcacctcctcttctgcatgtagcagccctgggccagaagcaagggatcctgggagctcagcctcagttgatcttccagcctcaccggattcccccactctttcctcagaagcctctgagtctcttccaaacatcccacacacttcacctgagccacctgaacagatttcctgcccggggccctcatggacggttggatcagggccgaagtgatgactatgactccaagaaacgcaaacagcgggctggtggagagccctggggtgctaagaagccaaggcatgacctgcctccttaccgggtccacctcactccttacactgtggacagccccatctgtgacttcctagaactccagcgccgttaccgcagcctcctggtcccctcagattttctgtccgtgcatctgagttggctatcagccttccccctgagccagcccttttccctccatcatccaagccggatccaggtctcttctgaaaaggaggcagctccagacgctggtgctgagcccatcactgcagacagtgaccccgcttatagttcgaaggtactgctgctctcttccccggggttggaggaattgtatcgttgttgcatgctctttgtggatgacatggctgagccaagggagacgccagagcatcctctgaagcagattaagtttttgctgggcaggaaagaagaggaggcagtgctggttgggggtgaatggtctccttccctggatggcctcgacccccaggctgacccgcaggtgctggtgcgtaccgccatccgctgtgcgcaggcccagactggcattgatttgagcggctgtaccaagtggtggcgctttgccgagtttcagtacctgcagccgggacccccccggcggcttcagacagtggtggtgtacctgccggatgtctggaccatcatgcctactttggaggagtgggaggccctgtgccagcagaaagctgcagaggcagctcccccaacccaggaggcacaaggggaaacggagcctactgaacaggcacctgatgccttggagcaagcagcagacacttctagacggaacgcagaaactccagaggccaccacacagcaggaaacggacactgatctcccagaggcccctccaccccccctagaacctgctgtcatcgcacgccctggctgtgtaaacctgtccctccatgggattgtggaggatcggaggccaaaggaaaggatctcttttgaggtgatggtgctggccgagctgtttctggagatgctccagagggattttggctatagagtttataagatgctactgagccttcctgaaaaggtcgtgtccccacctgaacctgagaaggaggaggcggccaaggaagaagccaccaaggaggaagaagccatcaaagaggaggtggtcaaggagcccaaggatgaggcacagaatgagggcccggctacagagtcagaggccccgctgaaggaggatgggcttttgcccaaaccactctcttctgggggagaggaagaagaaaaaccccggggcgaggcttctgaggacctgtgtgagatggccctggacccagaactgttgcttctgagggatgatggagaggaggagtttgcaggagcaaagctggaggattcggaggtccggtccgttgcctcaaaccagtcagagatggagttctcttcacttcaggacatgcccaaggagctggatccctctgctgtgctccccttagactgtctgcttgcttttgtgttctttgatgccaactggtgtggctacttgcaccggcgagacttagagaggatcctccttacccttgggatccggctcagtgcagagcaggccaagcagctggtcagcagggtggtgacccagaacatctgccagtaccggagccttcagtacagccgccaggagggcctggatggtggccttcccgaggaggtgctcttcggaaacctggacctgctgccccctcctgggaaaagcacgaagccaggtgctgcccccacagaacacaaagccttggtgtcccacaatggcagcctgattaacgtggggagcctgctgcagcgcgcggagcagcaggacagcggccggctctacctagagaacaagatccacacactggagctgaagctggaggagagccataaccgtttctcagccactgaagtaaccaataagacgctggcggcagagatgcaggagctgcgagtccggctggcggaggccgaggagaccgcccggacggcggagcgacagaagagccagctccagcggctgctgcaggagctccgcaggcgtctgacccccctgcagctggagatccagcgggtggtggaaaaggtaaggtgggggtggaccaggaggcagcacagctcctttccctgagctccaaaagtccccagaagggcgcttgcccgtgtcgggagtgaccagagggccagcaggcaccggcttcgtctttccatcgcttgccaggcagtgtgcccctggttgcaggttctctgggaattgagcagtcagcagcgtgcagtgggagcttcccagcaggaggcagtccgcagtccgcagtcctcagatcaccttgccaggcccgattctgggtacatcatctgtttcaaacaggctgacagctgggtggagaaggaggagccggcacctagcaactgacggcctcgcacggaactgccatcctgtgagggcagcggtggcgcccggcaaagttggagcccttgcggtaccagaaagcagcgagagcgagacctgggagccagggcaggggtggctgaccccatgctcagcctctaggggacggcaggccatcaggctgggggctgtgctatgtgggatggatgtgtgaggaaccccggttccacttaacaactaaatacaacatcttttgcacccctagaatgtcattttgccctcaaccttggtatttctcctggggcccttttagtcttgtgctgactttctcctgtcctcttccagtttagaataagacaggggagaaaaaggcttttcgagtgtgggacaaggtctgatgtcagtgaacggaactgaagagcaagacatggagcctggctggggctaagcagccccctcctccggatggcacaggctctgctaggttccggacacaggcttctgggggaagggtctcccttggccatcacgggaatggagtccatgctagaaagagctcagtgttgggctgggtttgccagtagaacactgcgttccagtcaccccggtcttgccagaagaaaccagcacctctttcccgtggctcctgtgttcagaatgtggtattggctctggcccagccttctcccctgttacccataattcttgcctctttccataatccgtggtttcagtttgactttgtatataaagttggggtttttttttttttttttggcttgttttttaaataaaccaaagtcaaaaacaaactgagagtgtgtcctccacagctcttcctactctcctaggcttgcccgcgtgccctcccacccagcgcctctgctggaccacggtgcagttcgctccagaaggtgggccagggccggggaggtgcgcacacacccctggcatgctgggctgcctgctggagggtgctgctgctccgtggagggcagcaggcccaggaaggggtttcctctgctcgcctaagttacagcacaatactatgtggacgtttcattgaaaattttacttgaaaaaataaaattccagatactcaggtgagacacaaacccactgttcctgctttgagacctgtgaattcttgtgggacagttccactgacagcttgcgttcccgaggtaccagtcctcagtgacctcgggaaccccaaccacttaggtcccaaagccacaagggtgccctttgtcttgctgggaagctggctgagggcctgccagggctggaggaccagctctcccgcacagggttcagggcctctcccagaaaaaagaggttttgaagtgaaaaggcaacgaggggccagagggctccccaggatgggtcttttggaggtagatttgatgcccacaacgcatgcaaggctaagacccccaacttagccaacgaagcccatggcctcagaagggctgcagcttgctcaggccgtgggccaggatgcatgctggacggttctccaaataaaaaagccccaagggtttgtctacactgcttacctgctggggctgtgagtggggagacggcggcctgcctagggctcctggtgccaggctcaggaagagtcattcattgcaaagggccggcaagtgaaccagggccacctctgtccccagcctgtgagaggagcagctagccctgagaagggcaaggatgaatgaggctgaccacgtcacaggagtcctccaagagtgacggggattcagtcatcggccacaatggagagggcccggagctcactgagtttggcctcgttctcccgctcccgctgctcatcggagtggcctggctggtcaagctgatgggacaggtctccaaagatcttgtgcatttccgagtagtacacaacctgggggaggcgacaggggttggcacgtgctggctccagggaaccgtgtgcttcagggggccagaggctcacacttctctgctaccccctgcccttacccatctggagcggccaccactgtgctttgcgcatattcaggcacactggaagtatttagctgccagtaaaccgaaaccagtcgccgaacgacaaggtcagcagcaggaggaggacagcagcaggaggaggacagccgcaggaagacgn

SEQ ID NO: 424307 - DNA, 4696 bp, Homo sapiens
  misc_feature (4696)..(4696): n is a, c, g, or t
atatgacggatcacgtggccgttatctacactgctgggaaacagcctatcagcctcatctgggttacacatggtgctggtgaaggctgcatacaacccaggccaggcagtgccctggaatgctgtcaaggtgcaaacgctctccaaccagcccctactgaagtccccagcacctcctcttctgcatgtagcagccctgggccagaagcaagggatcctgggagctcagcctcagttgatcttccagcctcaccggattcccccactctttcctcagaagcctctgagtctcttccaaacatcccacacacttcacctgagccacctgaacagatttcctgcccggggccctcatggacggttggatcagggccgaagtgatgactatgactccaagaaacgcaaacagcgggctggtggagagccctggggtgctaagaagccaaggcatgacctgcctccttaccgggtccacctcactccttacactgtggacagccccatctgtgacttcctagaactccagcgccgttaccgcagcctcctggtcccctcagattttctgtccgtgcatctgagttggctatcagccttccccctgagccagcccttttccctccatcatccaagccggatccaggtctcttctgaaaaggaggcagctccagacgctggtgctgagcccatcactgcagacagtgaccccgcttatagttcgaaggtactgctgctctcttccccggggttggaggaattgtatcgttgttgcatgctctttgtggatgacatggctgagccaagggagacgccagagcatcctctgaagcagattaagtttttgctgggcaggaaagaagaggaggcagtgctggttgggggtgaatggtctccttccctggatggcctcgacccccaggctgacccgcaggtgctggtgcgtaccgccatccgctgtgcgcaggcccagactggcattgatttgagcggctgtaccaagtggtggcgctttgccgagtttcagtacctgcagccgggacccccccggcggcttcagacagtggtggtgtacctgccggatgtctggaccatcatgcctactttggaggagtgggaggccctgtgccagcagaaagctgcagaggcagctcccccaacccaggaggcacaaggggaaacggagcctactgaacaggcacctgatgccttggagcaagcagcagacacttctagacggaacgcagaaactccagaggccaccacacagcaggaaacggacactgatctcccagaggcccctccaccccccctagaacctgctgtcatcgcacgccctggctgtgtaaacctgtccctccatgggattgtggaggatcggaggccaaaggaaaggatctcttttgaggtgatggtgctggccgagctgtttctggagatgctccagagggattttggctatagagtttataagatgctactgagccttcctgaaaaggtcgtgtccccacctgaacctgagaaggaggaggcggccaaggaagaagccaccaaggaggaagaagccatcaaagaggaggtggtcaaggagcccaaggatgaggcacagaatgagggcccggctacagagtcagaggccccgctgaaggaggatgggcttttgcccaaaccactctcttctgggggagaggaagaagaaaaaccccggggcgaggcttctgaggacctgtgtgagatggccctggacccagaactgttgcttctgagggatgatggagaggaggagtttgcaggagcaaagctggaggattcggaggtccggtccgttgcctcaaaccagtcagagatggagttctcttcacttcaggacatgcccaaggagctggatccctctgctgtgctccccttagactgtctgcttgcttttgtgttctttgatgccaactggtgtggctacttgcaccggcgagacttagagaggatcctccttacccttgggatccggctcagtgcagagcaggccaagcagctggtcagcagggtggtgacccagaacatctgccagtaccggagccttcagtacagccgccaggagggcctggatggtggccttcccgaggaggtgctcttcggaaacctggacctgctgccccctcctgggaaaagcacgaagccaggtgctgcccccacagaacacaaagccttggtgtcccacaatggcagcctgattaacgtggggagcctgctgcagcgcgcggagcagcaggacagcggccggctctacctagagaacaagatccacacactggagctgaagctggaggagagccataaccgtttctcagccactgaagtaaccaataagacgctggcggcagagatgcaggagctgcgagtccggctggcggaggccgaggagaccgcccggacggcggagcgacagaagagccagctccagcggctgctgcaggagctccgcaggcgtctgacccccctgcagctggagatccagcgggtggtggaaaaggctgacagctgggtggagaaggaggagccggcacctagcaactgacggcctcgcacggaactgccatcctgtgagggcagcggtggcgcccggcaaagttggagcccttgcggtaccagaaagcagcgagagcgagacctgggagccagggcaggggtggctgaccccatgctcagcctctaggggacggcaggccatcaggctgggggctgtgctatgtgggatggatgtgtgaggaaccccggttccacttaacaactaaatacaacatcttttgcacccctagaatgtcattttgccctcaaccttggtatttctcctggggcccttttagtcttgtgctgactttctcctgtcctcttccagtttagaataagacaggggagaaaaaggcttttcgagtgtgggacaaggtctgatgtcagtgaacggaactgaagagcaagacatggagcctggctggggctaagcagccccctcctccggatggcacaggctctgctaggttccggacacaggcttctgggggaagggtctcccttggccatcacgggaatggagtccatgctagaaagagctcagtgttgggctgggtttgccagtagaacactgcgttccagtcaccccggtcttgccagaagaaaccagcacctctttcccgtggctcctgtgttcagaatgtggtattggctctggcccagccttctcccctgttacccataattcttgcctctttccataatccgtggtttcagtttgactttgtatataaagttggggtttttttttttttttttggcttgttttttaaataaaccaaagtcaaaaacaaactgagagtgtgtcctccacagctcttcctactctcctaggcttgcccgcgtgccctcccacccagcgcctctgctggaccacggtgcagttcgctccagaaggtgggccagggccggggaggtgcgcacacacccctggcatgctgggctgcctgctggagggtgctgctgctccgtggagggcagcaggcccaggaaggggtttcctctgctcgcctaagttacagcacaatactatgtggacgtttcattgaaaattttacttgaaaaaataaaattccagatactcaggtgagacacaaacccactgttcctgctttgagacctgtgaattcttgtgggacagttccactgacagcttgcgttcccgaggtaccagtcctcagtgacctcgggaaccccaaccacttaggtcccaaagccacaagggtgccctttgtcttgctgggaagctggctgagggcctgccagggctggaggaccagctctcccgcacagggttcagggcctctcccagaaaaaagaggttttgaagtgaaaaggcaacgaggggccagagggctccccaggatgggtcttttggaggtagatttgatgcccacaacgcatgcaaggctaagacccccaacttagccaacgaagcccatggcctcagaagggctgcagcttgctcaggccgtgggccaggatgcatgctggacggttctccaaataaaaaagccccaagggtttgtctacactgcttacctgctggggctgtgagtggggagacggcggcctgcctagggctcctggtgccaggctcaggaagagtcattcattgcaaagggccggcaagtgaaccagggccacctctgtccccagcctgtgagaggagcagctagccctgagaagggcaaggatgaatgaggctgaccacgtcacaggagtcctccaagagtgacggggattcagtcatcggccacaatggagagggcccggagctcactgagtttggcctcgttctcccgctcccgctgctcatcggagtggcctggctggtcaagctgatgggacaggtctccaaagatcttgtgcatttccgagtagtacacaacctgggggaggcgacaggggttggcacgtgctggctccagggaaccgtgtgcttcagggggccagaggctcacacttctctgctaccccctgcccttacccatctggagcggccaccactgtgctttgcgcatattcaggcacactggaagtatttagctgccagtaaaccgaaaccagtcgccgaacgacaaggtcagcagcaggaggaggacagcagcaggaggaggacagccgcaggaagacgn

SEQ ID NO: 424308 - DNA, 6054 bp, Homo sapiens
accagtggtcgcgcttccggagaggcgcttccggtggcggcggcagcagcggctgtggtggttccgggtgtctttgtccccccggtgtcgctgccctggcccgcagccttttccccacgactctgaaagaggacagcgttcccaatgtcccagtttaagcgccagcggatcaacccgcttccagggggacgcaacttctcaggcacagcttcaacatctcttctgggccctcctcctggtttgctcactcctcctgtggccacagaactgtcccagaatgccaggcaccttcagggtggggagaaacagcgggtcttcactggtattgttaccagcttgcatgactactttggggttgtggatgaagaggtcttttttcagctaagtgtggtgaagggccgtctgccccagctgggtgagaaggtgctggtgaaggctgcatacaacccaggccaggcagtgccctggaatgctgtcaaggtgcaaacgctctccaaccagcccctactgaagtccccagcacctcctcttctgcatgtagcagccctgggccagaagcaagggatcctgggagctcagcctcagttgatcttccagcctcaccggattcccccactctttcctcagaagcctctgagtctcttccaaacatcccacacacttcacctgagccacctgaacagatttcctgcccggggccctcatggacggttggatcagggccgaagtgatgactatgactccaagaaacgcaaacagcgggctggtggagagccctggggtgctaagaagccaaggcatgacctgcctccttaccgggtccacctcactccttacactgtggacagccccatctgtgacttcctagaactccagcgccgttaccgcagcctcctggtcccctcagattttctgtccgtgcatctgagttggctatcagccttccccctgagccagcccttttccctccatcatccaagccggatccaggtctcttctgaaaaggaggcagctccagacgctggtgctgagcccatcactgcagacagtgaccccgcttatagttcgaaggtactgctgctctcttccccggggttggaggaattgtatcgttgttgcatgctctttgtggatgacatggctgagccaagggagacgccagagcatcctctgaagcagattaagtttttgctgggcaggaaagaagaggaggcagtgctggttgggggtgaatggtctccttccctggatggcctcgacccccaggctgacccgcaggtgctggtgcgtaccgccatccgctgtgcgcaggcccagactggcattgatttgagcggctgtaccaagtggtggcgctttgccgagtttcagtacctgcagccgggacccccccggcggcttcagacagtggtggtgtacctgccggatgtctggaccatcatgcctactttggaggagtgggaggccctgtgccagcagaaagctgcagaggcagctcccccaacccaggaggcacaaggggaaacggagcctactgaacaggcacctgatgccttggagcaagcagcagacacttctagacggaacgcagaaactccagaggccaccacacagcaggaaacggacactgatctcccagaggcccctccaccccccctagaacctgctgtcatcgcacgccctggctgtgtaaacctgtccctccatgggattgtggaggatcggaggccaaaggaaaggatctcttttgaggtgatggtgctggccgagctgtttctggagatgctccagagggattttggctatagagtttataagatgctactgagccttcctgaaaaggtcgtgtccccacctgaacctgagaaggaggaggcggccaaggaagaagccaccaaggaggaagaagccatcaaagaggaggtggtcaaggagcccaaggatgaggcacagaatgagggcccggctacagagtcagaggccccgctgaaggaggatgggcttttgcccaaaccactctcttctgggggagaggaagaagaaaaaccccggggcgaggcttctgaggacctgtgtgagatggccctggacccagaactgttgcttctgagggatgatggagaggaggagtttgcaggagcaaagctggaggattcggaggtccggtccgttgcctcaaaccagtcagagatggagttctcttcacttcaggacatgcccaaggagctggatccctctgctgtgctccccttagactgtctgcttgcttttgtgttctttgatgccaactggtgtggctacttgcaccggcgagacttagagaggatcctccttacccttgggatccggctcagtgcagagcaggccaagcagctggtcagcagggtggtgacccagaacatctgccagtaccggagccttcagtacagccgccaggagggcctggatggtggccttcccgaggaggtgctcttcggaaacctggacctgctgccccctcctgggaaaagcacgaagccaggtgctgcccccacagaacacaaagccttggtgtcccacaatggcagcctgattaacgtggggagcctgctgcagcgcgcggagcagcaggacagcggccggctctacctagagaacaagatccacacactggagctgaagctggaggagagccataaccgtttctcagccactgaagtaaccaataagacgctggcggcagagatgcaggagctgcgagtccggctggcggaggccgaggagaccgcccggacggcggagcgacagaagagccagctccagcggctgctgcaggagctccgcaggcgtctgacccccctgcagctggagatccagcgggtggtggaaaaggctgacagctgggtggagaaggaggagccggcacctagcaactgacggcctcgcacggaactgccatcctgtgagggcagcggtggcgcccggcaaagttggagcccttgcggtaccagaaagcagcgagagcgagacctgggagccagggcaggggtggctgaccccatgctcagcctctaggggacggcaggccatcaggctgggggctgtgctatgtgggatggatgtgtgaggaaccccggttccacttaacaactaaatacaacatcttttgcacccctagaatgtcattttgccctcaaccttggtatttctcctggggcccttttagtcttgtgctgactttctcctgtcctcttccagtttagaataagacaggggagaaaaaggcttttcgagtgtgggacaaggtctgatgtcagtgaacggaactgaagagcaagacatggagcctggctggggctaagcagccccctcctccggatggcacaggctctgctaggttccggacacaggcttctgggggaagggtctcccttggccatcacgggaatggagtccatgctagaaagagctcagtgttgggctgggtttgccagtagaacactgcgttccagtcaccccggtcttgccagaagaaaccagcacctctttcccgtggctcctgtgttcagaatgtggtattggctctggcccagccttctcccctgttacccataattcttgcctctttccataatccgtggtttcagtttgactttgtatataaagttggggtttttttttttttttttggcttgttttttaaataaaccaaagtcaaaaacaaactgagagtgtgtcctccacagctcttcctactctcctaggcttgcccgcgtgccctcccacccagcgcctctgctggaccacggtgcagttcgctccagaaggtgggccagggccggggaggtgcgcacacacccctggcatgctgggctgcctgctggagggtgctgctgctccgtggagggcagcaggcccaggaaggggtttcctctgctcgcctaagttacagcacaatactatgtggacgtttcattgaaaattttacttgaaaaaataaaattccagatactcaggtgagacacaaaaaaaaaaaaaaaaaactcgagactagttctctcggcggatatggctgcagagcggccggctgggatcttagataggaggggtggatttgcaaggcctagaatagctggggagtggtttccccgcggaatcggcctccctgccgctcctgctttgtactgtgacgctcagcctgtgatgactggtgtggaatccgctgagccaccttggcctaaggagactttaccactctgagattgtaaatctgtaaaatagagatgtaggattagcccatacggtagttgtggtaaatactgtgagacaataaggggcctgggacacagcattcaaatgggaataatgaaggtcaagactgtgattcctgtatctttgacgctctcggtataagcaccgtcgtgggcacagggcagtggcctttatgcaggagtttaagagggaatgaaggaatgaatgggcaaactctggagttcccaagtattctctccaggagctgtttccattcttttcgtttccagcaggttggtaaattcattaatttattcattgatctaattaaaatatactaagtgcccctcacctgtgctaggccaatgtgatacaatgagcagaacagtcatgggccctccctgggaagccctcactagcccaaggactccttgtagacatttaagtgtccacaggctctggagttccaaccttgagtgcaatttagcagctgtggaccttgggcaagtcattacatctaagcctgttttctcttctgcaaaatggttaaggattcaataagataaaactgtaggcaatgaaaaccgtacctggtaacagtaggtgctgaagaagtgttagctattaatttttgcttaatttttctctctctgctctatgtgatgaaaagattcaagaggcaattgttggaatgtaaaaagagcacgggacttggagtcaaatacttaagtctaccatcaagtagttgttaagaattaaacaacaatttttgtgtacccagttaaatgtgggctgcttaggaatgatgactgtgtcttaatgatctctgtattcttagtgacatgtagaatcattgtgcctgacacatagtatgtactcaggaaagaaatggaaaatgtggttttagcattgaaggccgggagagagggtctaacagactacaagccctgccaggagcagagtaagggaaacagaggagaaaagtgtttttagtctgtgcctgaatgtatttacatctgtttgtagcccaaaagccaaaagcgtacatacgcttggcttttctgtagctatgtttatggctttacagcagattttatggagctgcaattactttgatcatgagggactgatgctagtggatttacttcaccaaatggaactcactttgtggcttctgaagaagggacctttgtggactgtcatggagtagttaagagtgcaggctctgatttagtgatcagagtctgcattgtcaggaatgggacaaagtgaagttatgtggcacttgataggatgccctgagaagattgcaacatcacccctgtgatattcctgctgaagatccataacctggatgtaatcatgaggatatatcagacaaacccacgtaaagagacatgctgtatacaaaactgtaatcttagaaagtgccaaggtcatgaaaatcaaagatagaccctggaactgttccaaactggaggggaccaaagaggcatgacgactaaacacaacacatgattctgaactggatctttttgcttgaaaggaagttacagggacagttggaaaagtttaaatggggcctacgatgccgtggtaatgatgtgtccgtgttaatttcctgattttcatggttgcctgttaagttacatcagaggatgttcttgtttgctggaaagtaaatcaatgtatttggcaggggataaggcatcaaatggtcaccttaatttcaaattattacagggaaaatgtttctctctgtacttaataacttttttgcaatttcttaaaatgaaagctctggagtaaaaacttcaaggatcc

SEQ ID NO: 424309 - DNA, 3255 bp, Homo sapiens
  misc_feature (3255)..(3255): n is a, c, g, or t
atgcttactattggtaattatggtaactgcctgccttttccttataacctttgtctgcctctgtagaaggaggatgggcttttgcccaaaccactctcttctgggggagaggaagaagaaaaaccccggggcgaggcttctgaggacctgtgtgagatggccctggacccagaactgttgcttctgagggatgatggagaggaggagtttggtatgttgagtggtgagaggggagcttgcaggcttgggatgtggctttccacctgtggccaagctggttttcatttttgtactgtggagttgggtgggccctgctctccatttatcttggcctttctgtagcaggagcaaagctggaggattcggaggtccggtccgttgcctcaaaccagtcagagatggagttctcttcacttcaggacatgcccaaggagctggatccctctgctgtgctccccttagactgtctgcttgcttttgtgttctttgatgccaactggtgtggctacttgcaccggcgagacttagagaggatcctccttacccttgggatccggctcagtgcagagcaggccaagcagctggtcagcagggtggtgacccagaacatctgccagtaccggagccttcagtacagccgccaggagggcctggatggtggccttcccgaggaggtgctcttcggaaacctggacctgctgccccctcctgggaaaagcacgaagccaggtgctgcccccacagaacacaaagccttggtgtcccacaatggcagcctgattaacgtggggagcctgctgcagcgcgcggagcagcaggacagcggccggctctacctagagaacaagatccacacactggagctgaagctggaggagagccataaccgtttctcagccactgaagtaaccaataagacgctggcggcagagatgcaggagctgcgagtccggctggcggaggccgaggagaccgcccggacggcggagcgacagaagagccagctccagcggctgctgcaggagctccgcaggcgtctgacccccctgcagctggagatccagcgggtggtggaaaaggctgacagctgggtggagaaggaggagccggcacctagcaactgacggcctcgcacggaactgccatcctgtgagggcagcggtggcgcccggcaaagttggagcccttgcggtaccagaaagcagcgagagcgagacctgggagccagggcaggggtggctgaccccatgctcagcctctaggggacggcaggccatcaggctgggggctgtgctatgtgggatggatgtgtgaggaaccccggttccacttaacaactaaatacaacatcttttgcacccctagaatgtcattttgccctcaaccttggtatttctcctggggcccttttagtcttgtgctgactttctcctgtcctcttccagtttagaataagacaggggagaaaaaggcttttcgagtgtgggacaaggtctgatgtcagtgaacggaactgaagagcaagacatggagcctggctggggctaagcagccccctcctccggatggcacaggctctgctaggttccggacacaggcttctgggggaagggtctcccttggccatcacgggaatggagtccatgctagaaagagctcagtgttgggctgggtttgccagtagaacactgcgttccagtcaccccggtcttgccagaagaaaccagcacctctttcccgtggctcctgtgttcagaatgtggtattggctctggcccagccttctcccctgttacccataattcttgcctctttccataatccgtggtttcagtttgactttgtatataaagttggggtttttttttttttttttggcttgttttttaaataaaccaaagtcaaaaacaaactgagagtgtgtcctccacagctcttcctactctcctaggcttgcccgcgtgccctcccacccagcgcctctgctggaccacggtgcagttcgctccagaaggtgggccagggccggggaggtgcgcacacacccctggcatgctgggctgcctgctggagggtgctgctgctccgtggagggcagcaggcccaggaaggggtttcctctgctcgcctaagttacagcacaatactatgtggacgtttcattgaaaattttacttgaaaaaataaaattccagatactcaggtgagacacaaacccactgttcctgctttgagacctgtgaattcttgtgggacagttccactgacagcttgcgttcccgaggtaccagtcctcagtgacctcgggaaccccaaccacttaggtcccaaagccacaagggtgccctttgtcttgctgggaagctggctgagggcctgccagggctggaggaccagctctcccgcacagggttcagggcctctcccagaaaaaagaggttttgaagtgaaaaggcaacgaggggccagagggctccccaggatgggtcttttggaggtagatttgatgcccacaacgcatgcaaggctaagacccccaacttagccaacgaagcccatggcctcagaagggctgcagcttgctcaggccgtgggccaggatgcatgctggacggttctccaaataaaaaagccccaagggtttgtctacactgcttacctgctggggctgtgagtggggagacggcggcctgcctagggctcctggtgccaggctcaggaagagtcattcattgcaaagggccggcaagtgaaccagggccacctctgtccccagcctgtgagaggagcagctagccctgagaagggcaaggatgaatgaggctgaccacgtcacaggagtcctccaagagtgacggggattcagtcatcggccacaatggagagggcccggagctcactgagtttggcctcgttctcccgctcccgctgctcatcggagtggcctggctggtcaagctgatgggacaggtctccaaagatcttgtgcatttccgagtagtacacaacctgggggaggcgacaggggttggcacgtgctggctccagggaaccgtgtgcttcagggggccagaggctcacacttctctgctaccccctgcccttacccatctggagcggccaccactgtgctttgcgcatattcaggcacactggaagtatttagctgccagtaaaccgaaaccagtcgccgaacgacaaggtcagcagcaggaggaggacagcagcaggaggaggacagccgcaggaagacgn

SEQ ID NO: 424310 - DNA, 2898 bp, Homo sapiens
  misc_feature (2898)..(2898): n is a, c, g, or t
gcaggctggtaccggcccggggtagggataaccagtcagagatggagttctcttcacttcaggacatccccaaggagctggatccctctgctgtgctccccttagactgtctgcttgcttttgtgttctttgatgccaactggtgtggctacttgcaccggcgagacttagagaggatcctccttacccttgggatccggctcagtgcagagcaggccaagcagctggtcagcagggtggtgacccagaacatctgccagtaccggagccttcagtacagccgccaggagggcctggatggtggccttcccgaggaggtgctcttcggaaacctggacctgctgccccctcctgggaaaagcacgaagccaggtgctgcccccacagaacacaaagccttggtgtcccacaatggcagcctgattaacgtggggagcctgctgcagcgcgcggagcagcaggacagcggccggctctacctagagaacaagatccacacactggagctgaagctggaggagagccataaccgtttctcagccactgaagtaaccaataagacgctggcggcagagatgcaggagctgcgagtccggctggcggaggccgaggagaccgcccggacggcggagcgacagaagagccagctccagcggctgctgcaggagctccgcaggcgtctgacccccctgcagctggagatccagcgggtggtggaaaaggctgacagctgggtggagaaggaggagccggcacctagcaactgacggcctcgcacggaactgccatcctgtgagggcagcggtggcgcccggcaaagttggagcccttgcggtaccagaaagcagcgagagcgagacctgggagccagggcaggggtggctgaccccatgctcagcctctaggggacggcaggccatcaggctgggggctgtgctatgtgggatggatgtgtgaggaaccccggttccacttaacaactaaatacaacatcttttgcacccctagaatgtcattttgccctcaaccttggtatttctcctggggcccttttagtcttgtgctgactttctcctgtcctcttccagtttagaataagacaggggagaaaaaggcttttcgagtgtgggacaaggtctgatgtcagtgaacggaactgaagagcaagacatggagcctggctggggctaagcagccccctcctccggatggcacaggctctgctaggttccggacacaggcttctgggggaagggtctcccttggccatcacgggaatggagtccatgctagaaagagctcagtgttgggctgggtttgccagtagaacactgcgttccagtcaccccggtcttgccagaagaaaccagcacctctttcccgtggctcctgtgttcagaatgtggtattggctctggcccagccttctcccctgttacccataattcttgcctctttccataatccgtggtttcagtttgactttgtatataaagttggggtttttttttttttttttggcttgttttttaaataaaccaaagtcaaaaacaaactgagagtgtgtcctccacagctcttcctactctcctaggcttgcccgcgtgccctcccacccagcgcctctgctggaccacggtgcagttcgctccagaaggtgggccagggccggggaggtgcgcacacacccctggcatgctgggctgcctgctggagggtgctgctgctccgtggagggcagcaggcccaggaaggggtttcctctgctcgcctaagttacagcacaatactatgtggacgtttcattgaaaattttacttgaaaaaataaaattccagatactcaggtgagacacaaacccactgttcctgctttgagacctgtgaattcttgtgggacagttccactgacagcttgcgttcccgaggtaccagtcctcagtgacctcgggaaccccaaccacttaggtcccaaagccacaagggtgccctttgtcttgctgggaagctggctgagggcctgccagggctggaggaccagctctcccgcacagggttcagggcctctcccagaaaaaagaggttttgaagtgaaaaggcaacgaggggccagagggctccccaggatgggtcttttggaggtagatttgatgcccacaacgcatgcaaggctaagacccccaacttagccaacgaagcccatggcctcagaagggctgcagcttgctcaggccgtgggccaggatgcatgctggacggttctccaaataaaaaagccccaagggtttgtctacactgcttacctgctggggctgtgagtggggagacggcggcctgcctagggctcctggtgccaggctcaggaagagtcattcattgcaaagggccggcaagtgaaccagggccacctctgtccccagcctgtgagaggagcagctagccctgagaagggcaaggatgaatgaggctgaccacgtcacaggagtcctccaagagtgacggggattcagtcatcggccacaatggagagggcccggagctcactgagtttggcctcgttctcccgctcccgctgctcatcggagtggcctggctggtcaagctgatgggacaggtctccaaagatcttgtgcatttccgagtagtacacaacctgggggaggcgacaggggttggcacgtgctggctccagggaaccgtgtgcttcagggggccagaggctcacacttctctgctaccccctgcccttacccatctggagcggccaccactgtgctttgcgcatattcaggcacactggaagtatttagctgccagtaaaccgaaaccagtcgccgaacgacaaggtcagcagcaggaggaggacagcagcaggaggaggacagccgcaggaagacgn

SEQ ID NO: 424311 - DNA, 3810 bp, Homo sapiens
  misc_feature (3810)..(3810): n is a, c, g, or t
accagtggtcgcgcttccggagaggcgcttccggtggcggcggcagcagcggctgtggtggttccgggtgtctttgtccccccggtgtcgctgccctggcccgcagccttttccccacgactctgaaagaggacagcgttcccaatgtcccagtttaagcgccagcggatcaacccgcttccagggggacgcaacttctcaggcacagcttcaacatctcttctgggccctcctcctggtttgctcactcctcctgtggccacagaactgtcccagaatgccaggcaccttcagggtggggagaaacagcgggtcttcactggtattgttaccagcttgcatgactactttggggttgtggatgaagaggtcttttttcagctaagtgtggtgaagggccgtctgccccagctgggtgagaaggtgctggtgaaggctgcatacaacccaggccaggcagtgccctggaatgctgtcaaggtgcaaacgctctccaaccagcccctactgaagtccccagcacctcctcttctgcatgtagcagccctgggccagaagcaagggatcctgggagctcagcctcagttgatcttccagcctcaccggattcccccactctttcctcagaagcctctgagtctcttccaaacatcccacacacttcacctgagccacctgaacagatttcctgcccggggccctcatggacggttggatcagggccgaagtgatgactatgactccaagaaacgcaaacagcgggctggtggagagccctggggtgctaagaagccaaggcatgacctgcctccttaccgggtccacctcactccttacactgtggacagccccatctgtgacttcctagaactccagcgccgttaccgcagcctcctggtcccctcagattttctgtccgtgcatctgagttggctatcagccttccccctgagccagcccttttccctccatcatccaagccggatccaggtctcttctgaaaaggaggcagctccagacgctggtgctgagcccatcactgcagacagtgaccccgcttatagttcgaaggtactgctgctctcttccccggggttggaggaattgtatcgttgttgcatgctctttgtggatgacatggctgagccaagggagacgccagagcatcctctgaagcagattaagtttttgctgggcaggaaagaagaggaggcagtgctggttgggggtgaatggtctccttccctggatggcctcgacccccaggctgacccgcaggtgctggtgcgtaccgccatccgctgtgcgcaggcccagactggcattgatttgagcggctgtaccaagtggtggcgctttgccgagtttcagtacctgcagccgggacccccccggcggcttcagacagtggtggtgtacctgccggatgtctggaccatcatgcctactttggaggagtgggaggccctgtgccagcagaaagctgcagaggcagctcccccaacccaggaggcacaaggggaaacggagcctactgaacaggcacctgatgccttggagcaagcagcagacacttctagacggaacgcagaaactccagaggccaccacacagcaggaaacggacactgatctcccagaggcccctccaccccccctagaacctgctgtcatcgcacgccctggctgtgtaaacctgtccctccatgggattgtggaggatcggaggccaaaggaaaggatctcttttgaggtgatggtgctggccgagctgtttctggagatgctccagagggattttggctatagagtttataagatgctactgagccttcctgaaaaggtcgtgtccccacctgaacctgagaaggaggaggcggccaaggaagaagccaccaaggaggaagaagccatcaaagaggaggtggtcaaggagcccaaggatgaggcacagaatgagggcccggctacagagtcagaggccccgctgaaggaggatgggcttttgcccaaaccactctcttctgggggagaggaagaagaaaaaccccggggcgaggcttctgaggacctgtgtgagatggccctggacccagaactgttgcttctgagggatgatggagaggaggagtttgcaggagcaaagctggaggattcggaggtccggtccgttgcctcaaaccagtcagagatggatccatgctagaaagagctcagtgttgggctgggtttgccagtagaacactgcgttccagtcaccccggtcttgccagaagaaaccagcacctctttcccgtggctcctgtgttcagaatgtggtattggctctggcccagccttctcccctgttacccataattcttgcctctttccataatccgtggtttcagtttgactttgtatataaagttggggtttttttttttttttttggcttgttttttaaataaaccaaagtcaaaaacaaactgagagtgtgtcctccacagctcttcctactctcctaggcttgcccgcgtgccctcccacccagcgcctctgctggaccacggtgcagttcgctccagaaggtgggccagggccggggaggtgcgcacacacccctggcatgctgggctgcctgctggagggtgctgctgctccgtggagggcagcaggcccaggaaggggtttcctctgctcgcctaagttacagcacaatactatgtggacgtttcattgaaaattttacttgaaaaaataaaattccagatactcaggtgagacacaaacccactgttcctgctttgagacctgtgaattcttgtgggacagttccactgacagcttgcgttcccgaggtaccagtcctcagtgacctcgggaaccccaaccacttaggtcccaaagccacaagggtgccctttgtcttgctgggaagctggctgagggcctgccagggctggaggaccagctctcccgcacagggttcagggcctctcccagaaaaaagaggttttgaagtgaaaaggcaacgaggggccagagggctccccaggatgggtcttttggaggtagatttgatgcccacaacgcatgcaaggctaagacccccaacttagccaacgaagcccatggcctcagaagggctgcagcttgctcaggccgtgggccaggatgcatgctggacggttctccaaataaaaaagccccaagggtttgtctacactgcttacctgctggggctgtgagtggggagacggcggcctgcctagggctcctggtgccaggctcaggaagagtcattcattgcaaagggccggcaagtgaaccagggccacctctgtccccagcctgtgagaggagcagctagccctgagaagggcaaggatgaatgaggctgaccacgtcacaggagtcctccaagagtgacggggattcagtcatcggccacaatggagagggcccggagctcactgagtttggcctcgttctcccgctcccgctgctcatcggagtggcctggctggtcaagctgatgggacaggtctccaaagatcttgtgcatttccgagtagtacacaacctgggggaggcgacaggggttggcacgtgctggctccagggaaccgtgtgcttcagggggccagaggctcacacttctctgctaccccctgcccttacccatctggagcggccaccactgtgctttgcgcatattcaggcacactggaagtatttagctgccagtaaaccgaaaccagtcgccgaacgacaaggtcagcagcaggaggaggacagcagcaggaggaggacagccgcaggaagacgn

SEQ ID NO: 424312 - DNA, 4746 bp, Homo sapiens
  misc_feature (4746)..(4746): n is a, c, g, or t
accagtggtcgcgcttccggagaggcgcttccggtggcggcggcagcagcggctgtggtggttccgggtgtctttgtccccccggtgtcgctgccctggcccgcagccttttccccacgactctgaaagaggacagcgttcccaatgtcccagtttaagcgccagcggatcaacccgcttccagggggacgcaacttctcaggcacagcttcaacatctcttctgggccctcctcctggtttgctcactcctcctgtggccacagaactgtcccagaatgccaggcaccttcagggtggggagaaacagcgggtcttcactggtattgttaccagcttgcatgactactttggggttgtggatgaagaggtcttttttcagctaagtgtggtgaagggccgtctgccccagctgggtgagaaggtgctggtgaaggctgcatacaacccaggccaggcagtgccctggaatgctgtcaaggtgcaaacgctctccaaccagcccctactgaagtccccagcacctcctcttctgcatgtagcagccctgggccagaagcaagggatcctgggagctcagcctcagttgatcttccagcctcaccggattcccccactctttcctcagaagcctctgagtctcttccaaacatcccacacacttcacctgagccacctgaacagatttcctgcccggggccctcatggacggttggatcagggccgaagtgatgactatgactccaagaaacgcaaacagcgggctggtggagagccctggggtgctaagaagccaaggcatgacctgcctccttaccgggtccacctcactccttacactgtggacagccccatctgtgacttcctagaactccagcgccgttaccgcagcctcctggtcccctcagattttctgtccgtgcatctgagttggctatcagccttccccctgagccagcccttttccctccatcatccaagccggatccaggtctcttctgaaaaggaggcagctccagacgctggtgctgagcccatcactgcagacagtgaccccgcttatagttcgaaggtactgctgctctcttccccggggttggaggaattgtatcgttgttgcatgctctttgtggatgacatggctgagccaagggagacgccagagcatcctctgaagcagattaagtttttgctgggcaggaaagaagaggaggcagtgctggttgggggtgaatggtctccttccctggatggcctcgacccccaggctgacccgcaggtgctggtgcgtaccgccatccgctgtgcgcaggcccagactggcattgatttgagcggctgtaccaagtggtggcgctttgccgagtttcagtacctgcagccgggacccccccggcggcttcagacagtggtggtgtacctgccggatgtctggaccatcatgcctactttggaggagtgggaggccctgtgccagcagaaagctgcagaggcagctcccccaacccaggaggcacaaggggaaacggagcctactgaacaggcacctgatgccttggagcaagcagcagacacttctagacggaacgcagaaactccagaggccaccacacagcaggaaacggacactgatctcccagaggcccctccaccccccctagaacctgctgtcatcgcacgccctggctgtgtaaacctgtccctccatgggattgtggaggatcggaggccaaaggaaaggatctcttttgaggtgatggtgctggccgagctgtttctggagatgctccagagggattttggctatagagtttataagatgctactgagccttcctgaaaaggtcgtgtccccacctgaacctgagaaggaggaggcggccaaggaagaagccaccaaggaggaagaagccatcaaagaggaggtggtcaaggagcccaaggatgaggcacagaatgagggcccggctacagagtcagaggccccgctgaaggaggatgggcttttgcccaaaccactctcttctgggggagaggaagaagaaaaaccccggggcgaggcttctgaggacctgtgtgagatggccctggacccagaactgttgcttctgagggatgatggagaggaggagtttgcaggagcaaagctggaggattcggaggtccggtccgttgcctcaaaccagtcagagatggagttctcttcacttcaggacatgcccaaggagctggatccctctgctgtgctccccttagactgtctgcttgcttttgtgttctttgatgccaactggtgtggctacttgcaccggcgagacttagagaggatcctccttacccttgggatccggctcagtgcagagcaggccaagcagctggtcagcagggtggtgacccagaacatctgccagtaccggagccttcagtacagccgccaggagggcctggatggtggccttcccgaggaggtgctcttcggaaacctggacctgctgccccctcctgggaaaagcacgaagccaggtgctgcccccacagaacacaaagccttggtgtcccacaatggcagcctgattaacgtggggagcctgctgcagcgcgcggagcagcaggacagcggccggctctacctagagaacaagatccacacactggagctgaagctggaggagagccataaccgtttctcagccactgaagtaaccaataagacgctggcggcagagatgcaggagctgcgagtccggctggcggaggccgaggagaccgcccggacggcggagcgacagaagagccagctccagcggctgctgcaggagctccgcaggcgtctgacccccctgcagctggagatccagcgggtggtggaaaaggctgacagctgggtggagaaggaggagccggcacctagcaactgacggcctcgcacggaactgccatcctgtgagggcagcggtggcgcccggcaaagttggagcccttgcggtaccagaaagcagcgagagcgagacctgggagccagggcaggggtggctgaccccatgctcagcctctaggggacggcaggccatcaggctgggggctgtgctatgtgggatggatgtgtgaggaaccccggttccacttaacaactaaatacaacatcttttgcacccctagaatgtcattttgccctcaaccttggtatttctcctggggcccttttagtcttgtgctgactttctcctgtcctcttccagtttagaataagacaggggagaaaaaggcttttcgagtgtgggacaaggtctgatgtcagtgaacggaactgaagagcaagacatggagcctggctggggctaagcagccccctcctccggatggcacaggctctgctaggttccggacacaggcttctgggggaagggtctcccttggccatcacgggaatggagtccatgctagaaagagctcagtgttgggctgggtttgccagtagaacactgcgttccagtcaccccggtcttgccagaagaaaccagcacctctttcccgtggctcctgtgttcagaatgtggtattggctctggcccagccttctcccctgttacccataattcttgcctctttccataatccgtggtttcagtttgactttgtatataaagttggggtttttttttttttttttggcttgttttttaaataaaccaaagtcaaaaacaaactgagagtgtgtcctccacagctcttcctactctcctaggcttgcccgcgtgccctcccacccagcgcctctgctggaccacggtgcagttcgctccagaaggtgggccagggccggggaggtgcgcacacacccctggcatgctgggctgcctgctggagggtgctgctgctccgtggagggcagcaggcccaggaaggggtttcctctgctcgcctaagttacagcacaatactatgtggacgtttcattgaaaattttacttgaaaaaataaaattccagatactcaggtgagacacaaacccactgttcctgctttgagacctgtgaattcttgtgggacagttccactgacagcttgcgttcccgaggtaccagtcctcagtgacctcgggaaccccaaccacttaggtcccaaagccacaagggtgccctttgtcttgctctgctggggctgtgagtggggagacggcggcctgcctagggctcctggtgccaggctcaggaagagtcattcattgcaaagggccggcaagtgaaccagggccacctctgtccccagcctgtgagaggagcagctagccctgagaagggcaaggatgaatgaggctgaccacgtcacaggagtcctccaagagtgacggggattcagtcatcggccacaatggagagggcccggagctcactgagtttggcctcgttctcccgctcccgctgctcatcggagtggcctggctggtcaagctgatgggacaggtctccaaagatcttgtgcatttccgagtagtacacaacctgggggaggcgacaggggttggcacgtgctggctccagggaaccgtgtgcttcagggggccagaggctcacacttctctgctaccccctgcccttacccatctggagcggccaccactgtgctttgcgcatattcaggcacactggaagtatttagctgccagtaaaccgaaaccagtcgccgaacgacaaggtcagcagcaggaggaggacagcagcaggaggaggacagccgcaggaagacgn

SEQ ID NO: 424313 - DNA, 5048 bp, Homo sapiens
  misc_feature (4031)..(4032): n is a, c, g, or t
  misc_feature (4037)..(4038): n is a, c, g, or t
  misc_feature (4083)..(4084): n is a, c, g, or t
  misc_feature (5048)..(5048): n is a, c, g, or t
accagtggtcgcgcttccggagaggcgcttccggtggcggcggcagcagcggctgtggtggttccgggtgtctttgtccccccggtgtcgctgccctggcccgcagccttttccccacgactctgaaagaggacagcgttcccaatgtcccagtttaagcgccagcggatcaacccgcttccagggggacgcaacttctcaggcacagcttcaacatctcttctgggccctcctcctggtttgctcactcctcctgtggccacagaactgtcccagaatgccaggcaccttcagggtggggagaaacagcgggtcttcactggtattgttaccagcttgcatgactactttggggttgtggatgaagaggtcttttttcagctaagtgtggtgaagggccgtctgccccagctgggtgagaaggtgctggtgaaggctgcatacaacccaggccaggcagtgccctggaatgctgtcaaggtgcaaacgctctccaaccagcccctactgaagtccccagcacctcctcttctgcatgtagcagccctgggccagaagcaagggatcctgggagctcagcctcagttgatcttccagcctcaccggattcccccactctttcctcagaagcctctgagtctcttccaaacatcccacacacttcacctgagccacctgaacagatttcctgcccggggccctcatggacggttggatcagggccgaagtgatgactatgactccaagaaacgcaaacagcgggctggtggagagccctggggtgctaagaagccaaggcatgacctgcctccttaccgggtccacctcactccttacactgtggacagccccatctgtgacttcctagaactccagcgccgttaccgcagcctcctggtcccctcagattttctgtccgtgcatctgagttggctatcagccttccccctgagccagcccttttccctccatcatccaagccggatccaggtctcttctgaaaaggaggcagctccagacgctggtgctgagcccatcactgcagacagtgaccccgcttatagttcgaaggtactgctgctctcttccccggggttggaggaattgtatcgttgttgcatgctctttgtggatgacatggctgagccaagggagacgccagagcatcctctgaagcagattaagtttttgctgggcaggaaagaagaggaggcagtgctggttgggggtgaatggtctccttccctggatggcctcgacccccaggctgacccgcaggtgctggtgcgtaccgccatccgctgtgcgcaggcccagactggcattgatttgagcggctgtaccaagtggtggcgctttgccgagtttcagtacctgcagccgggacccccccggcggcttcagacagtggtggtgtacctgccggatgtctggaccatcatgcctactttggaggagtgggaggccctgtgccagcagaaagctgcagaggcagctcccccaacccaggaggcacaaggggaaacggagcctactgaacaggcacctgatgccttggagcaagcagcagacacttctagacggaacgcagaaactccagaggccaccacacagcaggaaacggacactgatctcccagaggcccctccaccccccctagaacctgctgtcatcgcacgccctggctgtgtaaacctgtccctccatgggattgtggaggatcggaggccaaaggaaaggatctcttttgaggtgatggtgctggccgagctgtttctggagatgctccagagggattttggctatagagtttataagatgctactgagccttcctgaaaaggtcgtgtccccacctgaacctgagaaggaggaggcggccaaggaagaagccaccaaggaggaagaagccatcaaagaggaggtggtcaaggagcccaaggatgaggcacagaatgagggcccggctacagagtcagaggccccgctgaaggaggatgggcttttgcccaaaccactctcttctgggggagaggaagaagaaaaaccccggggcgaggcttctgaggacctgtgtgagatggccctggacccagaactgttgcttctgagggatgatggagaggaggagtttgcaggagcaaagctggaggattcggaggtccggtccgttgcctcaaaccagtcagagatggagttctcttcacttcaggacatgcccaaggagctggatccctctgctgtgctccccttagactgtctgcttgcttttgtgttctttgatgccaactggtgtggctacttgcaccggcgagacttagagaggatcctccttacccttgggatccggctcagtgcagagcaggccaagcagctggtcagcagggtggtgacccagaacatctgccagtaccggagccttcagtacagccgccaggagggcctggatggtggccttcccgaggaggtgctcttcggaaacctggacctgctgccccctcctgggaaaagcacgaagccaggtgctgcccccacagaacacaaagccttggtgtcccacaatggcagcctgattaacgtggggagcctgctgcagcgcgcggagcagcaggacagcggccggctctacctagagaacaagatccacacactggagctgaagctggaggagagccataaccgtttctcagccactgaagtaaccaataagacgctggcggcagagatgcaggagctgcgagtccggctggcggaggccgaggagaccgcccggacggcggagcgacagaagagccagctccagcggctgctgcaggagctccgcaggcgtctgacccccctgcagctggagatccagcgggtggtggaaaaggctgacagctgggtggagaaggaggagccggcacctagcaactgacggcctcgcacggaactgccatcctgtgagggcagcggtggcgcccggcaaagttggagcccttgcggtaccagaaagcagcgagagcgagacctgggagccagggcaggggtggctgaccccatgctcagcctctaggggacggcaggccatcaggctgggggctgtgctatgtgggatggatgtgtgaggaaccccggttccacttaacaactaaatacaacatcttttgcacccctagaatgtcattttgccctcaaccttggtatttctcctggggcccttttagtcttgtgctgactttctcctgtcctcttccagtttagaataagacaggggagaaaaaggcttttcgagtgtgggacaaggtctgatgtcagtgaacggaactgaagagcaagacatggagcctggctggggctaagcagccccctcctccggatggcacaggctctgctaggttccggacacaggcttctgggggaagggtctcccttggccatcacgggaatggagtccatgctagaaagagctcagtgttgggctgggtttgccagtagaacactgcgttccagtcaccccggtcttgccagaagaaaccagcacctctttcccgtggctcctgtgttcagaatgtggtattggctctggcccagccttctcccctgttacccataattcttgcctctttccataatccgtggtttcagtttgactttgtatataaagttggggtttttttttttttttttggcttgttttttaaataaaccaaagtcaaaaacaaactgagagtgtgtcctccacagctcttcctactctcctaggcttgcccgcgtgccctcccacccagcgcctctgctggaccacggtgcagttcgctccagaaggtgggccagggccggggaggtgcgcacacacccctggcatgctgggctgcctgctggagggtgctgctgctccgtggagggcagcaggcccaggaaggggtttcctctgctcgcctaagttacagcacaatactatgtggacgtttcattgaaaattttacttgaaaaaataaaattccagatactcaggtgagacacaaacccactgttcctgctttgagactnncggtnntttttgggggggggtaactacggtattttgttccccggtgggctnnttctctgggttaggggacaacccctttttggggagccaaacaacgggggctttttttttgtgggggagggaagctggctgagggcctgccagggctggaggaccagctctcccgcacagggttcagggcctctcccagaaaaaagaggttttgaagtgaaaaggcaacgaggggccagagggctccccaggatgggtcttttggaggtagatttgatgcccacaacgcatgcaaggctaagacccccaacttagccaacgaagcccatggcctcagaagggctgcagcttgctcaggccgtgggccaggatgcatgctggacggttctccaaataaaaaagccccaagggtttgtctacactgcttacctgctggggctgtgagtggggagacggcggcctgcctagggctcctggtgccaggctcaggaagagtcattcattgcaaagggccggcaagtgaaccagggccacctctgtccccagcctgtgagaggagcagctagccctgagaagggcaaggatgaatgaggctgaccacgtcacaggagtcctccaagagtgacggggattcagtcatcggccacaatggagagggcccggagctcactgagtttggcctcgttctcccgctcccgctgctcatcggagtggcctggctggtcaagctgatgggacaggtctccaaagatcttgtgcatttccgagtagtacacaacctgggggaggcgacaggggttggcacgtgctggctccagggaaccgtgtgcttcagggggccagaggctcacacttctctgctaccccctgcccttacccatctggagcggccaccactgtgctttgcgcatattcaggcacactggaagtatttagctgccagtaaaccgaaaccagtcgccgaacgacaaggtcagcagcaggaggaggacagcagcaggaggaggacagccgcaggaagacgn

SEQ ID NO: 424314 - DNA, 3901 bp, Homo sapiens
  misc_feature (3706)..(3706): n is a, c, g, or t
  misc_feature (3801)..(3801): n is a, c, g, or t
  misc_feature (3858)..(3858): n is a, c, g, or t
  misc_feature (3876)..(3876): n is a, c, g, or t
accagtggtcgcgcttccggagaggcgcttccggtggcggcggcagcagcggctgtggtggttccgggtgtctttgtccccccggtgtcgctgccctggcccgcagccttttccccacgactctgaaagaggacagcgttcccaatgtcccagtttaagcgccagcggatcaacccgcttccagggggacgcaacttctcaggcacagcttcaacatctcttctgggccctcctcctggtttgctcactcctcctgtggccacagaactgtcccagaatgccaggcaccttcagggtggggagaaacagcgggtcttcactggtattgttaccagcttgcatgactactttggggttgtggatgaagaggtcttttttcagctaagtgtggtgaagggccgtctgccccagctgggtgagaaggtgctggtgaaggctgcatacaacccaggccaggcagtgccctggaatgctgtcaaggtgcaaacgctctccaaccagcccctactgaagtccccagcacctcctcttctgcatgtagcagccctgggccagaagcaagggatcctgggagctcagcctcagttgatcttccagcctcaccggattcccccactctttcctcagaagcctctgagtctcttccaaacatcccacacacttcacctgagccacctgaacagatttcctgcccggggccctcatggacggttggatcagggccgaagtgatgactatgactccaagaaacgcaaacagcgggctggtggagagccctggggtgctaagaagccaaggcatgacctgcctccttaccgggtccacctcactccttacactgtggacagccccatctgtgacttcctagaactccagcgccgttaccgcagcctcctggtcccctcagattttctgtccgtgcatctgagttggctatcagccttccccctgagccagcccttttccctccatcatccaagccggatccaggtctcttctgaaaaggaggcagctccagacgctggtgctgagcccatcactgcagacagtgaccccgcttatagttcgaaggtactgctgctctcttccccggggttggaggaattgtatcgttgttgcatgctctttgtggatgacatggctgagccaagggagacgccagagcatcctctgaagcagattaagtttttgctgggcaggaaagaagaggaggcagtgctggttgggggtgaatggtctccttccctggatggcctcgacccccaggctgacccgcaggtgctggtgcgtaccgccatccgctgtgcgcaggcccagactggcattgatttgagcggctgtaccaagtggtggcgctttgccgagtttcagtacctgcagccgggacccccccggcggcttcagacagtggtggtgtacctgccggatgtctggaccatcatgcctactttggaggagtgggaggccctgtgccagcagaaagctgcagaggcagctcccccaacccaggaggcacaaggggaaacggagcctactgaacaggcacctgatgccttggagcaagcagcagacacttctagacggaacgcagaaactccagaggccaccacacagcaggaaacggacactgatctcccagaggcccctccaccccccctagaacctgctgtcatcgcacgccctggctgtgtaaacctgtccctccatgggattgtggaggatcggaggccaaaggaaaggatctcttttgaggtgatggtgctggccgagctgtttctggagatgctccagagggattttggctatagagtttataagatgctactgagccttcctgaaaaggtcgtgtccccacctgaacctgagaaggaggaggcggccaaggaagaagccaccaaggaggaagaagccatcaaagaggaggtggtcaaggagcccaaggatgaggcacagaatgagggcccggctacagagtcagaggccccgctgaaggaggatgggcttttgcccaaaccactctcttctgggggagaggaagaagaaaaaccccggggcgaggcttctgaggacctgtgtgagatggccctggacccagaactgttgcttctgagggatgatggagaggaggagtttgcaggagcaaagctggaggattcggaggtccggtccgttgcctcaaaccagtcagagatggagttctcttcacttcaggacatgcccaaggagctggatccctctgctgtgctccccttagactgtctgcttgcttttgtgttctttgatgccaactggtgtggctacttgcaccggcgagacttagagaggatcctccttacccttgggatccggctcagtgcagagcaggccaagcagctggtcagcagggtggtgacccagaacatctgccagtaccggagccttcagtacagccgccaggagggcctggatggtggccttcccgaggaggtgctcttcggaaacctggacctgctgccccctcctgggaaaagcacgaagccaggtgctgcccccacagaacacaaagccttggtgtcccacaatggcagcctgattaacgtggggagcctgctgcagcgcgcggagcagcaggacagcggccggctctacctagagaacaagatccacacactggagctgaagctggaggagagccataaccgtttctcagccactgaagtaaccaataagacgctggcggcagagatgcaggagctgcgagtccggctggcggaggccgaggagaccgcccggacggcggagcgacagaagagccagctccagcggctgctgcaggagctccgcaggcgtctgacccccctgcagctggagatccagcgggtggtggaaaaggctgacagctgggtggagaaggaggagccggcacctagcaactgacggcctcgcacggaactgccatcctgtgagggcagcggtggcgcccggcaaagttggagcccttgcggtaccagaaagcagcgagagcgagacctgggagccagggcaggggtggctgaccccatgctcagcctctaggggacggcaggccatcaggctgggggctgtgctatgtgggatggatgtgtgaggaaccccggttccacttaacaactaaatacaacatcttttgcacccctagaatgtcattttgccctcaaccttggtatttctcctggggcccttttagtcttgtgctgactttctcctgtcctcttccagtttagaataagacaggggagaaaaaggcttttcgagtgtgggacaaggtctgatgtcagtgaacggaactgaagagcaagacatggagcctggctggggctaagcagccccctcctccggatggcacaggctctgctaggttccggacacaggcttctgggggaagggtctcccttggccatcacgggaatggagtccatgctagaaagagctcagtgttgggctgggtttgccagtagaacactgcgttccagtcaccccggtcttgccagaagaaaccagcacctctttcccgtggctcctgtgttcagaatgtggtattggctctggcccagccttctcccctgttacccataattcttgcctctttccataatccgtggtttcagtttgactttgtatataaagttggggtttttttttttttttttggcttgttttttaaataaaccaaagtcaaaaacaaaanaaaaaaaaaaaaaaaaaaaaaaaaagtctagtctctgagaaggctttgggctccacccaggtcctgatgctacagtggggaccaggccccctggnaatggtggcctcctgcttggtgctgtggctctgagctaaagcctctccctccccttnaggaaccaggctgtgcgnatccagggagggccggtaccgccac

SEQ ID NO: 424315 - DNA, 1953 bp, Homo sapiens
  misc_feature (1953)..(1953): n is a, c, g, or t
accagtggtcgcgcttccggagaggcgcttccggtggcggcggcagcagcggctgtggtggttccgggtgtctttgtccccccggtgtcgctgccctggcccgcagccttttccccacgactctgaaagaggacagcgttcccaatgtcccagtttaagcgccagcggatcaacccgcttccagggggacgcaacttctcaggcacagcttcaacatctcttctgggccctcctcctggtttgctcactcctcctgtggccacagaactgtcccagaatgccaggcaccttcagggtggggagaaacagcgggtcttcactggtattgttaccagcttgcatgactactttggggttgtggatgaagaggtcttttttcagctaagtgtggtgaagggccgtctgccccagctgggtgagaagagcacctctttcccgtggctcctgtgttcagaatgtggtattggctctggcccagccttctcccctgttacccataattcttgcctctttccataatccgtggtttcagtttgactttgtatataaagttggggtttttttttttttttttggcttgttttttaaataaaccaaagtcaaaaacaaactgagagtgtgtcctccacagctcttcctactctcctaggcttgcccgcgtgccctcccacccagcgcctctgctggaccacggtgcagttcgctccagaaggtgggccagggccggggaggtgcgcacacacccctggcatgctgggctgcctgctggagggtgctgctgctccgtggagggcagcaggcccaggaaggggtttcctctgctcgcctaagttacagcacaatactatgtggacgtttcattgaaaattttacttgaaaaaataaaattccagatactcaggtgagacacaaacccactgttcctgctttgagacctgtgaattcttgtgggacagttccactgacagcttgcgttcccgaggtaccagtcctcagtgacctcgggaaccccaaccacttaggtcccaaagccacaagggtgccctttgtcttgctgggaagctggctgagggcctgccagggctggaggaccagctctcccgcacagggttcagggcctctcccagaaaaaagaggttttgaagtgaaaaggcaacgaggggccagagggctccccaggatgggtcttttggaggtagatttgatgcccacaacgcatgcaaggctaagacccccaacttagccaacgaagcccatggcctcagaagggctgcagcttgctcaggccgtgggccaggatgcatgctggacggttctccaaataaaaaagccccaagggtttgtctacactgcttacctgctggggctgtgagtggggagacggcggcctgcctagggctcctggtgccaggctcaggaagagtcattcattgcaaagggccggcaagtgaaccagggccacctctgtccccagcctgtgagaggagcagctagccctgagaagggcaaggatgaatgaggctgaccacgtcacaggagtcctccaagagtgacggggattcagtcatcggccacaatggagagggcccggagctcactgagtttggcctcgttctcccgctcccgctgctcatcggagtggcctggctggtcaagctgatgggacaggtctccaaagatcttgtgcatttccgagtagtacacaacctgggggaggcgacaggggttggcacgtgctggctccagggaaccgtgtgcttcagggggccagaggctcacacttctctgctaccccctgcccttacccatctggagcggccaccactgtgctttgcgcatattcaggcacactggaagtatttagctgccagtaaaccgaaaccagtcgccgaacgacaaggtcagcagcaggaggaggacagcagcaggaggaggacagccgcaggaagacgn

SEQ ID NO: 424316 - DNA, 2741 bp, Homo sapiens
accagtggtcgcgcttccggagaggcgcttccggtggcggcggcagcagcggctgtggtggttccgggtgtctttgtccccccggtgtcgctgccctggcccgcagccttttccccacgactctgaaagaggacagcgttcccaatgtcccagtttaagcgccagcggatcaacccgcttccagggggacgcaacttctcaggcacagcttcaacatctcttctgggccctcctcctggtttgctcactcctcctgtggccacagaactgtcccagaatgccaggcaccttcagggtggggagaaacagcgggtcttcactggtattgttaccagcttgcatgactactttggggttgtggatgaagaggtcttttttcagctaagtgtggtgaagggccgtctgccccagctgggtgagaaggtgctggtgaaggctgcatacaacccaggccaggcagtgccctggaatgctgtcaaggtgcaaacgctctccaaccagcccctactgaagtccccagcacctcctcttctgcatgtagcagccctgggccagaagcaagggatcctgggagctcagcctcagttgatcttccagcctcaccggattcccccactctttcctcagaagcctctgagtctcttccaaacatcccacacacttcacctgagccacctgaacagatttcctgcccggggccctcatggacggttggatcagggccgaagtgatgactatgactccaagaaacgcaaacagcgggctggtggagagccctggggtgctaagaagccaaggcatgacctgcctccttaccgggtccacctcactccttacactgtggacagccccatctgtgacttcctagaactccagcgccgttaccgcagcctcctggtcccctcagattttctgtccgtgcatctgagttggctatcagccttccccctgagccagcccttttccctccatcatccaagccggatccaggtctcttctgaaaaggaggcagctccagacgctggtgctgagcccatcactgcagacagtgaccccgcttatagttcgaaggtactgctgctctcttccccggggttggaggaattgtatcgttgttgcatgctctttgtggatgacatggctgagccaagggagacgccagagcatcctctgaagcagattaagtttttgctgggcaggaaagaagaggaggcagtgctggttgggggtgaatggtctccttccctggatggcctcgacccccaggctgacccgcaggtgctggtgcgtaccgccatccgctgtgcgcaggcccagactggcattgatttgagcggctgtaccaagtggtggcgctttgccgagtttcagtacctgcagccgggacccccccggcggcttcagacagtggtggtgtacctgccggatgtctggaccatcatgcctactttggaggagtgggaggccctgtgccagcagaaagctgcagaggcagctcccccaacccaggaggcacaaggggaaacggagcctactgaacaggcacctgatgccttggagcaagcagcagacacttctagacggaacgcagaaactccagaggccaccacacagcaggaaacggacactgatctcccagaggcccctccaccccccctagaacctgctgtcatcgcacgccctggctgtgtaaacctgtccctccatgggattgtggaggatcggaggccaaaggaaaggatctcttttgaggtgatggtgctggccgagctgtttctggagatgctccagagggattttggctatagagtttataagatgctactgagccttcctgaaaaggtcgtgtccccacctgaacctgagaaggaggaggcggccaaggaagaagccaccaaggaggaagaagccatcaaagaggaggtggtcaaggagcccaaggatgaggcacagaatgagggcccggctacagagtcagaggccccgctgaaggaggatgggcttttgcccaaaccactctcttctgggggagaggaagaagaaaaaccccggggcgaggcttctgaggacctgtgtgagatggccctggacccagaactgttgcttctgagggatgatggagaggaggagtttgcaggagcaaagctggaggattcggaggtccggtccgttgcctcaaaccagtcagagatggagttctcttcacttcaggacatggtgaggcctcttctcgaccactctgggtctcagtggtggtgaggcttggcaaggcctctggcccactcctgggagaaggatgcttaccagtgacttcctttcttgatggacccaacacacagtgtggtccttggctcatggaagggcacgttcataggctccaggagaacatttcagtgtctgttggggtgaatgggagaggaagtgggcagtcctggccatacccaagtctctttcaggtcctcgtcccagtgtggtatatagacacggcttccccactggacccagggaaggagctgcaggagtccacccagtcagggaggcttgctgccgaccatgacgacggtgatgacaggagcggacaccccgagagctgacccgtgccaggccctgttctcagtgctttacgttgctcatccaacttcatcttcagcaacagcctgtgccactcggattggcgttacctgtgcttctcgggtgacggaactgaggtagagctaagtcagctgtccagagctgcgcag

SEQ ID NO: 424317 - DNA, 2627 bp, Homo sapiens
accagtggtcgcgcttccggagaggcgcttccggtggcggcggcagcagcggctgtggtggttccgggtgtctttgtccccccggtgtcgctgccctggcccgcagccttttccccacgactctgaaagaggacagcgttcccaatgtcccagtttaagcgccagcggatcaacccgcttccagggggacgcaacttctcaggcacagcttcaacatctcttctgggccctcctcctggtttgctcactcctcctgtggccacagaactgtcccagaatgccaggcaccttcagggtggggagaaacagcgggtcttcactggtattgttaccagcttgcatgactactttggggttgtggatgaagaggtcttttttcagctaagtgtggtgaagggccgtctgccccagctgggtgagaaggtgctggtgaaggctgcatacaacccaggccaggcagtgccctggaatgctgtcaaggtgcaaacgctctccaaccagcccctactgaagtccccagcacctcctcttctgcatgtagcagccctgggccagaagcaagggatcctgggagctcagcctcagttgatcttccagcctcaccggattcccccactctttcctcagaagcctctgagtctcttccaaacatcccacacacttcacctgagccacctgaacagatttcctgcccggggccctcatggacggttggatcagggccgaagtgatgactatgactccaagaaacgcaaacagcgggctggtggagagccctggggtgctaagaagccaaggcatgacctgcctccttaccgggtccacctcactccttacactgtggacagccccatctgtgacttcctagaactccagcgccgttaccgcagcctcctggtcccctcagattttctgtccgtgcatctgagttggctatcagccttccccctgagccagcccttttccctccatcatccaagccggatccaggtctcttctgaaaaggaggcagctccagacgctggtgctgagcccatcactgcagacagtgaccccgcttatagttcgaaggtactgctgctctcttccccggggttggaggaattgtatcgttgttgcatgctctttgtggatgacatggctgagccaagggagacgccagagcatcctctgaagcagattaagtttttgctgggcaggaaagaagaggaggcagtgctggttgggggtgaatggtctccttccctggatggcctcgacccccaggctgacccgcaggtgctggtgcgtaccgccatccgctgtgcgcaggcccagactggcattgatttgagcggctgtaccaagtggtggcgctttgccgagtttcagtacctgcagccgggacccccccggcggcttcagacagtggtggtgtacctgccggatgtctggaccatcatgcctactttggaggagtgggaggccctgtgccagcagaaagctgcagaggcagctcccccaacccaggaggcacaaggggaaacggagcctactgaacaggcacctgatgccttggagcaagcagcagacacttctagacggaacgcagaaactccagaggccaccacacagcaggaaacggacactgatctcccagaggcccctccaccccccctagaacctgctgtcatcgcacgccctggctgtgtaaacctgtccctccatgggattgtggaggatcggaggccaaaggaaaggatctcttttgaggtgatggtgctggccgagctgtttctggagatgctccagagggattttggctatagagtttataagatgctactgagccttcctgaaaaggtcgtgtccccacctgaacctgagaaggaggaggcggccaaggaagaagccaccaaggaggaagaagccatcaaagaggaggtggtcaaggagcccaaggatgaggcacagaatgagggcccggctacagagtcagaggccccgctgaaggaggatgggcttttgcccaaaccactctcttctgggggagaggaagaagaaaaaccccggggcgaggcttctgaggacctgtgtgagatggccctggacccagaactgttgcttctgagggatgatggagaggaggagtttggtatgttgagtggtgagaggggagcttgcaggcttgggatgtggctttccacctgtggccaagctggttttcatttttgtactgtggagttgggtgggccctgctctccatttatcttggcctttctgtagcaggagcaaagctggaggattcggaggtccggtccgttgcctcaaaccagtcagagatggagttctcttcacttcaggacatggtgaggcctcttctcgaccactctgggtctcagtggtggtgaggcttggcaaggcctctggcccactcctgggagaaggatgcttaccagtgacttcctttcttgatggacccaacacacagtgtggtccttggctcatggaagggcacgttcataggctccaggagaacatttcagtgtctgttggggtgaatgggagaggggtatttgatcctctcctgagagaggagcacaggagcttttgccaaagtgggccagagaggaaggctggcttgggcg

SEQ ID NO: 424318 - DNA, 2140 bp, Homo sapiens
accagtggtcgcgcttccggagaggcgcttccggtggcggcggcagcagcggctgtggtggttccgggtgtctttgtccccccggtgtcgctgccctggcccgcagccttttccccacgactctgaaagaggacagcgttcccaatgtcccagtttaagcgccagcggatcaacccgcttccagggggacgcaacttctcaggcacagcttcaacatctcttctgggccctcctcctggtttgctcactcctcctgtggccacagaactgtcccagaatgccaggcaccttcagggtggggagaaacagcgggtcttcactggtattgttaccagcttgcatgactactttggggttgtggatgaagaggtcttttttcagctaagtgtggtgaagggccgtctgccccagctgggtgagaaggtgctggtgaaggctgcatacaacccaggccaggcagtgccctggaatgctgtcaaggtgcaaacgctctccaaccagcccctactgaagtccccagcacctcctcttctgcatgtagcagccctgggccagaagcaagggatcctgggagctcagcctcagttgatcttccagcctcaccggattcccccactctttcctcagaagcctctgagtctcttccaaacatcccacacacttcacctgagccacctgaacagatttcctgcccggggccctcatggacggttggatcagggccgaagtgatgactatgactccaagaaacgcaaacagcgggctggtggagagccctggggtgctaagaagccaaggcatgacctgcctccttaccgggtccacctcactccttacactgtggacagccccatctgtgacttcctagaactccagcgccgttaccgcagcctcctggtcccctcagattttctgtccgtgcatctgagttggctatcagccttccccctgagccagcccttttccctccatcatccaagccggatccaggtctcttctgaaaaggaggcagctccagacgctggtgctgagcccatcactgcagacagtgaccccgcttatagttcgaaggtactgctgctctcttccccggggttggaggaattgtatcgttgttgcatgctctttgtggatgacatggctgagccaagggagacgccagagcatcctctgaagcagattaagtttttgctgggcaggaaagaagaggaggcagtgctggttgggggtgaatggtctccttccctggatggcctcgacccccaggctgacccgcaggtgctggtgcgtaccgccatccgctgtgcgcaggcccagactggcattgatttgagcggctgtaccaagtggtggcgctttgccgagtttcagtacctgcagccgggacccccccggcggcttcagacagtggtggtgtacctgccggatgtctggaccatcatgcctactttggaggagtgggaggccctgtgccagcagaaagctgcagaggcagctcccccaacccaggaggcacaaggggaaacggagcctactgaacaggcacctgatgccttggagcaagcagcagacacttctagacggaacgcagaaactccagaggccaccacacagcaggaaacggacactgatctcccagaggcccctccaccccccctagaacctgctgtcatcgcacgccctggctgtgtaaacctgtccctccatgggattgtggaggatcggaggccaaaggaaaggatctcttttgaggtgatggtgctggccgagctgtttctggagatgctccagagggattttggctatagagtttataagatgctactgagccttcctgaaaaggtcgtgtccccacctgaacctgagaaggaggaggcggccaaggaagaagccaccaaggaggaagaagccatcaaagaggaggtggtcaaggagcccaaggatgaggcacagaatgagggcccggctacagagtcagaggccccgctggtgagtaccctgccacctcgggctgtcatagtgctcatccagtgctccctgcactctgcatccaccttcacctgcacgtagtgtgtgctacgttactagctgtgcggcactcagtccatgccgagtcaagtgtgttcagggaatgtagtta

SEQ ID NO: 424319 - DNA, 1507 bp, Homo sapiens
accagtggtcgcgcttccggagaggcgcttccggtggcggcggcagcagcggctgtggtggttccgggtgtctttgtccccccggtgtcgctgccctggcccgcagccttttccccacgactctgaaagaggacagcgttcccaatgtcccagtttaagcgccagcggatcaacccgcttccagggggacgcaacttctcaggcacagcttcaacatctcttctgggccctcctcctggtttgctcactcctcctgtggccacagaactgtcccagaatgccaggcaccttcagggtggggagaaacagcgggtcttcactggtattgttaccagcttgcatgactactttggggttgtggatgaagaggtcttttttcagctaagtgtggtgaagggccgtctgccccagctgggtgagaaggtgctggtgaaggctgcatacaacccaggccaggcagtgccctggaatgctgtcaaggtgcaaacgctctccaaccagcccctactgaagtccccagcacctcctcttctgcatgtagcagccctgggccagaagcaagggatcctgggagctcagcctcagttgatcttccagcctcaccggattcccccactctttcctcagaagcctctgagtctcttccaaacatcccacacacttcacctgagccacctgaacagatttcctgcccggggccctcatggacggttggatcagggccgaagtgatgactatgactccaagaaacgcaaacagcgggctggtggagagccctggggtgctaagaagccaaggcatgacctgcctccttaccgggtccacctcactccttacactgtggacagccccatctgtgacttcctagaactccagcgccgttaccgcagcctcctggtcccctcagattttctgtccgtgcatctgagttggctatcagccttccccctgagccagcccttttccctccatcatccaagccggatccaggtctcttctgaaaaggaggcagctccagacgctggtgctgagcccatcactgcagacagtgaccccgcttatagttcgaaggtactgctgctctcttccccggggttggaggaattgtatcgttgttgcatgctctttgtggatgacatggctgagccaagggagacgccagagcatcctctgaagcagattaaggtaagagctggagagcaggaggagatgcattcacgggtaatgtgcacaacctgtcatgttttgagtgttcggctcctgttcctgaatgcataaaacgaggcatctcagagccgaacacccctcatttcacccaggaggaaggtgcagctcagagctgttacgactagtcagagagagcgaggtggctggttcatgtttgcagatagagacctcactgtgtggtggacttccccacttccggctgccttcatcctgatgggtggcagccttcatcctgatgggtggcagccttgccctgccccacgcgtccgcggacgcgtgg

SEQ ID NO: 424320 - DNA, 1582 bp, Homo sapiens
accagtggtcgcgcttccggagaggcgcttccggtggcggcggcagcagcggctgtggtggttccgggtgtctttgtccccccggtgtcgctgccctggcccgcagccttttccccacgactctgaaagaggacagcgttcccaatgtcccagtttaagcgccagcggatcaacccgcttccagggggacgcaacttctcaggcacagcttcaacatctcttctgggccctcctcctggtttgctcactcctcctgtggccacagaactgtcccagaatgccaggcaccttcagggtggggagaaacagcgggtcttcactggtattgttaccagcttgcatgactactttggggttgtggatgaagaggtcttttttcagctaagtgtggtgaagggccgtctgccccagctgggtgagaaggtgctggtgaaggctgcatacaacccaggccaggcagtgccctggaatgctgtcaaggtgcaaacgctctccaaccagcccctactgaagtccccagcacctcctcttctgcatgtagcagccctgggccagaagcaagggatcctgggagctcagcctcagttgatcttccagcctcaccggattcccccactctttcctcagaagcctctgagtctcttccaaacatcccacacacttcacctgagccacctgaacagatttcctgcccggggccctcatggacggttggatcagggccgaagtgatgactatgactccaagaaacgcaaacagcgggctggtggagagccctggggtgctaagaagccaaggcatgacctgcctccttaccgggtccacctcactccttacactgtggacagccccatctgtgacttcctagaactccagcgccgttaccgcagcctcctggtcccctcagattttctgtccgtgcatctgagttggctatcagccttccccctgagccagcccttttccctccatcatccaagccggatccaggtctcttctgaaaaggaggcagctccagacgctggtgctgagcccatcactgcagacagtgaccccgcttatagttcgaaggtaagctgacaggcgtctctcacttatctgatttctggaggctgaaggcagctctgagtgtctcctcctgcacaggtactgctgctctcttccccggggttggaggaattgtatcgttgttgcatgctctttgtggatgacatggctgagccaagggagacgccagagcatcctctgaagcagattaaggtaagagctggagagcaggaggagatgcattcacgggtaatgtgcacaacctgtcatgttttgagtgttcggctcctgttcctgaatgcataaaacgaggcatctcagagccgaacacccctcatttcacccaggaggaaggtgcagctcagagctgttacgactagtcagagagagcgaggtggctggttcatgtttgcagatagagacctcactgtgtggtggacttccccacttccggctgccttcatcctgatgggtggcagccttcatcctgatgggtggcagccttgccctgccccacgcgtccgcggacgcgtgg

SEQ ID NO: 424321 - DNA, 646 bp, Homo sapiens
gggggatataggtggcctaatcccgggacccagagggtctcatttcagctgttgtcacaggaaacggagcctactgaacaggcacctgatgccttggagcaagcagcagacacttctagacggaacgcagaaactccagaggccaccacacagcaggaaacggacactgatctcccagaggcccctccaccccccctagaacctgctgtcatcgcacgccctggctgtgtaaacctgtccctccatgggattgtggaggatcggaggccaaaggaaaggatctcttttgaggcaggtgtcaagagtcttggggaggctgtgggctgggatttgtgggcctgaagcagtctttcttcctgatgctcatggaccctcccacctccccagtgatggtgctggccgagctgtttctggagatgctccagagggattttggctatagagtttataagatgctactgagccttcctgaaaaggtcgtgtccccacctgaacctgagaaggaggaggcggccaaggaagaagccaccaaggaggaagaagccatcaaagaggaggtggtcaaggagcccaaggatgaggcacagaatgagggcccggctacagagtcagaggccccgctggtgagtaccctgccacctcgggc

SEQ ID NO: 424322 - DNA, 361 bp, Homo sapiens
ctcccgctgctcatcggagtggcctggctggtcaagctgatgggacaggtctccaaagatcttgtgcatttccgagtagtacacaacctgggggaggcgacaggggttggcacgtgctggctccagggaaccgtgtgcttcagggggccagaggctcacacttctctgctaccccctgcccttacccatctggagctgtgcagcagcgtgcctttggggatatgcagggcacggaagggctctagctgagactgaaccaaaaggagccggggagcaacagggcctcagtggctggaggtggaggcgcccctgcttcgggctcctggttcccccagcagcaggtgcaggaaggcatgggcct

SEQ ID NO: 424323 - DNA, 711 bp, Homo sapiens
aggcatgaatatagtgcactgcagcctcgaactcctgggttcaagtgattctcctgccttagcctccccagcagctgggacttcaggcatgcatcactgcatgtggcccaagccactggattctggacaggctgaatcctgggcgatagagccactgagggaactatttgcaaatcctgctcatctttgttttctttgcagcccaaggagctggatccctctgctgtgctccccttagactgtctgcttgcttttgtgttctttgatgccaactggtgtggctacttgcaccggcgagacttagagaggatcctccttacccttgggatccggctcagtgcagagcaggtaccttctttcctctgccccagcacatgggcacaggcctgcacttactcctgctctaggttcccgcccatggccagggtcggggacggggccttctgatcagcagatgtgttttctgcaggccaagcagctggtcagcagggtggtgacccagaacatctgccagtaccggagccttcagtacagccgccaggagggcctggatggtggccttcccgaggaggtgctcttcggtatgttctggggccctgcagccttcctggggcacgggcagggcaggctgccctctctggagactccatcctgaattctttttcacggttctctctaggaaacctggacctgctgccccctcctgggaaa

SEQ ID NO: 424324 - DNA, 5047 bp, Homo sapiens
  misc_feature (5047)..(5047): n is a, c, g, or t
accagtggtcgcgcttccggagaggcgcttccggtggcggcggcagcagcggctgtggtggttccgggtgtctttgtccccccggtgtcgctgccctggcccgcagccttttccccacgactctgaaagaggacagcgttcccaatgtcccagtttaagcgccagcggatcaacccgcttccagggggacgcaacttctcaggcacagcttcaacatctcttctgggccctcctcctggtttgctcactcctcctgtggccacagaactgtcccagaatgccaggcaccttcagggtggggagaaacagcgggtcttcactggtattgttaccagcttgcatgactactttggggttgtggatgaagaggtcttttttcagctaagtgtggtgaagggccgtctgccccagctgggtgagaaggtgctggtgaaggctgcatacaacccaggccaggcagtgccctggaatgctgtcaaggtgcaaacgctctccaaccagcccctactgaagtccccagcacctcctcttctgcatgtagcagccctgggccagaagcaagggatcctgggagctcagcctcagttgatcttccagcctcaccggattcccccactctttcctcagaagcctctgagtctcttccaaacatcccacacacttcacctgagccacctgaacagatttcctgcccggggccctcatggacggttggatcagggccgaagtgatgactatgactccaagaaacgcaaacagcgggctggtggagagccctggggtgctaagaagccaaggcatgacctgcctccttaccgggtccacctcactccttacactgtggacagccccatctgtgacttcctagaactccagcgccgttaccgcagcctcctggtcccctcagattttctgtccgtgcatctgagttggctatcagccttccccctgagccagcccttttccctccatcatccaagccggatccaggtctcttctgaaaaggaggcagctccagacgctggtgctgagcccatcactgcagacagtgaccccgcttatagttcgaaggtactgctgctctcttccccggggttggaggaattgtatcgttgttgcatgctctttgtggatgacatggctgagccaagggagacgccagagcatcctctgaagcagattaagtttttgctgggcaggaaagaagaggaggcagtgctggttgggggtgaatggtctccttccctggatggcctcgacccccaggctgacccgcaggtgctggtgcgtaccgccatccgctgtgcgcaggcccagactggcattgatttgagcggctgtaccaagtggtggcgctttgccgagtttcagtacctgcagccgggacccccccggcggcttcagacagtggtggtgtacctgccggatgtctggaccatcatgcctactttggaggagtgggaggccctgtgccagcagaaagctgcagaggcagctcccccaacccaggaggcacaaggggaaacggagcctactgaacaggcacctgatgccttggagcaagcagcagacacttctagacggaacgcagaaactccagaggccaccacacagcaggaaacggacactgatctcccagaggcccctccaccccccctagaacctgctgtcatcgcacgccctggctgtgtaaacctgtccctccatgggattgtggaggatcggaggccaaaggaaaggatctcttttgaggtgatggtgctggccgagctgtttctggagatgctccagagggattttggctatagagtttataagatgctactgagccttcctgaaaaggtcgtgtccccacctgaacctgagaaggaggaggcggccaaggaagaagccaccaaggaggaagaagccatcaaagaggaggtggtcaaggagcccaaggatgaggcacagaatgagggcccggctacagagtcagaggccccgctgaaggaggatgggcttttgcccaaaccactctcttctgggggagaggaagaagaaaaaccccggggcgaggcttctgaggacctgtgtgagatggccctggacccagaactgttgcttctgagggatgatggagaggaggagtttgcaggagcaaagctggaggattcggaggtccggtccgttgcctcaaaccagtcagagatggagttctcttcacttcaggacatgcccaaggagctggatccctctgctgtgctccccttagactgtctgcttgcttttgtgttctttgatgccaactggtgtggctacttgcaccggcgagacttagagaggatcctccttacccttgggatccggctcagtgcagagcaggccaagcagctggtcagcagggtggtgacccagaacatctgccagtaccggagccttcagtacagccgccaggagggcctggatggtggccttcccgaggaggtgctcttcggaaacctggacctgctgccccctcctgggaaaagcacgaagccaggtgctgcccccacagaacacaaagccttggtgtcccacaatggcagcctgattaacgtggggagcctgctgcagcgcgcggagcagcaggacagcggccggctctacctagagaacaagatccacacactggagctgaagctggaggagagccataaccgtttctcagccactgaagtaaccaataagacgctggcggcagagatgcaggagctgcgagtccggctggcggaggccgaggagaccgcccggacggcggagcgacagaagagccagctccagcggctgctgcaggagctccgcaggcgtctgacccccctgcagctggagatccagcgggtggtggaaaaggctgacagctgggtggagaaggaggagccggcacctagcaactgacggcctcgcacggaactgccatcctgtgagggcagcggtggcgcccggcaaagttggagcccttgcggtaccagaaagcagcgagagcgagacctgggagccagggcaggggtggctgaccccatgctcagcctctaggggacggcaggccatcaggctgggggctgtgctatgtgggatggatgtgtgaggaaccccggttccacttaacaactaaatacaacatcttttgcacccctagaatgtcattttgccctcaaccttggtatttctcctggggcccttttagtcttgtgctgactttctcctgtcctcttccagtttagaataagacaggggagaaaaaggcttttcgagtgtgggacaaggtctgatgtcagtgaacggaactgaagagcaagacatggagcctggctggggctaagcagccccctcctccggatggcacaggctctgctaggttccggacacaggcttctgggggaagggtctcccttggccatcacgggaatggagtccatgctagaaagagctcagtgttgggctgggtttgccagtagaacactgcgttccagtcaccccggtcttgccagaagaaaccagcacctctttcccgtggctcctgtgttcagaatgtggtattggctctggcccagccttctcccctgttacccataattcttgcctctttccataatccgtggtttcagtttgactttgtatataaagttggggtttttttttttttttttggcttgttttttaaataaaccaaagtcaaaaacaaactgagagtgtgtcctccacagctcttcctactctcctaggcttgcccgcgtgccctcccacccagcgcctctgctggaccacggtgcagttcgctccagaaggtgggccagggccggggaggtgcgcacacacccctggcatgctgggctgcctgctggagggtgctgctgctccgtggagggcagcaggcccaggaaggggtttcctctgctcgcctaagttacagcacaatactatgtggacgtttcattgaaaattttacttgaaaaaataaaattccagatactcaggtgagacacaaacccactgttcctgctttgagacctgtgaattcttgtgggacagttccactgacagcttgcgttcccgaggtaccagtcctcagtgacctcgggaaccccaaccacttaggtcccaaagccacaagggtgccctttgtcttgctgggaagctggctgagggcctgccagggctggaggaccagctctcccgcacagggttcagggcctctcccagaaaaaagaggttttgaagtgaaaaggcaacgaggggccagagggctccccaggatgggtcttttggaggtagatttgatgcccacaacgcatgcaaggctaagacccccaacttagccaacgaagcccatggcctcagaagggctgcagcttgctcaggccgtgggccaggatgcatgctggacggttctccaaataaaaaagccccaagggtttgtctacactgcttacctgctggggctgtgagtggggagacggcggcctgcctagggctcctggtgccaggctcaggaagagtcattcattgcaaagggccggcaagtgaaccagggccacctctgtccccagcctgtgagaggagcagctagccctgagaagggcaaggatgaatgaggctgaccacgtcacaggagtcctccaagagtgacggggattcagtcatcggccacaatggagagggcccggagctcactgagtttggcctcgttctcccgctcccgctgctcatcggagtggcctggctggtcaagctgatgggacaggtctccaaagatcttgtgcatttccgagtagtacacaacctgggggaggcgacaggggttggcacgtgctggctccagggaaccgtgtgcttcagggggccagaggctcacacttctctgctaccccctgcccttacccatctggagcggccaccactgtgctttgcgcatattcaggcacactggaagtatttagctgccagtaaaccgaaaccagtcgccgaacgacaaggtcagcagcaggaggaggacagcagcaggaggaggacagccgcaggaagacgn

SEQ ID NO: 424325 - DNA, 5293 bp, Homo sapiens
  misc_feature (5293)..(5293): n is a, c, g, or t
ggctctgctgggagacccggcgctggcggctgctgaggccggagcggagggcccgggagcgtgggagcaggagggtggcgcgcagccggtttcgcgtttggtcggccagggagctgccttcccaccagccggtcgaggaaacaacgggtcgggcttccggggagagggcccacacagtctcctcgccggcaccggcctcctccatttttccgggccttgcgtggagggttttggcggatgtttttgaacgaaggaatgtcatcggggctctctcgagcccctcaccccgccagctactctgggggtggcgtggcatagtgagaggagcgctaagttgttgggaggcctgggtccttttccccacgactctgaaagaggacagcgttcccaatgtcccagtttaagcgccagcggatcaacccgcttccagggggacgcaacttctcaggcacagcttcaacatctcttctgggccctcctcctggtttgctcactcctcctgtggccacagaactgtcccagaatgccaggcaccttcagggtggggagaaacagcgggtcttcactggtattgttaccagcttgcatgactactttggggttgtggatgaagaggtcttttttcagctaagtgtggtgaagggccgtctgccccagctgggtgagaaggtgctggtgaaggctgcatacaacccaggccaggcagtgccctggaatgctgtcaaggtgcaaacgctctccaaccagcccctactgaagtccccagcacctcctcttctgcatgtagcagccctgggccagaagcaagggatcctgggagctcagcctcagttgatcttccagcctcaccggattcccccactctttcctcagaagcctctgagtctcttccaaacatcccacacacttcacctgagccacctgaacagatttcctgcccggggccctcatggacggttggatcagggccgaagtgatgactatgactccaagaaacgcaaacagcgggctggtggagagccctggggtgctaagaagccaaggcatgacctgcctccttaccgggtccacctcactccttacactgtggacagccccatctgtgacttcctagaactccagcgccgttaccgcagcctcctggtcccctcagattttctgtccgtgcatctgagttggctatcagccttccccctgagccagcccttttccctccatcatccaagccggatccaggtctcttctgaaaaggaggcagctccagacgctggtgctgagcccatcactgcagacagtgaccccgcttatagttcgaaggtactgctgctctcttccccggggttggaggaattgtatcgttgttgcatgctctttgtggatgacatggctgagccaagggagacgccagagcatcctctgaagcagattaagtttttgctgggcaggaaagaagaggaggcagtgctggttgggggtgaatggtctccttccctggatggcctcgacccccaggctgacccgcaggtgctggtgcgtaccgccatccgctgtgcgcaggcccagactggcattgatttgagcggctgtaccaagtggtggcgctttgccgagtttcagtacctgcagccgggacccccccggcggcttcagacagtggtggtgtacctgccggatgtctggaccatcatgcctactttggaggagtgggaggccctgtgccagcagaaagctgcagaggcagctcccccaacccaggaggcacaaggggaaacggagcctactgaacaggcacctgatgccttggagcaagcagcagacacttctagacggaacgcagaaactccagaggccaccacacagcaggaaacggacactgatctcccagaggcccctccaccccccctagaacctgctgtcatcgcacgccctggctgtgtaaacctgtccctccatgggattgtggaggatcggaggccaaaggaaaggatctcttttgaggtgatggtgctggccgagctgtttctggagatgctccagagggattttggctatagagtttataagatgctactgagccttcctgaaaaggtcgtgtccccacctgaacctgagaaggaggaggcggccaaggaagaagccaccaaggaggaagaagccatcaaagaggaggtggtcaaggagcccaaggatgaggcacagaatgagggcccggctacagagtcagaggccccgctgaaggaggatgggcttttgcccaaaccactctcttctgggggagaggaagaagaaaaaccccggggcgaggcttctgaggacctgtgtgagatggccctggacccagaactgttgcttctgagggatgatggagaggaggagtttgcaggagcaaagctggaggattcggaggtccggtccgttgcctcaaaccagtcagagatggagttctcttcacttcaggacatgcccaaggagctggatccctctgctgtgctccccttagactgtctgcttgcttttgtgttctttgatgccaactggtgtggctacttgcaccggcgagacttagagaggatcctccttacccttgggatccggctcagtgcagagcaggccaagcagctggtcagcagggtggtgacccagaacatctgccagtaccggagccttcagtacagccgccaggagggcctggatggtggccttcccgaggaggtgctcttcggaaacctggacctgctgccccctcctgggaaaagcacgaagccaggtgctgcccccacagaacacaaagccttggtgtcccacaatggcagcctgattaacgtggggagcctgctgcagcgcgcggagcagcaggacagcggccggctctacctagagaacaagatccacacactggagctgaagctggaggagagccataaccgtttctcagccactgaagtaaccaataagacgctggcggcagagatgcaggagctgcgagtccggctggcggaggccgaggagaccgcccggacggcggagcgacagaagagccagctccagcggctgctgcaggagctccgcaggcgtctgacccccctgcagctggagatccagcgggtggtggaaaaggctgacagctgggtggagaaggaggagccggcacctagcaactgacggcctcgcacggaactgccatcctgtgagggcagcggtggcgcccggcaaagttggagcccttgcggtaccagaaagcagcgagagcgagacctgggagccagggcaggggtggctgaccccatgctcagcctctaggggacggcaggccatcaggctgggggctgtgctatgtgggatggatgtgtgaggaaccccggttccacttaacaactaaatacaacatcttttgcacccctagaatgtcattttgccctcaaccttggtatttctcctggggcccttttagtcttgtgctgactttctcctgtcctcttccagtttagaataagacaggggagaaaaaggcttttcgagtgtgggacaaggtctgatgtcagtgaacggaactgaagagcaagacatggagcctggctggggctaagcagccccctcctccggatggcacaggctctgctaggttccggacacaggcttctgggggaagggtctcccttggccatcacgggaatggagtccatgctagaaagagctcagtgttgggctgggtttgccagtagaacactgcgttccagtcaccccggtcttgccagaagaaaccagcacctctttcccgtggctcctgtgttcagaatgtggtattggctctggcccagccttctcccctgttacccataattcttgcctctttccataatccgtggtttcagtttgactttgtatataaagttggggtttttttttttttttttggcttgttttttaaataaaccaaagtcaaaaacaaactgagagtgtgtcctccacagctcttcctactctcctaggcttgcccgcgtgccctcccacccagcgcctctgctggaccacggtgcagttcgctccagaaggtgggccagggccggggaggtgcgcacacacccctggcatgctgggctgcctgctggagggtgctgctgctccgtggagggcagcaggcccaggaaggggtttcctctgctcgcctaagttacagcacaatactatgtggacgtttcattgaaaattttacttgaaaaaataaaattccagatactcaggtgagacacaaacccactgttcctgctttgagacctgtgaattcttgtgggacagttccactgacagcttgcgttcccgaggtaccagtcctcagtgacctcgggaaccccaaccacttaggtcccaaagccacaagggtgccctttgtcttgctgggaagctggctgagggcctgccagggctggaggaccagctctcccgcacagggttcagggcctctcccagaaaaaagaggttttgaagtgaaaaggcaacgaggggccagagggctccccaggatgggtcttttggaggtagatttgatgcccacaacgcatgcaaggctaagacccccaacttagccaacgaagcccatggcctcagaagggctgcagcttgctcaggccgtgggccaggatgcatgctggacggttctccaaataaaaaagccccaagggtttgtctacactgcttacctgctggggctgtgagtggggagacggcggcctgcctagggctcctggtgccaggctcaggaagagtcattcattgcaaagggccggcaagtgaaccagggccacctctgtccccagcctgtgagaggagcagctagccctgagaagggcaaggatgaatgaggctgaccacgtcacaggagtcctccaagagtgacggggattcagtcatcggccacaatggagagggcccggagctcactgagtttggcctcgttctcccgctcccgctgctcatcggagtggcctggctggtcaagctgatgggacaggtctccaaagatcttgtgcatttccgagtagtacacaacctgggggaggcgacaggggttggcacgtgctggctccagggaaccgtgtgcttcagggggccagaggctcacacttctctgctaccccctgcccttacccatctggagcggccaccactgtgctttgcgcatattcaggcacactggaagtatttagctgccagtaaaccgaaaccagtcgccgaacgacaaggtcagcagcaggaggaggacagcagcaggaggaggacagccgcaggaagacgn

SEQ ID NO: 424326 - DNA, 4994 bp, Homo sapiens
  misc_feature (4994)..(4994): n is a, c, g, or t
tttttagcaactacacagtattcattgaatggatgaacatgatttatttacccagttctccatttgcactctatcctaaattttcttggaatgaacatccttctacctacacctgtgtgtttgttgcgatcaatttctagaaatggagcagctggctcaaaggctttgctttaagcttccatagctattgccagttctcctgaagaggctgtgccccttctgctctaaccagtggggtgtggagaccttatttccccgtgccgttgccaacactgttagccgactttttcatctttgtctgtctagttggtgacacatgataatgtggtttgcatttctttaattgtaagtgagattgagcatattttcctggcctctaattcttatgtatttctcttaagaacctattgatgtcaattttccgttttaggcttttgaactttttgttactgatttgtgagttcctttatattaaggcaatgacccatttctctgtcatgtgttataagtgttttcttttttccctttcccagtttgacttttgccatctagagtttgtaaattaagtggtcagatctgatctagcttccttgagaggtgccttacttcaaaagttctcagactgaaaaaaaattcgcccattttttcaaatctttgatggtttcatttcgaatgttttagtctttgctcagtctggattcccttgctgtcttcctgtagccccatctgtgacttcctagaactccagcgccgttaccgcagcctcctggtcccctcagattttctgtccgtgcatctgagttggctatcagccttccccctgagccagcccttttccctccatcatccaagccggatccaggtctcttctgaaaaggaggcagctccagacgctggtgctgagcccatcactgcagacagtgaccccgcttatagttcgaaggtaagctgacaggcgtctctcacttatctgatttctggaggctgaaggcagctctgagtgtctcctcctgcacaggtactgctgctctcttccccggggttggaggaattgtatcgttgttgcatgctctttgtggatgacatggctgagccaagggagacgccagagcatcctctgaagcagattaagtttttgctgggcaggaaagaagaggaggcagtgctggttgggggtgaatggtctccttccctggatggcctcgacccccaggctgacccgcaggtgctggtgcgtaccgccatccgctgtgcgcaggcccagactggcattgatttgagcggctgtaccaagtggtggcgctttgccgagtttcagtacctgcagccgggacccccccggcggcttcagacagtggtggtgtacctgccggatgtctggaccatcatgcctactttggaggagtgggaggccctgtgccagcagaaagctgcagaggcagctcccccaacccaggaggcacaaggggaaacggagcctactgaacaggcacctgatgccttggagcaagcagcagacacttctagacggaacgcagaaactccagaggccaccacacagcaggaaacggacactgatctcccagaggcccctccaccccccctagaacctgctgtcatcgcacgccctggctgtgtaaacctgtccctccatgggattgtggaggatcggaggccaaaggaaaggatctcttttgaggtgatggtgctggccgagctgtttctggagatgctccagagggattttggctatagagtttataagatgctactgagccttcctgaaaaggtcgtgtccccacctgaacctgagaaggaggaggcggccaaggaagaagccaccaaggaggaagaagccatcaaagaggaggtggtcaaggagcccaaggatgaggcacagaatgagggcccggctacagagtcagaggccccgctgaaggaggatgggcttttgcccaaaccactctcttctgggggagaggaagaagaaaaaccccggggcgaggcttctgaggacctgtgtgagatggccctggacccagaactgttgcttctgagggatgatggagaggaggagtttgcaggagcaaagctggaggattcggaggtccggtccgttgcctcaaaccagtcagagatggagttctcttcacttcaggacatgcccaaggagctggatccctctgctgtgctccccttagactgtctgcttgcttttgtgttctttgatgccaactggtgtggctacttgcaccggcgagacttagagaggatcctccttacccttgggatccggctcagtgcagagcaggccaagcagctggtcagcagggtggtgacccagaacatctgccagtaccggagccttcagtacagccgccaggagggcctggatggtggccttcccgaggaggtgctcttcggaaacctggacctgctgccccctcctgggaaaagcacgaagccaggtgctgcccccacagaacacaaagccttggtgtcccacaatggcagcctgattaacgtggggagcctgctgcagcgcgcggagcagcaggacagcggccggctctacctagagaacaagatccacacactggagctgaagctggaggagagccataaccgtttctcagccactgaagtaaccaataagacgctggcggcagagatgcaggagctgcgagtccggctggcggaggccgaggagaccgcccggacggcggagcgacagaagagccagctccagcggctgctgcaggagctccgcaggcgtctgacccccctgcagctggagatccagcgggtggtggaaaaggctgacagctgggtggagaaggaggagccggcacctagcaactgacggcctcgcacggaactgccatcctgtgagggcagcggtggcgcccggcaaagttggagcccttgcggtaccagaaagcagcgagagcgagacctgggagccagggcaggggtggctgaccccatgctcagcctctaggggacggcaggccatcaggctgggggctgtgctatgtgggatggatgtgtgaggaaccccggttccacttaacaactaaatacaacatcttttgcacccctagaatgtcattttgccctcaaccttggtatttctcctggggcccttttagtcttgtgctgactttctcctgtcctcttccagtttagaataagacaggggagaaaaaggcttttcgagtgtgggacaaggtctgatgtcagtgaacggaactgaagagcaagacatggagcctggctggggctaagcagccccctcctccggatggcacaggctctgctaggttccggacacaggcttctgggggaagggtctcccttggccatcacgggaatggagtccatgctagaaagagctcagtgttgggctgggtttgccagtagaacactgcgttccagtcaccccggtcttgccagaagaaaccagcacctctttcccgtggctcctgtgttcagaatgtggtattggctctggcccagccttctcccctgttacccataattcttgcctctttccataatccgtggtttcagtttgactttgtatataaagttggggtttttttttttttttttggcttgttttttaaataaaccaaagtcaaaaacaaactgagagtgtgtcctccacagctcttcctactctcctaggcttgcccgcgtgccctcccacccagcgcctctgctggaccacggtgcagttcgctccagaaggtgggccagggccggggaggtgcgcacacacccctggcatgctgggctgcctgctggagggtgctgctgctccgtggagggcagcaggcccaggaaggggtttcctctgctcgcctaagttacagcacaatactatgtggacgtttcattgaaaattttacttgaaaaaataaaattccagatactcaggtgagacacaaacccactgttcctgctttgagacctgtgaattcttgtgggacagttccactgacagcttgcgttcccgaggtaccagtcctcagtgacctcgggaaccccaaccacttaggtcccaaagccacaagggtgccctttgtcttgctgggaagctggctgagggcctgccagggctggaggaccagctctcccgcacagggttcagggcctctcccagaaaaaagaggttttgaagtgaaaaggcaacgaggggccagagggctccccaggatgggtcttttggaggtagatttgatgcccacaacgcatgcaaggctaagacccccaacttagccaacgaagcccatggcctcagaagggctgcagcttgctcaggccgtgggccaggatgcatgctggacggttctccaaataaaaaagccccaagggtttgtctacactgcttacctgctggggctgtgagtggggagacggcggcctgcctagggctcctggtgccaggctcaggaagagtcattcattgcaaagggccggcaagtgaaccagggccacctctgtccccagcctgtgagaggagcagctagccctgagaagggcaaggatgaatgaggctgaccacgtcacaggagtcctccaagagtgacggggattcagtcatcggccacaatggagagggcccggagctcactgagtttggcctcgttctcccgctcccgctgctcatcggagtggcctggctggtcaagctgatgggacaggtctccaaagatcttgtgcatttccgagtagtacacaacctgggggaggcgacaggggttggcacgtgctggctccagggaaccgtgtgcttcagggggccagaggctcacacttctctgctaccccctgcccttacccatctggagcggccaccactgtgctttgcgcatattcaggcacactggaagtatttagctgccagtaaaccgaaaccagtcgccgaacgacaaggtcagcagcaggaggaggacagcagcaggaggaggacagccgcaggaagacgn

SEQ ID NO: 424327 - DNA, 4942 bp, Homo sapiens
  misc_feature (4942)..(4942): n is a, c, g, or t
agtagctgggactgcaggcacgcaccaccaggcccagctaatttttgtatttttagtagagacggggtttcaccatgttggccaggatggtctcgatctcttgacctcgtgatctgcccgccttggcctcccaaagtgctgggatcacaggcgtgagccaccgcgcccggccaaatttactttaaaggacgcatagcatggatccatatatgcgtctcttgtttttaaaagaaaaatcatttttttctcatttcaaaaaaatcacgttaactataattaatgaagtgcagaaaaatagaaaattattcgtaagctttccagaggcttccatcattaatattttatttcctttcagtcttctaaagttgtttttgcagtagctgaggcctactgtgtatacaatgttgcagagtgtgctttttgcttaacaggaatgtttattaaaacagtaaatatccattttaatatctttataacattctgtcatatggctgttagcatggattctttttccatttattgaatgtgagggatttcgattgtttccagttcttttagttcagtttgtattgaatacatataacaatgtggtttcttactgttggtgatgggtcaacctctagtgatgactatgactccaagaaacgcaaacagcgggctggtggagagccctggggtgctaagaagccaaggcatgacctgcctccttaccgggtccacctcactccttacactgtggacagccccatctgtgacttcctagaactccagcgccgttaccgcagcctcctggtcccctcagattttctgtccgtgcatctgagttggctatcagccttccccctgagccagcccttttccctccatcatccaagccggatccaggtctcttctgaaaaggaggcagctccagacgctggtgctgagcccatcactgcagacagtgaccccgcttatagttcgaaggtactgctgctctcttccccggggttggaggaattgtatcgttgttgcatgctctttgtggatgacatggctgagccaagggagacgccagagcatcctctgaagcagattaagtttttgctgggcaggaaagaagaggaggcagtgctggttgggggtgaatggtctccttccctggatggcctcgacccccaggctgacccgcaggtgctggtgcgtaccgccatccgctgtgcgcaggcccagactggcattgatttgagcggctgtaccaagtggtggcgctttgccgagtttcagtacctgcagccgggacccccccggcggcttcagacagtggtggtgtacctgccggatgtctggaccatcatgcctactttggaggagtgggaggccctgtgccagcagaaagctgcagaggcagctcccccaacccaggaggcacaaggggaaacggagcctactgaacaggcacctgatgccttggagcaagcagcagacacttctagacggaacgcagaaactccagaggccaccacacagcaggaaacggacactgatctcccagaggcccctccaccccccctagaacctgctgtcatcgcacgccctggctgtgtaaacctgtccctccatgggattgtggaggatcggaggccaaaggaaaggatctcttttgaggtgatggtgctggccgagctgtttctggagatgctccagagggattttggctatagagtttataagatgctactgagccttcctgaaaaggtcgtgtccccacctgaacctgagaaggaggaggcggccaaggaagaagccaccaaggaggaagaagccatcaaagaggaggtggtcaaggagcccaaggatgaggcacagaatgagggcccggctacagagtcagaggccccgctgaaggaggatgggcttttgcccaaaccactctcttctgggggagaggaagaagaaaaaccccggggcgaggcttctgaggacctgtgtgagatggccctggacccagaactgttgcttctgagggatgatggagaggaggagtttgcaggagcaaagctggaggattcggaggtccggtccgttgcctcaaaccagtcagagatggagttctcttcacttcaggacatgcccaaggagctggatccctctgctgtgctccccttagactgtctgcttgcttttgtgttctttgatgccaactggtgtggctacttgcaccggcgagacttagagaggatcctccttacccttgggatccggctcagtgcagagcaggccaagcagctggtcagcagggtggtgacccagaacatctgccagtaccggagccttcagtacagccgccaggagggcctggatggtggccttcccgaggaggtgctcttcggaaacctggacctgctgccccctcctgggaaaagcacgaagccaggtgctgcccccacagaacacaaagccttggtgtcccacaatggcagcctgattaacgtggggagcctgctgcagcgcgcggagcagcaggacagcggccggctctacctagagaacaagatccacacactggagctgaagctggaggagagccataaccgtttctcagccactgaagtaaccaataagacgctggcggcagagatgcaggagctgcgagtccggctggcggaggccgaggagaccgcccggacggcggagcgacagaagagccagctccagcggctgctgcaggagctccgcaggcgtctgacccccctgcagctggagatccagcgggtggtggaaaaggctgacagctgggtggagaaggaggagccggcacctagcaactgacggcctcgcacggaactgccatcctgtgagggcagcggtggcgcccggcaaagttggagcccttgcggtaccagaaagcagcgagagcgagacctgggagccagggcaggggtggctgaccccatgctcagcctctaggggacggcaggccatcaggctgggggctgtgctatgtgggatggatgtgtgaggaaccccggttccacttaacaactaaatacaacatcttttgcacccctagaatgtcattttgccctcaaccttggtatttctcctggggcccttttagtcttgtgctgactttctcctgtcctcttccagtttagaataagacaggggagaaaaaggcttttcgagtgtgggacaaggtctgatgtcagtgaacggaactgaagagcaagacatggagcctggctggggctaagcagccccctcctccggatggcacaggctctgctaggttccggacacaggcttctgggggaagggtctcccttggccatcacgggaatggagtccatgctagaaagagctcagtgttgggctgggtttgccagtagaacactgcgttccagtcaccccggtcttgccagaagaaaccagcacctctttcccgtggctcctgtgttcagaatgtggtattggctctggcccagccttctcccctgttacccataattcttgcctctttccataatccgtggtttcagtttgactttgtatataaagttggggtttttttttttttttttggcttgttttttaaataaaccaaagtcaaaaacaaactgagagtgtgtcctccacagctcttcctactctcctaggcttgcccgcgtgccctcccacccagcgcctctgctggaccacggtgcagttcgctccagaaggtgggccagggccggggaggtgcgcacacacccctggcatgctgggctgcctgctggagggtgctgctgctccgtggagggcagcaggcccaggaaggggtttcctctgctcgcctaagttacagcacaatactatgtggacgtttcattgaaaattttacttgaaaaaataaaattccagatactcaggtgagacacaaacccactgttcctgctttgagacctgtgaattcttgtgggacagttccactgacagcttgcgttcccgaggtaccagtcctcagtgacctcgggaaccccaaccacttaggtcccaaagccacaagggtgccctttgtcttgctgggaagctggctgagggcctgccagggctggaggaccagctctcccgcacagggttcagggcctctcccagaaaaaagaggttttgaagtgaaaaggcaacgaggggccagagggctccccaggatgggtcttttggaggtagatttgatgcccacaacgcatgcaaggctaagacccccaacttagccaacgaagcccatggcctcagaagggctgcagcttgctcaggccgtgggccaggatgcatgctggacggttctccaaataaaaaagccccaagggtttgtctacactgcttacctgctggggctgtgagtggggagacggcggcctgcctagggctcctggtgccaggctcaggaagagtcattcattgcaaagggccggcaagtgaaccagggccacctctgtccccagcctgtgagaggagcagctagccctgagaagggcaaggatgaatgaggctgaccacgtcacaggagtcctccaagagtgacggggattcagtcatcggccacaatggagagggcccggagctcactgagtttggcctcgttctcccgctcccgctgctcatcggagtggcctggctggtcaagctgatgggacaggtctccaaagatcttgtgcatttccgagtagtacacaacctgggggaggcgacaggggttggcacgtgctggctccagggaaccgtgtgcttcagggggccagaggctcacacttctctgctaccccctgcccttacccatctggagcggccaccactgtgctttgcgcatattcaggcacactggaagtatttagctgccagtaaaccgaaaccagtcgccgaacgacaaggtcagcagcaggaggaggacagcagcaggaggaggacagccgcaggaagacgn

SEQ ID NO: 424328 - DNA, 3564 bp, Homo sapiens
  misc_feature (3564)..(3564): n is a, c, g, or t
accagtggtcgcgcttccggagaggcgcttccggtggcggcggcagcagcggctgtggtggttccgggtgtctttgtccccccggtgtcgctgccctggcccgcagccttttccccacgactctgaaagaggacagcgttcccaatgtcccagtttaagcgccagcggatcaacccgcttccagggggacgcaacttctcaggcacagcttcaacatctcttctgggccctcctcctggtttgctcactcctcctgtggccacagaactgtgatggtgctggccgagctgtttctggagatgctccagagggattttggctatagagtttataagatgctactgagccttcctgaaaaggtcgtgtccccacctgaacctgagaaggaggaggcggccaaggaagaagccaccaaggaggaagaagccatcaaagaggaggtggtcaaggagcccaaggatgaggcacagaatgagggcccggctacagagtcagaggccccgctgaaggaggatgggcttttgcccaaaccactctcttctgggggagaggaagaagaaaaaccccggggcgaggcttctgaggacctgtgtgagatggccctggacccagaactgttgcttctgagggatgatggagaggaggagtttgcaggagcaaagctggaggattcggaggtccggtccgttgcctcaaaccagtcagagatggagttctcttcacttcaggacatgcccaaggagctggatccctctgctgtgctccccttagactgtctgcttgcttttgtgttctttgatgccaactggtgtggctacttgcaccggcgagacttagagaggatcctccttacccttgggatccggctcagtgcagagcaggccaagcagctggtcagcagggtggtgacccagaacatctgccagtaccggagccttcagtacagccgccaggagggcctggatggtggccttcccgaggaggtgctcttcggaaacctggacctgctgccccctcctgggaaaagcacgaagccaggtgctgcccccacagaacacaaagccttggtgtcccacaatggcagcctgattaacgtggggagcctgctgcagcgcgcggagcagcaggacagcggccggctctacctagagaacaagatccacacactggagctgaagctggaggagagccataaccgtttctcagccactgaagtaaccaataagacgctggcggcagagatgcaggagctgcgagtccggctggcggaggccgaggagaccgcccggacggcggagcgacagaagagccagctccagcggctgctgcaggagctccgcaggcgtctgacccccctgcagctggagatccagcgggtggtggaaaaggctgacagctgggtggagaaggaggagccggcacctagcaactgacggcctcgcacggaactgccatcctgtgagggcagcggtggcgcccggcaaagttggagcccttgcggtaccagaaagcagcgagagcgagacctgggagccagggcaggggtggctgaccccatgctcagcctctaggggacggcaggccatcaggctgggggctgtgctatgtgggatggatgtgtgaggaaccccggttccacttaacaactaaatacaacatcttttgcacccctagaatgtcattttgccctcaaccttggtatttctcctggggcccttttagtcttgtgctgactttctcctgtcctcttccagtttagaataagacaggggagaaaaaggcttttcgagtgtgggacaaggtctgatgtcagtgaacggaactgaagagcaagacatggagcctggctggggctaagcagccccctcctccggatggcacaggctctgctaggttccggacacaggcttctgggggaagggtctcccttggccatcacgggaatggagtccatgctagaaagagctcagtgttgggctgggtttgccagtagaacactgcgttccagtcaccccggtcttgccagaagaaaccagcacctctttcccgtggctcctgtgttcagaatgtggtattggctctggcccagccttctcccctgttacccataattcttgcctctttccataatccgtggtttcagtttgactttgtatataaagttggggtttttttttttttttttggcttgttttttaaataaaccaaagtcaaaaacaaactgagagtgtgtcctccacagctcttcctactctcctaggcttgcccgcgtgccctcccacccagcgcctctgctggaccacggtgcagttcgctccagaaggtgggccagggccggggaggtgcgcacacacccctggcatgctgggctgcctgctggagggtgctgctgctccgtggagggcagcaggcccaggaaggggtttcctctgctcgcctaagttacagcacaatactatgtggacgtttcattgaaaattttacttgaaaaaataaaattccagatactcaggtgagacacaaacccactgttcctgctttgagacctgtgaattcttgtgggacagttccactgacagcttgcgttcccgaggtaccagtcctcagtgacctcgggaaccccaaccacttaggtcccaaagccacaagggtgccctttgtcttgctgggaagctggctgagggcctgccagggctggaggaccagctctcccgcacagggttcagggcctctcccagaaaaaagaggttttgaagtgaaaaggcaacgaggggccagagggctccccaggatgggtcttttggaggtagatttgatgcccacaacgcatgcaaggctaagacccccaacttagccaacgaagcccatggcctcagaagggctgcagcttgctcaggccgtgggccaggatgcatgctggacggttctccaaataaaaaagccccaagggtttgtctacactgcttacctgctggggctgtgagtggggagacggcggcctgcctagggctcctggtgccaggctcaggaagagtcattcattgcaaagggccggcaagtgaaccagggccacctctgtccccagcctgtgagaggagcagctagccctgagaagggcaaggatgaatgaggctgaccacgtcacaggagtcctccaagagtgacggggattcagtcatcggccacaatggagagggcccggagctcactgagtttggcctcgttctcccgctcccgctgctcatcggagtggcctggctggtcaagctgatgggacaggtctccaaagatcttgtgcatttccgagtagtacacaacctgggggaggcgacaggggttggcacgtgctggctccagggaaccgtgtgcttcagggggccagaggctcacacttctctgctaccccctgcccttacccatctggagcggccaccactgtgctttgcgcatattcaggcacactggaagtatttagctgccagtaaaccgaaaccagtcgccgaacgacaaggtcagcagcaggaggaggacagcagcaggaggaggacagccgcaggaagacgn

SEQ ID NO: 424329 - DNA, 2960 bp, Homo sapiens
  misc_feature (2960)..(2960): n is a, c, g, or t
cagctgggacttcaggcatgcatcactgcatgtggcccaagccactggattctggacaggctgaatcctgggcgatagagccactgagggaactatttgcaaatcctgctcatctttgttttctttgcagcccaaggagctggatccctctgctgtgctccccttagactgtctgcttgcttttgtgttctttgatgccaactggtgtggctacttgcaccggcgagacttagagaggatcctccttacccttgggatccggctcagtgcagagcaggccaagcagctggtcagcagggtggtgacccagaacatctgccagtaccggagccttcagtacagccgccaggagggcctggatggtggccttcccgaggaggtgctcttcggaaacctggacctgctgccccctcctgggaaaagcacgaagccaggtgctgcccccacagaacacaaagccttggtgtcccacaatggcagcctgattaacgtggggagcctgctgcagcgcgcggagcagcaggacagcggccggctctacctagagaacaagatccacacactggagctgaagctggaggagagccataaccgtttctcagccactgaagtaaccaataagacgctggcggcagagatgcaggagctgcgagtccggctggcggaggccgaggagaccgcccggacggcggagcgacagaagagccagctccagcggctgctgcaggagctccgcaggcgtctgacccccctgcagctggagatccagcgggtggtggaaaaggctgacagctgggtggagaaggaggagccggcacctagcaactgacggcctcgcacggaactgccatcctgtgagggcagcggtggcgcccggcaaagttggagcccttgcggtaccagaaagcagcgagagcgagacctgggagccagggcaggggtggctgaccccatgctcagcctctaggggacggcaggccatcaggctgggggctgtgctatgtgggatggatgtgtgaggaaccccggttccacttaacaactaaatacaacatcttttgcacccctagaatgtcattttgccctcaaccttggtatttctcctggggcccttttagtcttgtgctgactttctcctgtcctcttccagtttagaataagacaggggagaaaaaggcttttcgagtgtgggacaaggtctgatgtcagtgaacggaactgaagagcaagacatggagcctggctggggctaagcagccccctcctccggatggcacaggctctgctaggttccggacacaggcttctgggggaagggtctcccttggccatcacgggaatggagtccatgctagaaagagctcagtgttgggctgggtttgccagtagaacactgcgttccagtcaccccggtcttgccagaagaaaccagcacctctttcccgtggctcctgtgttcagaatgtggtattggctctggcccagccttctcccctgttacccataattcttgcctctttccataatccgtggtttcagtttgactttgtatataaagttggggtttttttttttttttttggcttgttttttaaataaaccaaagtcaaaaacaaactgagagtgtgtcctccacagctcttcctactctcctaggcttgcccgcgtgccctcccacccagcgcctctgctggaccacggtgcagttcgctccagaaggtgggccagggccggggaggtgcgcacacacccctggcatgctgggctgcctgctggagggtgctgctgctccgtggagggcagcaggcccaggaaggggtttcctctgctcgcctaagttacagcacaatactatgtggacgtttcattgaaaattttacttgaaaaaataaaattccagatactcaggtgagacacaaacccactgttcctgctttgagacctgtgaattcttgtgggacagttccactgacagcttgcgttcccgaggtaccagtcctcagtgacctcgggaaccccaaccacttaggtcccaaagccacaagggtgccctttgtcttgctgggaagctggctgagggcctgccagggctggaggaccagctctcccgcacagggttcagggcctctcccagaaaaaagaggttttgaagtgaaaaggcaacgaggggccagagggctccccaggatgggtcttttggaggtagatttgatgcccacaacgcatgcaaggctaagacccccaacttagccaacgaagcccatggcctcagaagggctgcagcttgctcaggccgtgggccaggatgcatgctggacggttctccaaataaaaaagccccaagggtttgtctacactgcttacctgctggggctgtgagtggggagacggcggcctgcctagggctcctggtgccaggctcaggaagagtcattcattgcaaagggccggcaagtgaaccagggccacctctgtccccagcctgtgagaggagcagctagccctgagaagggcaaggatgaatgaggctgaccacgtcacaggagtcctccaagagtgacggggattcagtcatcggccacaatggagagggcccggagctcactgagtttggcctcgttctcccgctcccgctgctcatcggagtggcctggctggtcaagctgatgggacaggtctccaaagatcttgtgcatttccgagtagtacacaacctgggggaggcgacaggggttggcacgtgctggctccagggaaccgtgtgcttcagggggccagaggctcacacttctctgctaccccctgcccttacccatctggagcggccaccactgtgctttgcgcatattcaggcacactggaagtatttagctgccagtaaaccgaaaccagtcgccgaacgacaaggtcagcagcaggaggaggacagcagcaggaggaggacagccgcaggaagacgn

SEQ ID NO: 424330 - DNA, 3001 bp, Homo sapiens
accagtggtcgcgcttccggagaggcgcttccggtggcggcggcagcagcggctgtggtggttccgggtgtctttgtccccccggtgtcgctgccctggcccgcagccttttccccacgactctgaaagaggacagcgttcccaatgtcccagtttaagcgccagcggatcaacccgcttccagggggacgcaacttctcaggcacagcttcaacatctcttctgggccctcctcctggtttgctcactcctcctgtggccacagaactgtcccagaatgccaggcaccttcagggtggggagaaacagcgggtcttcactggtattgttaccagcttgcatgactactttggggttgtggatgaagaggtcttttttcagctaagtgtggtgaagggccgtctgccccagctgggtgagaaggtgctggtgaaggctgcatacaacccaggccaggcagtgccctggaatgctgtcaaggtgcaaacgctctccaaccagcccctactgaagtccccagcacctcctcttctgcatgtagcagccctgggccagaagcaagggatcctgggagctcagcctcagttgatcttccagcctcaccggattcccccactctttcctcagaagcctctgagtctcttccaaacatcccacacacttcacctgagccacctgaacagatttcctgcccggggccctcatggacggttggatcagggccgaagtgatgactatgactccaagaaacgcaaacagcgggctggtggagagccctggggtgctaagaagccaaggcatgacctgcctccttaccgggtccacctcactccttacactgtggacagccccatctgtgacttcctagaactccagcgccgttaccgcagcctcctggtcccctcagattttctgtccgtgcatctgagttggctatcagccttccccctgagccagcccttttccctccatcatccaagccggatccaggtctcttctgaaaaggaggcagctccagacgctggtgctgagcccatcactgcagacagtgaccccgcttatagttcgaaggtactgctgctctcttccccggggttggaggaattgtatcgttgttgcatgctctttgtggatgacatggctgagccaagggagacgccagagcatcctctgaagcagattaagtttttgctgggcaggaaagaagaggaggcagtgctggttgggggtgaatggtctccttccctggatggcctcgacccccaggctgacccgcaggtgctggtgcgtaccgccatccgctgtgcgcaggcccagactggcattgatttgagcggctgtaccaagtggtggcgctttgccgagtttcagtacctgcagccgggacccccccggcggcttcagacagtggtggtgtacctgccggatgtctggaccatcatgcctactttggaggagtgggaggccctgtgccagcagaaagctgcagaggcagctcccccaacccaggaggcacaaggggaaacggagcctactgaacaggcacctgatgccttggagcaagcagcagacacttctagacggaacgcagaaactccagaggccaccacacagcaggaaacggacactgatctcccagaggcccctccaccccccctagaacctgctgtcatcgcacgccctggctgtgtaaacctgtccctccatgggattgtggaggatcggaggccaaaggaaaggatctcttttgaggtgatggtgctggccgagctgtttctggagatgctccagagggattttggctatagagtttataagatgctactgagccttcctgaaaaggtcgtgtccccacctgaacctgagaaggaggaggcggccaaggaagaagccaccaaggaggaagaagccatcaaagaggaggtggtcaaggagcccaaggatgaggcacagaatgagggcccggctacagagtcagaggccccgctgaaggaggatgggcttttgcccaaaccactctcttctgggggagaggaagaagaaaaaccccggggcgaggcttctgaggacctgtgtgagatggccctggacccagaactgttgcttctgagggatgatggagaggaggagtttgcaggagcaaagctggaggattcggaggtccggtccgttgcctcaaaccagtcagagatggagttctcttcacttcaggacatgcccaaggagctggatccctctgctgtgctccccttagactgtctgcttgcttttgtgttctttgatgccaactggtgtggctacttgcaccggcgagacttagagaggatcctccttacccttgggatccggctcagtgcagagcaggccaagcagctggtcagcagggtggtgacccagaacatctgccagtaccggagccttcagtacagccgccaggagggcctggatggtggccttcccgaggaggtgctcttcggaaacctggacctgctgccccctcctgggaaaagcacgaagccaggtgctgcccccacagaacacaaagccttggtgtcccacaatggcagcctgattaacgtggggagcctgctgcagcgcgcggagcagcaggacagcggccggctctacctagagaacaagatccacacactggagctgaagctggaggagagccataaccgtttctcagccactgaagtaaccaataagacgctggcggcagagatgcaggagctgcgagtccggctggcggaggccgaggagaccgcccggacggcggagcgacagaagagccagctccagcggctgctgcaggagctccgcaggcgtctgacccctgagctgaattcagcggttgtgaaaggctacactggttgagagagaccgaactacaatacggctgacgaatgcattgtagcaacgtggccgcaattactcgtacaaacacagggactgacagaggtgtaccgtacttagagacatgtggtttttgatttaaccg

SEQ ID NO: 424331 - DNA, 3128 bp, Homo sapiens
accagtggtcgcgcttccggagaggcgcttccggtggcggcggcagcagcggctgtggtggttccgggtgtctttgtccccccggtgtcgctgccctggcccgcagccttttccccacgactctgaaagaggacagcgttcccaatgtcccagtttaagcgccagcggatcaacccgcttccagggggacgcaacttctcaggcacagcttcaacatctcttctgggccctcctcctggtttgctcactcctcctgtggccacagaactgtcccagaatgccaggcaccttcagggtggggagaaacagcgggtcttcactggtattgttaccagcttgcatgactactttggggttgtggatgaagaggtcttttttcagctaagtgtggtgaagggccgtctgccccagctgggtgagaaggtgctggtgaaggctgcatacaacccaggccaggcagtgccctggaatgctgtcaaggtgcaaacgctctccaaccagcccctactgaagtccccagcacctcctcttctgcatgtagcagccctgggccagaagcaagggatcctgggagctcagcctcagttgatcttccagcctcaccggattcccccactctttcctcagaagcctctgagtctcttccaaacatcccacacacttcacctgagccacctgaacagatttcctgcccggggccctcatggacggttggatcagggccgaagtgatgactatgactccaagaaacgcaaacagcgggctggtggagagccctggggtgctaagaagccaaggcatgacctgcctccttaccgggtccacctcactccttacactgtggacagccccatctgtgacttcctagaactccagcgccgttaccgcagcctcctggtcccctcagattttctgtccgtgcatctgagttggctatcagccttccccctgagccagcccttttccctccatcatccaagccggatccaggtctcttctgaaaaggaggcagctccagacgctggtgctgagcccatcactgcagacagtgaccccgcttatagttcgaaggtactgctgctctcttccccggggttggaggaattgtatcgttgttgcatgctctttgtggatgacatggctgagccaagggagacgccagagcatcctctgaagcagattaagtttttgctgggcaggaaagaagaggaggcagtgctggttgggggtgaatggtctccttccctggatggcctcgacccccaggctgacccgcaggtgctggtgcgtaccgccatccgctgtgcgcaggcccagactggcattgatttgagcggctgtaccaagtggtggcgctttgccgagtttcagtacctgcagccgggacccccccggcggcttcagacagtggtggtgtacctgccggatgtctggaccatcatgcctactttggaggagtgggaggccctgtgccagcagaaagctgcagaggcagctcccccaacccaggaggcacaaggggaaacggagcctactgaacaggcacctgatgccttggagcaagcagcagacacttctagacggaacgcagaaactccagaggccaccacacagcaggaaacggacactgatctcccagaggcccctccaccccccctagaacctgctgtcatcgcacgccctggctgtgtaaacctgtccctccatgggattgtggaggatcggaggccaaaggaaaggatctcttttgaggtgatggtgctggccgagctgtttctggagatgctccagagggattttggctatagagtttataagatgctactgagccttcctgaaaaggtcgtgtccccacctgaacctgagaaggaggaggcggccaaggaagaagccaccaaggaggaagaagccatcaaagaggaggtggtcaaggagcccaaggatgaggcacagaatgagggcccggctacagagtcagaggccccgctgaaggaggatgggcttttgcccaaaccactctcttctgggggagaggaagaagaaaaaccccggggcgaggcttctgaggacctgtgtgagatggccctggacccagaactgttgcttctgagggatgatggagaggaggagtttgcaggagcaaagctggaggattcggaggtccggtccgttgcctcaaaccagtcagagatggagttctcttcacttcaggacatgcccaaggagctggatccctctgctgtgctccccttagactgtctgcttgcttttgtgttctttgatgccaactggtgtggctacttgcaccggcgagacttagagaggatcctccttacccttgggatccggctcagtgcagagcaggccaagcagctggtcagcagggtggtgacccagaacatctgccagtaccggagccttcagtacagccgccaggagggcctggatggtggccttcccgaggaggtgctcttcggaaacctggacctgctgccccctcctgggaaaagcacgaagccaggtgctgcccccacagaacacaaagccttggtgtcccacaatggcagcctgattaacgtggggagcctgctgcagcgcgcggagcagcaggacagcggccggctctacctagagaacaagatccacacactggagctgaagctggaggagagccataaccgtttctcagccactgaagtaaccaataagacgctggcggcagagatgcaggagctgcgagtccggctggcggaggccgaggagaccgcccggacggcggagcgacagaagagccagctccagcggctgctgcaggagctccgcaggcgtctgacccccctgcagctggagatccagcgggtggtggaaaaggctgacagctgggtggagaaggaggagccggcacctagcaactgacggcctcgcacggaactgccatcctgtgagggcagcggtggcgcccggcaaagttggagcccttgcggtaccagaaagcagcgagagcgagacctgggagccagggcaggggtggctgaccccatgctcagcctctaggggacggcaggccgatctgagccgttaggccgatctgagccgttaggccgatctgagccgttaggccgatctga

SEQ ID NO: 424332 - DNA, 2872 bp, Homo sapiens
accagtggtcgcgcttccggagaggcgcttccggtggcggcggcagcagcggctgtggtggttccgggtgtctttgtccccccggtgtcgctgccctggcccgcagccttttccccacgactctgaaagaggacagcgttcccaatgtcccagtttaagcgccagcggatcaacccgcttccagggggacgcaacttctcaggcacagcttcaacatctcttctgggccctcctcctggtttgctcactcctcctgtggccacagaactgtcccagaatgccaggcaccttcagggtggggagaaacagcgggtcttcactggtattgttaccagcttgcatgactactttggggttgtggatgaagaggtcttttttcagctaagtgtggtgaagggccgtctgccccagctgggtgagaaggtgctggtgaaggctgcatacaacccaggccaggcagtgccctggaatgctgtcaaggtgcaaacgctctccaaccagcccctactgaagtccccagcacctcctcttctgcatgtagcagccctgggccagaagcaagggatcctgggagctcagcctcagttgatcttccagcctcaccggattcccccactctttcctcagaagcctctgagtctcttccaaacatcccacacacttcacctgagccacctgaacagatttcctgcccggggccctcatggacggttggatcagggccgaagtgatgactatgactccaagaaacgcaaacagcgggctggtggagagccctggggtgctaagaagccaaggcatgacctgcctccttaccgggtccacctcactccttacactgtggacagccccatctgtgacttcctagaactccagcgccgttaccgcagcctcctggtcccctcagattttctgtccgtgcatctgagttggctatcagccttccccctgagccagcccttttccctccatcatccaagccggatccaggtctcttctgaaaaggaggcagctccagacgctggtgctgagcccatcactgcagacagtgaccccgcttatagttcgaaggtactgctgctctcttccccggggttggaggaattgtatcgttgttgcatgctctttgtggatgacatggctgagccaagggagacgccagagcatcctctgaagcagattaagtttttgctgggcaggaaagaagaggaggcagtgctggttgggggtgaatggtctccttccctggatggcctcgacccccaggctgacccgcaggtgctggtgcgtaccgccatccgctgtgcgcaggcccagactggcattgatttgagcggctgtaccaagtggtggcgctttgccgagtttcagtacctgcagccgggacccccccggcggcttcagacagtggtggtgtacctgccggatgtctggaccatcatgcctactttggaggagtgggaggccctgtgccagcagaaagctgcagaggcagctcccccaacccaggaggcacaaggggaaacggagcctactgaacaggcacctgatgccttggagcaagcagcagacacttctagacggaacgcagaaactccagaggccaccacacagcaggaaacggacactgatctcccagaggcccctccaccccccctagaacctgctgtcatcgcacgccctggctgtgtaaacctgtccctccatgggattgtggaggatcggaggccaaaggaaaggatctcttttgaggtgatggtgctggccgagctgtttctggagatgctccagagggattttggctatagagtttataagatgctactgagccttcctgaaaaggtcgtgtccccacctgaacctgagaaggaggaggcggccaaggaagaagccaccaaggaggaagaagccatcaaagaggaggtggtcaaggagcccaaggatgaggcacagaatgagggcccggctacagagtcagaggccccgctgaaggaggatgggcttttgcccaaaccactctcttctgggggagaggaagaagaaaaaccccggggcgaggcttctgaggacctgtgtgagatggccctggacccagaactgttgcttctgagggatgatggagaggaggagtttggtatgttgagtggtgagaggggagcttgcaggcttgggatgtggctttccacctgtggccaagctggttttcatttttgtactgtggagttgggtgggccctgctctccatttatcttggcctttctgtagcaggagcaaagctggaggattcggaggtccggtccgttgcctcaaaccagtcagagatggagttctcttcacttcaggacatggtgaggcctcttctcgaccactctgggtctcagtggtggtgaggcttggcaaggcctctggcccactcctgggagaaggatgcttaccagtgacttcctttcttgatggacccaacacacagtgtggtccttggctcatggaagggcacgttcataggctccaggagaacatttcagtgtctgttggggtgaatgggagaggaagtgggcagtcctggccatacccaagtctctttcaggtcctcgtcccagtgtggtatatagacacggcttccccactggacccagggaaggagctgcaggagtccacccagtcagggaggcttgctgccgaccatgacgacggtgatgacaggagcggacaccccgagagctgacccgtgccaggccctgttctcagtgctttacgttgctcatccaacttcatcttcagcaacagcctgtgccactcggattggcgttacctgtgcttctcgggtgacggaactgaggtagagctaagtcagctgtccagagctgcgcag

SEQ ID NO: 424333 - DNA, 2520 bp, Homo sapiens
accagtggtcgcgcttccggagaggcgcttccggtggcggcggcagcagcggctgtggtggttccgggtgtctttgtccccccggtgtcgctgccctggcccgcagccttttccccacgactctgaaagaggacagcgttcccaatgtcccagtttaagcgccagcggatcaacccgcttccagggggacgcaacttctcaggcacagcttcaacatctcttctgggccctcctcctggtttgctcactcctcctgtggccacagaactgtcccagaatgccaggcaccttcagggtggggagaaacagcgggtcttcactggtattgttaccagcttgcatgactactttggggttgtggatgaagaggtcttttttcagctaagtgtggtgaagggccgtctgccccagctgggtgagaaggtgctggtgaaggctgcatacaacccaggccaggcagtgccctggaatgctgtcaaggtgcaaacgctctccaaccagcccctactgaagtccccagcacctcctcttctgcatgtagcagccctgggccagaagcaagggatcctgggagctcagcctcagttgatcttccagcctcaccggattcccccactctttcctcagaagcctctgagtctcttccaaacatcccacacacttcacctgagccacctgaacagatttcctgcccggggccctcatggacggttggatcagggccgaagtgatgactatgactccaagaaacgcaaacagcgggctggtggagagccctggggtgctaagaagccaaggcatgacctgcctccttaccgggtccacctcactccttacactgtggacagccccatctgtgacttcctagaactccagcgccgttaccgcagcctcctggtcccctcagattttctgtccgtgcatctgagttggctatcagccttccccctgagccagcccttttccctccatcatccaagccggatccaggtctcttctgaaaaggaggcagctccagacgctggtgctgagcccatcactgcagacagtgaccccgcttatagttcgaaggtactgctgctctcttccccggggttggaggaattgtatcgttgttgcatgctctttgtggatgacatggctgagccaagggagacgccagagcatcctctgaagcagattaagtttttgctgggcaggaaagaagaggaggcagtgctggttgggggtgaatggtctccttccctggatggcctcgacccccaggctgacccgcaggtgctggtgcgtaccgccatccgctgtgcgcaggcccagactggcattgatttgagcggctgtaccaagtggtggcgctttgccgagtttcagtacctgcagccgggacccccccggcggcttcagacagtggtggtgtacctgccggatgtctggaccatcatgcctactttggaggagtgggaggccctgtgccagcagaaagctgcagaggcagctcccccaacccaggaggcacaaggggaaacggagcctactgaacaggcacctgatgccttggagcaagcagcagacacttctagacggaacgcagaaactccagaggccaccacacagcaggaaacggacactgatctcccagaggcccctccaccccccctagaacctgctgtcatcgcacgccctggctgtgtaaacctgtccctccatgggattgtggaggatcggaggccaaaggaaaggatctcttttgaggtgatggtgctggccgagctgtttctggagatgctccagagggattttggctatagagtttataagatgctactgagccttcctgaaaaggtcgtgtccccacctgaacctgagaaggaggaggcggccaaggaagaagccaccaaggaggaagaagccatcaaagaggaggtggtcaaggagcccaaggatgaggcacagaatgagggcccggctacagagtcagaggccccgctggtgagtaccctgccacctcgggctgtcatagtgcttaccgtgaccgcgcacctttaccccgggctctgttccgagcgcttcctgtgccctagctcattccctgcacccttgctcggcatggactgaggccgcacagctagtaagtagcacacctagtgcaagggaaggtggcgcagagtgcagggagcatggctgagcagcctgacagcacagaaacccttgtcactgagaacgcttggcagagtggggtgctttgattgcctgatggttaactagaaaattttgtaggccgggcgctgtagctcacccctgtaatcccagcactttgggagaccgaggtgggcagatcatgaggtcaggagtttgagaccagcctggccaatatagtgaaacgccgtctctactaaaaatacaaaaattagccgggtgtggtggtgcatgcctgttttctcagctactcgggaggctgaggcaggagaatcgcttgaacccgggaggcggaggttgcagtgagccgaggtcgcgccactg

SEQ ID NO: 424334 - DNA, 1309 bp, Homo sapiens
accagtggtcgcgcttccggagaggcgcttccggtggcggcggcagcagcggctgtggtggttccgggtgtctttgtccccccggtgtcgctgccctggcccgcagccttttccccacgactctgaaagaggacagcgttcccaatgtcccagtttaagcgccagcggatcaacccgcttccagggggacgcaacttctcaggcacagcttcaacatctcttctgggccctcctcctggtttgctcactcctcctgtggccacagaactgtcccagaatgccaggcaccttcagggtggggagaaacagcgggtcttcactggtattgttaccagcttgcatgactactttggggttgtggatgaagaggtcttttttcagctaagtgtggtgaagggccgtctgccccagctgggtgagaaggtgctggtgaaggctgcatacaacccaggccaggcagtgccctggaatgctgtcaaggtgcaaacgctctccaaccagcccctactgaagtccccagcacctcctcttctgcatgtagcagccctgggccagaagcaagggatcctgggagctcagcctcagttgatcttccagcctcaccggattcccccactctttcctcagaagcctctgagtctcttccaaacatcccacacacttcacctgagccacctgaacagatttcctgcccggggccctcatggacggttggatcagggccgaagtgatgactatgactccaagaaacgcaaacagcgggctggtggagagccctggggtgctaagaagccaaggcatgacctgcctccttaccgggtccacctcactccttacactgtggacagccccatctgtgacttcctagaactccagcgccgttaccgcagcctcctggtcccctcagattttctgtccgtgcatctgagttggctatcagccttccccctgagccagcccttttccctccatcatccaagccggatccaggtctcttctgaaaaggaggcagctccagacgctggtgctgagcccatcactgcagacagtgaccccgcttatagttcgaaggtactgctgctctcttccccggggttggaggaattgtatcgttgttgcatgagcacctctttcccgtggctcctgtgttcagaatgtggtattggctctggcccagccttctcccctgttacccataattcttgcctctttccataatccgtggtttcagtttgactttgtatataaagttggggtttttttttttttttttggcttgttttttaaataaaccaaagtcaaaaacaaa

SEQ ID NO: 424335 - DNA, 678 bp, Homo sapiens
accagtggtcgcgcttccggagaggcgcttccggtggcggcggcagcagcggctgtggtggttccgggtgtctttgtccccccggtgtcgctgccctggcccgcagccttttccccacgactctgaaagaggacagcgttcccaatgtcccagtttaagcgccagcggatcaacccgcttccagggggacgcaacttctcaggcacagcttcaacatctcttctgggccctcctcctggtttgctcactcctcctgtggccacagaactgtcccagaatgccaggcaccttcagggtggggagaaacagcgggtcttcactggtattgttaccagcttgcatgactactttggggttgtggatgaagaggtcttttttcagctaagtgtggtgaagggccgtctgccccagctgggtgagaaggtgctggtgaaggctgcatacaacccaggccaggcagtgccctggaatgctgtcaaggtgcaaacgctctccaaccagcccctactgaagtccccagcacctcctcttctgcatgtagcagccctgggccagaagcaagggatcctgggagctcagcctcagttgatcttccagcctcaccggattcccccactctttcctcagaagctgagtctcttccaaacatcccacggaataaggtggtacgagctgata

SEQ ID NO: 424336 - DNA, 353 bp, Homo sapiens
tgagtgctgactggaaactgaagcccttgcctgtgaacgtggtgtctgcgtggagttgtcactaaagaagttagtacctccttttgccatgtgcaggtggcgctttgccgagtttcagtacctgcagccgggacccccccggcggcttcagacagtggtggtgtacctgccggatgtctggaccatcatgcctactttggaggagtgggaggccctgtgccagcagaaagctgcagaggcagctcccccaacccaggaggcacaaggggtaaggctgtgccttagccagcagcgggggatataggtggcctaatcccgggacccagagggtctcatttcagctgttgtcacag

SEQ ID NO: 424337 - DNA, 128 bp, Homo sapiens
tcagctgagaccgacttctaaggagttcctctgaggtgtcccgtatcttcctgattcacagtttggcttctggctagaatggtttccaggaacatcttcagccactgctcagtgattacggtctctgt

SEQ ID NO: 424338 - DNA, 384 bp, Homo sapiens
  misc_feature (354)..(354): n is a, c, g, or t
  misc_feature (362)..(362): n is a, c, g, or t
gtgttctataatcagctgagttgctgtggaggttaatctaagccacagatagagcggagtgtccattatcatagatattctgaaggatcgaatcctttgcatcttggaatggctgtaacatgagtgcactgttgtccagctcttttacacttgtactcctagagtcatcttctgacttcaggagaacttgatagaacatgctgttcactaaggatcattgatattagattgcatacatagtacttgggcaactgaaatccctcaacagtaaaatatgggtgttcttggcatatatgctattaggaacttaaggaaaagggtaccaggaaaaaaattaagttctggacacacttntttttctntttaaatttaaatccgtcacgg

SEQ ID NO: 424339 - DNA, 6783 bp, Homo sapiens
tcgggctaatcgccgggcggcgcgcgccgagaagttctgggcaaagtactcagaactggccgcgtgctggtggcgcccgccagccggcccgggagaggggacttgagcgcttcgcggccggtgcgcagcgcggctccggccccgcagtctgtctgcaagtggccatccccgcccccgactcctgcggccggtgcgggagctgtcagctgcacgttgcgggggtaccggagaagccggggttgccttctcccggttctgtgcgctaaccccggagcccggccccggggaactagggagcgtctccggctgcacagcgctcaggttttagggtttcctttgggccacccaaaatgttttttaaatactttggataagagctaaaccacctgccactggggacttccatactctcggctcccttgtcatctgatggcattttgattgtctcgaggccaagtgacttgctgtccatgatgagtgatgagaagaaccttggtgtgtcccaaaaattggtatcaccttcaaggagcacaagtagctgctcttccaagcaaggaagtcgacaggacagctgggaagtggtggaaggactgaggggggagatgaattacacccaggagccaccagttcagaaaggatttttgctgaaaaagaggaagtggcccttaaaaggctggcataagagattcttctatctggacaaaggaatcttgaaatatgccaagagccaaaccgatatagagagagagaagctgcatggctgcattgatgtcgggctctcagtgatgtctgtaaagaagtcatcaaaatgcatagaccttgacaccgaggagcacatctaccatctgaaggtcaagtcagaagaagtctttgatgagtgggtatcgaaacttcgccaccacagaatgtatcgtcagaatgaaattgccatgtttccacatgaagttaaccactttttctcagggtccaccatcacagactcttcatctggggtgtttgactccatttcaagtaggaagcgtagcagtatatcaaagcagaatttatttcaaactggaagcaatgtatcattttcttgtggtggtgagacacgagttccattatggttacagtcttcagaggacatggaaaaatgctccaaagacctggcgcactgtcatgcctacctggtagaaatgagccagctcctgcaaagcatggacgtcctgcatcggacatactcggcaccagctatcaacgccatccagggtggatcttttgaaagtcccaaaaaggaaaaaagatcgcacaggaggtggcggtccagagctattggcaaagatgctaaaggaacactgcaggtcccgaaacctttttctggcccagtaagactacactcctccaatcctaatttgtcaacactagattttggagaagagaaaaattattctgatggctctgaaacctcatcagagttttctaaaatgcaagaagatctgtgtcatattgcccataaagtttacttcactttaaggtcagcttttaatatcatgtcagcggagagagagaaactgaagcagctgatggagcaggatgcctcctcctccccgtctgctcaggtcattggtctgaagaacgccctgtcatccgccctagcacaaaacacagatcttaaagaacgcttacgcagaatccatgccgagtctctgctcctcgactcccccgctgtcgccaagtcgggtgacaatctggcagaggaaaactccagagatgaaaaccgagctctagttcatcagctttctaatgaaagtagactctccatcactgactccctttctgagttttttgatgctcaggaagttctgttatctccaagctcttcagaaaacgagatttctgatgatgactcatatgtcagtgacataagtgataatctttccttagataatctcagtaatgatttagataatgagagacagaccttggggcctgtccttgatagtggtcgggaagcgaagtcccggagaagaacgtgcctgccggcgccctgcccgagcagcagtaacatcagcctgtggaacatcctgaggaacaacatcgggaaggacctgtccaaggtggccatgccggtggagctgaacgagcccctgaacacgctgcagaggctctgcgaggagctggagtacagcgagctcctggacaaggccgcgcagattcccagccccctggaaaggatggtatatgtggcagcctttgccatatcagcgtatgcatctagctactaccgagctggaagcaagccatttaatccggttcttggagaaacatatgaatgtattcgggaggacaagggcttccagtttttttcagaacaggtcagccaccatccgcctatctctgcgtgtcatgctgagtctagaaattttgttttctggcaagatgtgagatggaaaaacaaattctggggcaaatccatggaaattgttccaattggcacaacccatgtgactctgccagtttttggggatcattttgagtggaacaaagtgacctcttgcatccataacatcttaagcgggcagaggtggattgagcactatggagagattgtcatcaagaacctgcatgatgattcctgctactgcaaagtgaattttataaaggcaaaatactggagcactaatgcccatgagattgaaggcacagtgtttgacaggagtggaaaagcggttcatcggctgtttgggaaatggcatgaaagcatctactgtggcggcggctcctcttctgcctgtgtatggagagcaaatcctatgccgaaaggctacgagcaatactatagcttcacacagtttgcgctggaattaaatgaaatggatccatcatcaaagtctttattgccacctactgacactcgatttaggccagaccagaggtttctagaggaagggaacttagaagaagctgaaatacaaaagcagaggattgaacaactgcagagagaaaggcggcgggtcttagaagaaaatcatgtggagcaccagcctcggtttttcaggaaatccgacgatgactcttgggtgagcaacggcacctatttggaacttagaaaagatcttggtttttccaaactggaccatcctgtcttatggtgaaaaagtaaagaagaaagataacattagtgtatttctcctgtgcttgccttctgaagtggcacaaacctgtgtttatatatttaaaagatactctaggatgatcacttgtgcttagcttagcattgtaactctttaagtctatattttcctcagtgcgtttctttacaatttcaaatgttaccctgattgtttatatgaatgtagaacaccttgacatttctttttatatataaactatttaataaaaatgaaagattgaatgttcatgtgtgggttaaaaaaagaagctttaacactaattttccaaaggttagggaagattccaattaaatttatgccttataaaattatgttgtagaaaaaaaatcaacctctcccaggtgcattaagaaataagaattcccagggttactcacccatgcgtaagctacccaagtttaatttggtagctgaaatatctttttgcctcagacagctcttgaattgctcatacagaacaattctgctggtgctggagtctgaagaatattttcatttgcattttagtggttagggagaggatataagattaatggaatgtatatttttatataagacgtatacggcaccttcttgaaaaggaagcatttgaacttgttcctccctatagttctattgccttatatgcaaaattgtaccctgttgctcagagaaattattcataagagaaaagaattccaattaattaaatatcacaatagcatcccagagagacagtaggaaatttctccttagtgagagctgagtccttgagaagttaagagactgtttcctgcttcccaccccaccccgttttttgtccctccgtttgatcacctccctgttgagtatggaatgtcccagtttaatataaaacatacagtttattccacacagcagtttgactttgtaaaagtttagcaaaataactgattgttttggataactcaacatgtttttcttaaatgctgttttagtattttctacctcttaataagcaccatattttagatcttgtataaaaagttgccatctgccttatagacaaatgtagagaattgatgttcttgctttgtgttgtgttctggtaaagctttaagtgagtgtcttacccctttcctatactttcttgttatccatatcattcttttgtgagttttgcagcagtcttgaataatacagattataactactgaaaggggaaccttcgtctttttaaatgtgttatttcacattacaataatatgtgtagtagttgaattgtgttatcaaagcatgtccaacttctgtccagatgacattaaaaccaaagcctaattgttaagcctcttattctaaagtccatagcaatgctatggaatatcaagtataatgatgtagtaaaaagatttctccagaaaacactttgagatacttaaagaaattcagagcatatcgaatgttatgaatgaagagtaaaataattacaggaaaagaatgcatgatttttcattgtcacaccaaataaccagttggacaatattgcattttcaaaatggagagttatttaaagtggatgtgtagccttctggaatctgcacgtgactggcattttaaaacaactcattaaatattggattcattttatcgagatgccaagatgaacacaatgtgaatatcatttccatttctaagcagttgaatgacacagtcagattctttggtgtatgctttgttctttccatctcaagcatttatccaaattctgctcacagacatgaggaagcaggctgtagatttaagggcactcaaggggaaaacaaatgtagtttccacagtgtgaggataaatgtagaatcgtggtaatattggctgttaaattggcctgctccagagactggctcaaaaaagaaagaagcaacgaaaacaaaatgcacagcctgaatggacgtagcactgtcatgtggcatttggaaaatctttaattatcctaatgttatttcacttgcccttatgctttattttagagtcccagggacaactggatgaaacattacgtctgtagtcatcttatttgagatgggggtgggaacgaattaaaatatgatagagaactatatgcagattttaaaatctagtcagtactagcatctataaagggcttttctgaaatttaaacagcttggtgatgcatcctgatattataagcttaaaactatcttgagggggaaatgacttcttttctccttctgtcccttttctcaaaagcatctttcccccaaatgtatgtctctaggacattttatagttttaagaggaagaaaacagaaacgtggcatcatttgggaagaaccaaggtagaatttaattttctggactttaaatctcctggttaaataatgctaatcactgtaccatttgagttacatgttttaacctcttttttttttctaattattccatccaaaatttctggtgaattacacagaaatttttggaaatgggactttgtgcaggtaaccaccctgcacttcaggtaatgttcctgtcacagctgtcgactaccccacgctgcaggaaatccattcagaaatgagctaacagtctccagtgtagcaggagagccagtcacttccctccccaggccccaaagcaccccaaggctggtattccttgagtcataggtattaataataaaagcctcaatgcagcttctccatgtagttcctctcctacaagccaggtggattctggtcctaactaaagagatgggagttcacctgagggcaagaagtacccaggatgcccaaacagccgcacaggtgtcctgtgcttcctgtgagacttcctgggggaaatatacaaactaatatattttttaatgtttacgtcatttacactgctgcttttctcatattctgcttttaattacttgtagtaaatcatttgtttgggcttcaagcactgtcttccatctgcatcttccagatttatcatgagtgatcttgttctactgttaaagatgtcaagcctaaaaagtaataaagtttttatttggctgttgaaccttgatgtagcccctactacatacactacaagttatgccttctggctactacagaatctccgcagaccttttagttatgagtagaagcaataagaaggtgtccttatggtcttaggaataatagttccaatgtattggcataatttgtttgaatgtctttattttgatattaacaccggcataaatctatttttgctaccagatgatagctattttcatttgctctattttcctctgcattgtactaatctgttactcagtgttagtcttcatttttctgtgttggaaacctgcgtcatgtaaatatctgcaaatcatgacagtctaaagtgcaaaccattttcagagactttggggaatgcagtgatcagaagtggctaatttattttatttctgattattttatccagagggtacttttttaatggatatttgtaaatcttccacttaaccactgaaaattattttgttttaatcccacccttccatccatacctctgcctccccaaaaagctcctattaatttgcttatccccctcatgtagctagttgaatgtgaataaataacatggaaaaaaaggccac

SEQ ID NO: 424340 - DNA, 330 bp, Homo sapiens
  misc_feature (313)..(313): n is a, c, g, or t
cttggagagcattcaaggaaaaagtccagaaagtgcgctgtcagaccacgtcactaagagtttcatcaagctcttagagatcgctcctgcagggcccactgctgtgcttttctgaaacatccatttattaacagagccccactattttaacatgttccaggccctagcacaaaacacagatcttaaagaacgcttacgcagaatccatgccgagtctctgctcctcgactcccccgctgtcgccaagtcgggtgacaatctggcagaggaaaactccagagatgaaaaccgagctctagttcatcatattgantgcgggccggctcatta

SEQ ID NO: 424341 - DNA, 7182 bp, Homo sapiens
tcgggctaatcgccgggcggcgcgcgccgagaagttctgggcaaagtactcagaactggccgcgtgctggtggcgcccgccagccggcccgggagaggggacttgagcgcttcgcggccggtgcgcagcgcggctccggccccgcagtctgtctgcaagtggccatccccgcccccgactcctgcggccggtgcgggagctgtcagctgcacgttgcgggggtaccggagaagccggggttgccttctcccggttctgtgcgctaaccccggagcccggccccggggaactagggagcgtctccggctgcacagcgctcaggttttagggtttcctttgggccacccaaaatgttttttaaatactttggataagagctaaaccacctgccactggggacttccatactctcggctcccttgtcatctgatggcattttgattgtctcgaggccaagtgacttgctgtccatgatgagtgatgagaagaaccttggtgtgtcccaaaaattggtatcaccttcaaggagcacaagtagctgctcttccaagcaaggaagtcgacaggacagctgggaagtggtggaaggactgaggggggagatgaattacacccaggagccaccagttcagaaaggatttttgctgaaaaagaggaagtggcccttaaaaggctggcataagagattcttctatctggacaaaggaatcttgaaatatgccaagagccaaaccgatatagagagagagaagctgcatggctgcattgatgtcgggctctcagtgatgtctgtaaagaagtcatcaaaatgcatagaccttgacaccgaggagcacatctaccatctgaaggtcaagtcagaagaagtctttgatgagtgggtatcgaaacttcgccaccacagaatgtatcgtcagaatgaaattgccatgtttccacatgaagttaaccactttttctcagggtccaccatcacagactcttcatctggggtgtttgactccatttcaagtaggaagcgtagcagtatatcaaagcagaatttatttcaaactggaagcaatgtatcattttcttgtggtggtgagacacgagttccattatggttacagtcttcagaggacatggaaaaatgctccaaagacctggcgcactgtcatgcctacctggtagaaatgagccagctcctgcaaagcatggacgtcctgcatcggacatactcggcaccagctatcaacgccatccagggtggatcttttgaaagtcccaaaaaggaaaaaagatcgcacaggaggtggcggtccagagctattggcaaagatgctaaaggaacactgcaggtcccgaaacctttttctggcccagtaagactacactcctccaatcctaatttgtcaacactagattttggagaagagaaaaattattctgatggctctgaaacctcatcagagttttctaaaatgcaagaagatctgtgtcatattgcccataaagtttacttcactttaaggtcagcttttaatatcatgtcagcggagagagagaaactgaagcagctgatggagcaggatgcctcctcctccccgtctgctcaggtcattggtctgaagaacgccctgtcatccgccctagcacaaaacacagatcttaaagaacgcttacgcagaatccatgccgagtctctgctcctcgactcccccgctgtcgccaagtcgggtgacaatctggcagaggaaaactccagagatgaaaaccgagctctagttcatcagctttctaatgaaagtagactctccatcactgactccctttctgagttttttgatgctcaggaagttctgttatctccaagctcttcagaaaacgagatttctgatgatgactcatatgtcagtgacataagtgataatctttccttagataatctcagtaatgatttagataatgagagacagaccttggggcctgtccttgatagtggtcgggaagcgaagtcccggagaagaacgtgcctgccggcgccctgcccgagcagcagtaacatcagcctgtggaacatcctgaggaacaacatcgggaaggacctgtccaaggtggccatgccggtggagctgaacgagcccctgaacacgctgcagaggctctgcgaggagctggagtacagcgagctcctggacaaggccgcgcagattcccagccccctggaaaggatggtgaggagtcagccttcccttgccactgtccagcctcggtccccaagccacgaggccattcacggggcccatcagagagacagcccctgttccctccggtttcattttgattgttccgtaaacaggttcattactcagagctgtctggcttcctccgcctggctgtttccagtcaccttgtgaggatttggagacggggttggggtgcttctccgtggcacttggtgcctggggtagttctgttctgtgggtttgtgcttcctctttctccagaagccttctggctgattgttccgatgtgcccggctggaaaacatgtctttagggctgtctgcatgtttatttttacttccctgggtggacagaatttaatttctcgagctgtttttctcatccagggtatatgtggcagcctttgccatatcagcgtatgcatctagctactaccgagctggaagcaagccatttaatccggttcttggagaaacatatgaatgtattcgggaggacaagggcttccagtttttttcagaacaggtcagccaccatccgcctatctctgcgtgtcatgctgagtctagaaattttgttttctggcaagatgtgagatggaaaaacaaattctggggcaaatccatggaaattgttccaattggcacaacccatgtgactctgccagtttttggggatcattttgagtggaacaaagtgacctcttgcatccataacatcttaagcgggcagaggtggattgagcactatggagagattgtcatcaagaacctgcatgatgattcctgctactgcaaagtgaattttataaaggcaaaatactggagcactaatgcccatgagattgaaggcacagtgtttgacaggagtggaaaagcggttcatcggctgtttgggaaatggcatgaaagcatctactgtggcggcggctcctcttctgcctgtgtatggagagcaaatcctatgccgaaaggctacgagcaatactatagcttcacacagtttgcgctggaattaaatgaaatggatccatcatcaaagtctttattgccacctactgacactcgatttaggccagaccagaggtttctagaggaagggaacttagaagaagctgaaatacaaaagcagaggattgaacaactgcagagagaaaggcggcgggtcttagaagaaaatcatgtggagcaccagcctcggtttttcaggaaatccgacgatgactcttgggtgagcaacggcacctatttggaacttagaaaagatcttggtttttccaaactggaccatcctgtcttatggtgaaaaagtaaagaagaaagataacattagtgtatttctcctgtgcttgccttctgaagtggcacaaacctgtgtttatatatttaaaagatactctaggatgatcacttgtgcttagcttagcattgtaactctttaagtctatattttcctcagtgcgtttctttacaatttcaaatgttaccctgattgtttatatgaatgtagaacaccttgacatttctttttatatataaactatttaataaaaatgaaagattgaatgttcatgtgtgggttaaaaaaagaagctttaacactaattttccaaaggttagggaagattccaattaaatttatgccttataaaattatgttgtagaaaaaaaatcaacctctcccaggtgcattaagaaataagaattcccagggttactcacccatgcgtaagctacccaagtttaatttggtagctgaaatatctttttgcctcagacagctcttgaattgctcatacagaacaattctgctggtgctggagtctgaagaatattttcatttgcattttagtggttagggagaggatataagattaatggaatgtatatttttatataagacgtatacggcaccttcttgaaaaggaagcatttgaacttgttcctccctatagttctattgccttatatgcaaaattgtaccctgttgctcagagaaattattcataagagaaaagaattccaattaattaaatatcacaatagcatcccagagagacagtaggaaatttctccttagtgagagctgagtccttgagaagttaagagactgtttcctgcttcccaccccaccccgttttttgtccctccgtttgatcacctccctgttgagtatggaatgtcccagtttaatataaaacatacagtttattccacacagcagtttgactttgtaaaagtttagcaaaataactgattgttttggataactcaacatgtttttcttaaatgctgttttagtattttctacctcttaataagcaccatattttagatcttgtataaaaagttgccatctgccttatagacaaatgtagagaattgatgttcttgctttgtgttgtgttctggtaaagctttaagtgagtgtcttacccctttcctatactttcttgttatccatatcattcttttgtgagttttgcagcagtcttgaataatacagattataactactgaaaggggaaccttcgtctttttaaatgtgttatttcacattacaataatatgtgtagtagttgaattgtgttatcaaagcatgtccaacttctgtccagatgacattaaaaccaaagcctaattgttaagcctcttattctaaagtccatagcaatgctatggaatatcaagtataatgatgtagtaaaaagatttctccagaaaacactttgagatacttaaagaaattcagagcatatcgaatgttatgaatgaagagtaaaataattacaggaaaagaatgcatgatttttcattgtcacaccaaataaccagttggacaatattgcattttcaaaatggagagttatttaaagtggatgtgtagccttctggaatctgcacgtgactggcattttaaaacaactcattaaatattggattcattttatcgagatgccaagatgaacacaatgtgaatatcatttccatttctaagcagttgaatgacacagtcagattctttggtgtatgctttgttctttccatctcaagcatttatccaaattctgctcacagacatgaggaagcaggctgtagatttaagggcactcaaggggaaaacaaatgtagtttccacagtgtgaggataaatgtagaatcgtggtaatattggctgttaaattggcctgctccagagactggctcaaaaaagaaagaagcaacgaaaacaaaatgcacagcctgaatggacgtagcactgtcatgtggcatttggaaaatctttaattatcctaatgttatttcacttgcccttatgctttattttagagtcccagggacaactggatgaaacattacgtctgtagtcatcttatttgagatgggggtgggaacgaattaaaatatgatagagaactatatgcagattttaaaatctagtcagtactagcatctataaagggcttttctgaaatttaaacagcttggtgatgcatcctgatattataagcttaaaactatcttgagggggaaatgacttcttttctccttctgtcccttttctcaaaagcatctttcccccaaatgtatgtctctaggacattttatagttttaagaggaagaaaacagaaacgtggcatcatttgggaagaaccaaggtagaatttaattttctggactttaaatctcctggttaaataatgctaatcactgtaccatttgagttacatgttttaacctcttttttttttctaattattccatccaaaatttctggtgaattacacagaaatttttggaaatgggactttgtgcaggtaaccaccctgcacttcaggtaatgttcctgtcacagctgtcgactaccccacgctgcaggaaatccattcagaaatgagctaacagtctccagtgtagcaggagagccagtcacttccctccccaggccccaaagcaccccaaggctggtattccttgagtcataggtattaataataaaagcctcaatgcagcttctccatgtagttcctctcctacaagccaggtggattctggtcctaactaaagagatgggagttcacctgagggcaagaagtacccaggatgcccaaacagccgcacaggtgtcctgtgcttcctgtgagacttcctgggggaaatatacaaactaatatattttttaatgtttacgtcatttacactgctgcttttctcatattctgcttttaattacttgtagtaaatcatttgtttgggcttcaagcactgtcttccatctgcatcttccagatttatcatgagtgatcttgttctactgttaaagatgtcaagcctaaaaagtaataaagtttttatttggctgttgaaccttgatgtagcccctactacatacactacaagttatgccttctggctactacagaatctccgcagaccttttagttatgagtagaagcaataagaaggtgtccttatggtcttaggaataatagttccaatgtattggcataatttgtttgaatgtctttattttgatattaacaccggcataaatctatttttgctaccagatgatagctattttcatttgctctattttcctctgcattgtactaatctgttactcagtgttagtcttcatttttctgtgttggaaacctgcgtcatgtaaatatctgcaaatcatgacagtctaaagtgcaaaccattttcagagactttggggaatgcagtgatcagaagtggctaatttattttatttctgattattttatccagagggtacttttttaatggatatttgtaaatcttccacttaaccactgaaaattattttgttttaatcccacccttccatccatacctctgcctccccaaaaagctcctattaatttgcttatccccctcatgtagctagttgaatgtgaataaataacatggaaaaaaaggccac

SEQ ID NO: 424342 - DNA, 5714 bp, Homo sapiens
cttggagagcattcaaggaaaaagtccagaaagtgcgctgtcagaccacgtcactaagagtttcatcaagctcttagagatcgctcctgcagggcccactgctgtgcttttctgaaacatccatttattaacagagccccactattttaacatgttccaggccctagcacaaaacacagatcttaaagaacgcttacgcagaatccatgccgagtctctgctcctcgactcccccgctgtcgccaagtcgggtgacaatctggcagaggaaaactccagagatgaaaaccgagctctagttcatcagctttctaatgaaagtagactctccatcactgactccctttctgagttttttgatgctcaggaagttctgttatctccaagctcttcagaaaacgagatttctgatgatgactcatatgtcagtgacataagtgataatctttccttagataatctcagtaatgatttagataatgagagacagaccttggggcctgtccttgatagtggtcgggaagcgaagtcccggagaagaacgtgcctgccggcgccctgcccgagcagcagtaacatcagcctgtggaacatcctgaggaacaacatcgggaaggacctgtccaaggtggccatgccggtggagctgaacgagcccctgaacacgctgcagaggctctgcgaggagctggagtacagcgagctcctggacaaggccgcgcagattcccagccccctggaaaggatggtgaggagtcagccttcccttgccactgtccagcctcggtccccaagccacgaggccattcacggggcccatcagagagacagcccctgttccctccggtttcattttgattgttccgtaaacaggttcattactcagagctgtctggcttcctccgcctggctgtttccagtcaccttgtgaggatttggagacggggttggggtgcttctccgtggcacttggtgcctggggtagttctgttctgtgggtttgtgcttcctctttctccagaagccttctggctgattgttccgatgtgcccggctggaaaacatgtctttagggctgtctgcatgtttatttttacttccctgggtggacagaatttaatttctcgagctgtttttctcatccagggtatatgtggcagcctttgccatatcagcgtatgcatctagctactaccgagctggaagcaagccatttaatccggttcttggagaaacatatgaatgtattcgggaggacaagggcttccagtttttttcagaacaggtcagccaccatccgcctatctctgcgtgtcatgctgagtctagaaattttgttttctggcaagatgtgagatggaaaaacaaattctggggcaaatccatggaaattgttccaattggcacaacccatgtgactctgccagtttttggggatcattttgagtggaacaaagtgacctcttgcatccataacatcttaagcgggcagaggtggattgagcactatggagagattgtcatcaagaacctgcatgatgattcctgctactgcaaagtgaattttataaaggcaaaatactggagcactaatgcccatgagattgaaggcacagtgtttgacaggagtggaaaagcggttcatcggctgtttgggaaatggcatgaaagcatctactgtggcggcggctcctcttctgcctgtgtatggagagcaaatcctatgccgaaaggctacgagcaatactatagcttcacacagtttgcgctggaattaaatgaaatggatccatcatcaaagtctttattgccacctactgacactcgatttaggccagaccagaggtttctagaggaagggaacttagaagaagctgaaatacaaaagcagaggattgaacaactgcagagagaaaggcggcgggtcttagaagaaaatcatgtggagcaccagcctcggtttttcaggaaatccgacgatgactcttgggtgagcaacggcacctatttggaacttagaaaagatcttggtttttccaaactggaccatcctgtcttatggtgaaaaagtaaagaagaaagataacattagtgtatttctcctgtgcttgccttctgaagtggcacaaacctgtgtttatatatttaaaagatactctaggatgatcacttgtgcttagcttagcattgtaactctttaagtctatattttcctcagtgcgtttctttacaatttcaaatgttaccctgattgtttatatgaatgtagaacaccttgacatttctttttatatataaactatttaataaaaatgaaagattgaatgttcatgtgtgggttaaaaaaagaagctttaacactaattttccaaaggttagggaagattccaattaaatttatgccttataaaattatgttgtagaaaaaaaatcaacctctcccaggtgcattaagaaataagaattcccagggttactcacccatgcgtaagctacccaagtttaatttggtagctgaaatatctttttgcctcagacagctcttgaattgctcatacagaacaattctgctggtgctggagtctgaagaatattttcatttgcattttagtggttagggagaggatataagattaatggaatgtatatttttatataagacgtatacggcaccttcttgaaaaggaagcatttgaacttgttcctccctatagttctattgccttatatgcaaaattgtaccctgttgctcagagaaattattcataagagaaaagaattccaattaattaaatatcacaatagcatcccagagagacagtaggaaatttctccttagtgagagctgagtccttgagaagttaagagactgtttcctgcttcccaccccaccccgttttttgtccctccgtttgatcacctccctgttgagtatggaatgtcccagtttaatataaaacatacagtttattccacacagcagtttgactttgtaaaagtttagcaaaataactgattgttttggataactcaacatgtttttcttaaatgctgttttagtattttctacctcttaataagcaccatattttagatcttgtataaaaagttgccatctgccttatagacaaatgtagagaattgatgttcttgctttgtgttgtgttctggtaaagctttaagtgagtgtcttacccctttcctatactttcttgttatccatatcattcttttgtgagttttgcagcagtcttgaataatacagattataactactgaaaggggaaccttcgtctttttaaatgtgttatttcacattacaataatatgtgtagtagttgaattgtgttatcaaagcatgtccaacttctgtccagatgacattaaaaccaaagcctaattgttaagcctcttattctaaagtccatagcaatgctatggaatatcaagtataatgatgtagtaaaaagatttctccagaaaacactttgagatacttaaagaaattcagagcatatcgaatgttatgaatgaagagtaaaataattacaggaaaagaatgcatgatttttcattgtcacaccaaataaccagttggacaatattgcattttcaaaatggagagttatttaaagtggatgtgtagccttctggaatctgcacgtgactggcattttaaaacaactcattaaatattggattcattttatcgagatgccaagatgaacacaatgtgaatatcatttccatttctaagcagttgaatgacacagtcagattctttggtgtatgctttgttctttccatctcaagcatttatccaaattctgctcacagacatgaggaagcaggctgtagatttaagggcactcaaggggaaaacaaatgtagtttccacagtgtgaggataaatgtagaatcgtggtaatattggctgttaaattggcctgctccagagactggctcaaaaaagaaagaagcaacgaaaacaaaatgcacagcctgaatggacgtagcactgtcatgtggcatttggaaaatctttaattatcctaatgttatttcacttgcccttatgctttattttagagtcccagggacaactggatgaaacattacgtctgtagtcatcttatttgagatgggggtgggaacgaattaaaatatgatagagaactatatgcagattttaaaatctagtcagtactagcatctataaagggcttttctgaaatttaaacagcttggtgatgcatcctgatattataagcttaaaactatcttgagggggaaatgacttcttttctccttctgtcccttttctcaaaagcatctttcccccaaatgtatgtctctaggacattttatagttttaagaggaagaaaacagaaacgtggcatcatttgggaagaaccaaggtagaatttaattttctggactttaaatctcctggttaaataatgctaatcactgtaccatttgagttacatgttttaacctcttttttttttctaattattccatccaaaatttctggtgaattacacagaaatttttggaaatgggactttgtgcaggtaaccaccctgcacttcaggtaatgttcctgtcacagctgtcgactaccccacgctgcaggaaatccattcagaaatgagctaacagtctccagtgtagcaggagagccagtcacttccctccccaggccccaaagcaccccaaggctggtattccttgagtcataggtattaataataaaagcctcaatgcagcttctccatgtagttcctctcctacaagccaggtggattctggtcctaactaaagagatgggagttcacctgagggcaagaagtacccaggatgcccaaacagccgcacaggtgtcctgtgcttcctgtgagacttcctgggggaaatatacaaactaatatattttttaatgtttacgtcatttacactgctgcttttctcatattctgcttttaattacttgtagtaaatcatttgtttgggcttcaagcactgtcttccatctgcatcttccagatttatcatgagtgatcttgttctactgttaaagatgtcaagcctaaaaagtaataaagtttttatttggctgttgaaccttgatgtagcccctactacatacactacaagttatgccttctggctactacagaatctccgcagaccttttagttatgagtagaagcaataagaaggtgtccttatggtcttaggaataatagttccaatgtattggcataatttgtttgaatgtctttattttgatattaacaccggcataaatctatttttgctaccagatgatagctattttcatttgctctattttcctctgcattgtactaatctgttactcagtgttagtcttcatttttctgtgttggaaacctgcgtcatgtaaatatctgcaaatcatgacagtctaaagtgcaaaccattttcagagactttggggaatgcagtgatcagaagtggctaatttattttatttctgattattttatccagagggtacttttttaatggatatttgtaaatcttccacttaaccactgaaaattattttgttttaatcccacccttccatccatacctctgcctccccaaaaagctcctattaatttgcttatccccctcatgtagctagttgaatgtgaataaataacatggaaaaaaaggccac

SEQ ID NO: 424343 - DNA, 4614 bp, Homo sapiens
gcatttatgaaaggcactcagctcttcttcagtataagaaactgcacgaaatgtgctgggaagaagaaatcttgagattgttactacctgacattagaaaggaaaattggacatccctgcttaggcttaactgttgttacatacatggaagaaaagacaaagaagctgtcctttgtttccatcaggtcagccaccatccgcctatctctgcgtgtcatgctgagtctagaaattttgttttctggcaagatgtgagatggaaaaacaaattctggggcaaatccatggaaattgttccaattggcacaacccatgtgactctgccagtttttggggatcattttgagtggaacaaagtgacctcttgcatccataacatcttaagcgggcagaggtggattgagcactatggagagattgtcatcaagaacctgcatgatgattcctgctactgcaaagtgaattttataaaggcaaaatactggagcactaatgcccatgagattgaaggcacagtgtttgacaggagtggaaaagcggttcatcggctgtttgggaaatggcatgaaagcatctactgtggcggcggctcctcttctgcctgtgtatggagagcaaatcctatgccgaaaggctacgagcaatactatagcttcacacagtttgcgctggaattaaatgaaatggatccatcatcaaagtctttattgccacctactgacactcgatttaggccagaccagaggtttctagaggaagggaacttagaagaagctgaaatacaaaagcagaggattgaacaactgcagagagaaaggcggcgggtcttagaagaaaatcatgtggagcaccagcctcggtttttcaggaaatccgacgatgactcttgggtgagcaacggcacctatttggaacttagaaaagatcttggtttttccaaactggaccatcctgtcttatggtgaaaaagtaaagaagaaagataacattagtgtatttctcctgtgcttgccttctgaagtggcacaaacctgtgtttatatatttaaaagatactctaggatgatcacttgtgcttagcttagcattgtaactctttaagtctatattttcctcagtgcgtttctttacaatttcaaatgttaccctgattgtttatatgaatgtagaacaccttgacatttctttttatatataaactatttaataaaaatgaaagattgaatgttcatgtgtgggttaaaaaaagaagctttaacactaattttccaaaggttagggaagattccaattaaatttatgccttataaaattatgttgtagaaaaaaaatcaacctctcccaggtgcattaagaaataagaattcccagggttactcacccatgcgtaagctacccaagtttaatttggtagctgaaatatctttttgcctcagacagctcttgaattgctcatacagaacaattctgctggtgctggagtctgaagaatattttcatttgcattttagtggttagggagaggatataagattaatggaatgtatatttttatataagacgtatacggcaccttcttgaaaaggaagcatttgaacttgttcctccctatagttctattgccttatatgcaaaattgtaccctgttgctcagagaaattattcataagagaaaagaattccaattaattaaatatcacaatagcatcccagagagacagtaggaaatttctccttagtgagagctgagtccttgagaagttaagagactgtttcctgcttcccaccccaccccgttttttgtccctccgtttgatcacctccctgttgagtatggaatgtcccagtttaatataaaacatacagtttattccacacagcagtttgactttgtaaaagtttagcaaaataactgattgttttggataactcaacatgtttttcttaaatgctgttttagtattttctacctcttaataagcaccatattttagatcttgtataaaaagttgccatctgccttatagacaaatgtagagaattgatgttcttgctttgtgttgtgttctggtaaagctttaagtgagtgtcttacccctttcctatactttcttgttatccatatcattcttttgtgagttttgcagcagtcttgaataatacagattataactactgaaaggggaaccttcgtctttttaaatgtgttatttcacattacaataatatgtgtagtagttgaattgtgttatcaaagcatgtccaacttctgtccagatgacattaaaaccaaagcctaattgttaagcctcttattctaaagtccatagcaatgctatggaatatcaagtataatgatgtagtaaaaagatttctccagaaaacactttgagatacttaaagaaattcagagcatatcgaatgttatgaatgaagagtaaaataattacaggaaaagaatgcatgatttttcattgtcacaccaaataaccagttggacaatattgcattttcaaaatggagagttatttaaagtggatgtgtagccttctggaatctgcacgtgactggcattttaaaacaactcattaaatattggattcattttatcgagatgccaagatgaacacaatgtgaatatcatttccatttctaagcagttgaatgacacagtcagattctttggtgtatgctttgttctttccatctcaagcatttatccaaattctgctcacagacatgaggaagcaggctgtagatttaagggcactcaaggggaaaacaaatgtagtttccacagtgtgaggataaatgtagaatcgtggtaatattggctgttaaattggcctgctccagagactggctcaaaaaagaaagaagcaacgaaaacaaaatgcacagcctgaatggacgtagcactgtcatgtggcatttggaaaatctttaattatcctaatgttatttcacttgcccttatgctttattttagagtcccagggacaactggatgaaacattacgtctgtagtcatcttatttgagatgggggtgggaacgaattaaaatatgatagagaactatatgcagattttaaaatctagtcagtactagcatctataaagggcttttctgaaatttaaacagcttggtgatgcatcctgatattataagcttaaaactatcttgagggggaaatgacttcttttctccttctgtcccttttctcaaaagcatctttcccccaaatgtatgtctctaggacattttatagttttaagaggaagaaaacagaaacgtggcatcatttgggaagaaccaaggtagaatttaattttctggactttaaatctcctggttaaataatgctaatcactgtaccatttgagttacatgttttaacctcttttttttttctaattattccatccaaaatttctggtgaattacacagaaatttttggaaatgggactttgtgcaggtaaccaccctgcacttcaggtaatgttcctgtcacagctgtcgactaccccacgctgcaggaaatccattcagaaatgagctaacagtctccagtgtagcaggagagccagtcacttccctccccaggccccaaagcaccccaaggctggtattccttgagtcataggtattaataataaaagcctcaatgcagcttctccatgtagttcctctcctacaagccaggtggattctggtcctaactaaagagatgggagttcacctgagggcaagaagtacccaggatgcccaaacagccgcacaggtgtcctgtgcttcctgtgagacttcctgggggaaatatacaaactaatatattttttaatgtttacgtcatttacactgctgcttttctcatattctgcttttaattacttgtagtaaatcatttgtttgggcttcaagcactgtcttccatctgcatcttccagatttatcatgagtgatcttgttctactgttaaagatgtcaagcctaaaaagtaataaagtttttatttggctgttgaaccttgatgtagcccctactacatacactacaagttatgccttctggctactacagaatctccgcagaccttttagttatgagtagaagcaataagaaggtgtccttatggtcttaggaataatagttccaatgtattggcataatttgtttgaatgtctttattttgatattaacaccggcataaatctatttttgctaccagatgatagctattttcatttgctctattttcctctgcattgtactaatctgttactcagtgttagtcttcatttttctgtgttggaaacctgcgtcatgtaaatatctgcaaatcatgacagtctaaagtgcaaaccattttcagagactttggggaatgcagtgatcagaagtggctaatttattttatttctgattattttatccagagggtacttttttaatggatatttgtaaatcttccacttaaccactgaaaattattttgttttaatcccacccttccatccatacctctgcctccccaaaaagctcctattaatttgcttatccccctcatgtagctagttgaatgtgaataaataacatggaaaaaaaggccac

SEQ ID NO: 424344 - DNA, 3511 bp, Homo sapiens
tcgggctaatcgccgggcggcgcgcgccgagaagttctgggcaaagtactcagaactggccgcgtgctggtggcgcccgccagccggcccgggagaggggacttgagcgcttcgcggccggtgcgcagcgcggctccggccccgcagtctgtctgcaagtggccatccccgcccccgactcctgcggccggtgcgggagctgtcagctgcacgttgcgggggtaccggagaagccggggttgccttctcccggttctgtgcgctaaccccggagcccggccccggggaactagggagcgtctccggctgcacagcgctcaggttttagggtttcctttgggccacccaaaatgttttttaaatactttggataagagctaaaccacctgccactggggacttccatactctcggctcccttgtcatctgatggcattttgattgtctcgaggccaagtgacttgctgtccatgatgagtgatgagaagaaccttggtgtgtcccaaaaattggtatcaccttcaaggagcacaagtagctgctcttccaagcaaggaagtcgacaggacagctgggaagtggtggaaggactgaggggggagatgaattacacccaggagccaccagttcagaaaggatttttgctgaaaaagaggaagtggcccttaaaaggctggcataagagattcttctatctggacaaaggaatcttgaaatatgccaagagccaaaccgatatagagagagagaagctgcatggctgcattgatgtcgggctctcagtgatgtctgtaaagaagtcatcaaaatgcatagaccttgacaccgaggagcacatctaccatctgaaggtcaagtcagaagaagtctttgatgagtgggtatcgaaacttcgccaccacagaatgtatcgtcagaatgaaattgccatgtttccacatgaagttaaccactttttctcagggtccaccatcacagactcttcatctggggtgtttgactccatttcaagtaggaagcgtagcagtatatcaaagcagaatttatttcaaactggaagcaatgtatcattttcttgtggtggtgagacacgagttccattatggttacagtcttcagaggacatggaaaaatgctccaaagacctggcgcactgtcatgcctacctggtagaaatgagccagctcctgcaaagcatggacgtcctgcatcggacatactcggcaccagctatcaacgccatccagggtggatcttttgaaagtcccaaaaaggaaaaaagatcgcacaggaggtggcggtccagagctattggcaaagatgctaaaggaacactgcaggtcccgaaacctttttctggcccagtaagactacactcctccaatcctaatttgtcaacactagattttggagaagagaaaaattattctgatggctctgaaacctcatcagagttttctaaaatgcaagaagatctgtgtcatattgcccataaagtttacttcactttaaggtcagcttttaatatcatgtcagcggagagagagaaactgaagcagctgatggagcaggatgcctcctcctccccgtctgctcaggtcattggtctgaagaacgccctgtcatccgccctagcacaaaacacagatcttaaagaacgcttacgcagaatccatgccgagtctctgctcctcgactcccccgctgtcgccaagtcgggtgacaatctggcagaggaaaactccagagatgaaaaccgagctctagttcatcagctttctaatgaaagtagactctccatcactgactccctttctgagttttttgatgctcaggaagttctgttatctccaagctcttcagaaaacgagatttctgatgatgactcatatgtcagtgacataagtgataatctttccttagataatctcagtaatgatttagataatgagagacagaccttggggcctgtccttgatagtggtcgggaagcgaagtcccggagaagaacgtgcctgccggcgccctgcccgagcagcagtaacatcagcctgtggaacatcctgaggaacaacatcgggaaggacctgtccaaggtggccatgccggtggagctgaacgagcccctgaacacgctgcagaggctctgcgaggagctggagtacagcgagctcctggacaaggccgcgcagattcccagccccctggaaaggatggtgaggagtcagccttcccttgccactgtccagcctcggtccccaagccacgaggccattcacggggcccatcagagagacagcccctgttccctccggtttcattttgattgttccgtaaacaggttcattactcagagctgtctggcttcctccgcctggctgtttccagtcaccttgtgaggatttggagacggggttggggtgcttctccgtggcacttggtgcctggggtagttctgttctgtgggtttgtgcttcctctttctccagaagccttctggctgattgttccgatgtgcccggctggaaaacatgtctttagggctgtctgcatgtttatttttacttccctgggtggacagaatttaatttctcgagctgtttttctcatccagggtatatgtggcagcctttgccatatcagcgtatgcatctagctactaccgagctggaagcaagccatttaatccggttcttggagaaacatatgaatgtattcgggaggacaagggcttccagtttttttcagaacaggtcagccaccatccgcctatctctgcgtgtcatgctgagtctagaaattttgttttctggcaagatgtgagatggaaaaacaaattctggggcaaatccatggaaattgttccaattggcacaacccatgtgactctgccagtttttggggatcattttgagtggaacaaagtgacctcttgcatccataacatcttaagcgggcagaggtggattgagcactatggagagattgtcatcaagaacctgcatgatgattcctgctactgcaaagtgaattttataaaggcaaaatactggagcactaatgcccatgagattgaaggcacagtgtttgacaggagtggaaaagcggttcatcggctgtttgggaaatggcatgaaagcatctactgtggcggcggctcctcttctgcctgtgtatggagagcaaatcctatgccgaaaggctacgagcaatactatagcttcacacagtttgcgctggaattaaatgaaatggatccatcatcaaagtctttattgccacctactgacactcgatttaggccagaccagaggtttctagaggaagggaacttagaagaagctgaaatacaaaagcagaggattgaacaactgcagagagaaaggcggcgggtcttagaagaaaatcatgtggagcaccagcctcggtttttcagcaggagccccatcgagccctcagccctgggagccggcgtactaccaaggtgtgtattccagacccgtcctaaaca

SEQ ID NO: 424345 - DNA, 2769 bp, Homo sapiens
tcgggctaatcgccgggcggcgcgcgccgagaagttctgggcaaagtactcagaactggccgcgtgctggtggcgcccgccagccggcccgggagaggggacttgagcgcttcgcggccggtgcgcagcgcggctccggccccgcagtctgtctgcaagtggccatccccgcccccgactcctgcggccggtgcgggagctgtcagctgcacgttgcgggggtaccggagaagccggggttgccttctcccggttctgtgcgctaaccccggagcccggccccggggaactagggagcgtctccggctgcacagcgctcaggttttagggtttcctttgggccacccaaaatgttttttaaatactttggataagagctaaaccacctgccactggggacttccatactctcggctcccttgtcatctgatggcattttgattgtctcgaggccaagtgacttgctgtccatgatgagtgatgagaagaaccttggtgtgtcccaaaaattggtatcaccttcaaggagcacaagtagctgctcttccaagcaaggaagtcgacaggacagctgggaagtggtggaaggactgaggggggagatgaattacacccaggagccaccagttcagaaaggatttttgctgaaaaagaggaagtggcccttaaaaggctggcataagagattcttctatctggacaaaggaatcttgaaatatgccaagagccaaaccgatatagagagagagaagctgcatggctgcattgatgtcgggctctcagtgatgtctgtaaagaagtcatcaaaatgcatagaccttgacaccgaggagcacatctaccatctgaaggtcaagtcagaagaagtctttgatgagtgggtatcgaaacttcgccaccacagaatgtatcgtcagaatgaaattgccatgtttccacatgaagttaaccactttttctcagggtccaccatcacagactcttcatctggggtgtttgactccatttcaagtaggaagcgtagcagtatatcaaagcagaatttatttcaaactggaagcaatgtatcattttcttgtggtggtgagacacgagttccattatggttacagtcttcagaggacatggaaaaatgctccaaagacctggcgcactgtcatgcctacctggtagaaatgagccagctcctgcaaagcatggacgtcctgcatcggacatactcggcaccagctatcaacgccatccagggtggatcttttgaaagtcccaaaaaggaaaaaagatcgcacaggaggtggcggtccagagctattggcaaagatgctaaaggaacactgcaggtcccgaaacctttttctggcccagtaagactacactcctccaatcctaatttgtcaacactagattttggagaagagaaaaattattctgatggctctgaaacctcatcagagttttctaaaatgcaagaagatctgtgtcatattgcccataaagtttacttcactttaaggtcagcttttaatatcatgtcagcggagagagagaaactgaagcagctgatggagcaggatgcctcctcctccccgtctgctcaggtcattggtctgaagaacgccctgtcatccgccctagcacaaaacacagatcttaaagaacgcttacgcagaatccatgccgagtctctgctcctcgactcccccgctgtcgccaagtcgggtgacaatctggcagaggaaaactccagagatgaaaaccgagctctagttcatcagctttctaatgaaagtagactctccatcactgactccctttctgagttttttgatgctcaggaagttctgttatctccaagctcttcagaaaacgagatttctgatgatgactcatatgtcagtgacataagtgataatctttccttagataatctcagtaatgatttagataatgagagacagaccttggggcctgtccttgatagtggtcgggaagcgaagtcccggagaagaacgtgcctgccggcgccctgcccgagcagcagtaacatcagcctgtggaacatcctgaggaacaacatcgggaaggacctgtccaaggtggccatgccggtggagctgaacgagcccctgaacacgctgcagaggctctgcgaggagctggagtacagcgagctcctggacaaggccgcgcagattcccagccccctggaaaggatggtgaggagtcagccttcccttgccactgtccagcctcggtccccaagccacgaggccattcacggggcccatcagagagacagcccctgttccctccggtttcattttgattgttccgtaaacaggttcattactcagagctgtctggcttcctccgcctggctgtttccagtcaccttgtgaggatttggagacggggttggggtgcttctccgtggcacttggtgcctggggtagttctgttctgtgggtttgtgcttcctctttctccagaagccttctggctgattgttccgatgtgcccggctggaaaacatgtctttagggctgtctgcatgtttatttttacttccctgggtggacagaatttaatttctcgagctgtttttctcatccagggtatatgtggcagcctttgccatatcagcgtatgcatctagctactaccgagctggaagcaagccatttaatccggttcttggagaaacatatgaatgtattcgggaggacaagggcttccagtttttttcagaacaggtagatgtacaccatt

SEQ ID NO: 424346 - DNA, 413 bp, Homo sapiens
aaagaaacatccagcagtggtagcgaataagaggatatgattcagagagcactggaatttttccccttttaaatggaacaaagagtgacctggacagttgttttttgccttgtgatttgttgcatgtgtgtgagaagtgatagtgcctgtaagtgaggtgcccatattgggggagaacttttgtgttttgcatgaggctcgcatctcagtgttggagctgacttctgctttgagttgcttatttgcatgggcctgtgaccttgtgtattgtacaactaaatcatttattttctttctcttgagaatgtttttaaatgtatacatttttggttttgttcttcaaataggaaaactccagagatgaaaaccgagctctagttcatcagctttctaatgaaagtagactctccatc

SEQ ID NO: 424347 - DNA, 208 bp, Homo sapiens
gagccaccagttcagaaaggatttttgctgaaaaagaggaagtggcccttaaaaggctggcataaggtaaggttggtcttggcctcccctttatttgcactcacactgccccactcagcacctggttcttaggtactcatatttaatttctagttggaatttgagaccaagaaaagggcacctaaattgaatgccttaattaataata

SEQ ID NO: 424348 - DNA, 508 bp, Homo sapiens
cttcgccaccacagaatgtatcgtcagaatgaaattgccatgtttccacatgaagttaaccactttttctcagggtccaccatcacagactcttcatctggggtgtttgactccatttcaagtaggaaggtaatgagtgttttgccaataatgaatctgagaacggggtggctttgtttcatggagtcctgtcttgggagctgagtccgaagaaggaaaagttttcggggacaagcagggtaggcttgggctggtatttaattagtctgtttgcccactgagtcagaaccaagaccagacaagcatctattagttggggcgggggcggacagtgactgaagaataaggaggaatttagcatctctgaatgaactagctttatcctgactggtttgagtttggtttccttttctggttgtaaactacagtaggtatgcatatagctatgcaggattgcaaaatatttccaaacatttatattattattttgatgttattaatatttgat

SEQ ID NO: 424349 - DNA, 1039 bp, Homo sapiens
ctaggctggagtgcagtggcacgatctcagctcactgcaatctctgccgcccgggttcaagcgattctcctgcctcagcctccccagtagttgggattacaggtgtgtgccacaacgcctggctaatttttgtatttttagtagacacggggtttcagcatcttggccaggctggtcttgaattcctgacctcgtgatccacccatctcggcctcccaaagtgcagaaccagattcttaactgccacagactcttgtattatgtaatttatatacagaacacaaagcacttgatttgcttaactgatgtacttgatgatactataaaacctatattatgagaaagcattgctccttcaaaggaatcaagtgatagcaaacactcggtcctgtttccaggttttcctcactgttcattttgcctttgttcttgcaggcggagaatgaaaggggcgagagtaaagtgtgttgtcaatgcaagtcaatcattaaccaacaataatttacaaaagaactttatatttgctgtaatcattaaatttagttactaatcccaggaaaagggttagtccttcctcctagtttgtagatttgcaaatggagatgaataattgaatcctattttaatcttttatctgcagtaatctgggcttcttattaccggatatatttgcattttacctccaggccatgttagttcttagaagattattttcctcatgaaccctgttttgttttgcttcctttctgcttcaattctaatgtcacattgcatacctggatgtaaacagcagtcagtttctcagatcaaatagagccctgtagcaacttggaagacacagaagacacacggacataaaactgtatttattatccagggaatgtcactacggattaattatgttaatgaggccatcaaaatctatggtaatctttcaggctttgttgtttgataccagatacagcaaatgagataataatgtgtctaattgtgcctagccagtattggtatttaataaaactttgtcattgaatcttta

SEQ ID NO: 424350 - DNA, 2117 bp, Homo sapiens
ttccgggtctcgaggctgctgaaaccgaaaccgctgtgctgtgggcgcagcgccgagattgattcaccttcacctgtgctgcactccagctgacccaagtaggaagccagacgagctgtaaaacatgaacggaagagtggattatttggtcactgaggaagagatcaatcttaccagagggccctcagggctgggcttcaacatcgtcggtgggacagatcagcagtatgtctccaacgacagtggcatctacgtcagccgcatcaaagaaaatggggctgcggccctggatgggcggctccaggagggtgataagatcctttcggtaaatggccaagacctaaagaacctgctgcaccaggatgctgtagacctctttcgtaatgcaggctatgctgtgtctctgagagtgcagcacaggttacaggtgcagaatggacctataggacatcgaggtgaaggggacccaagtggtattcccatatttatggtgctggtgccagtgtttgccctcaccatggtagcagcctgggctttcatgagataccggcaacaactttgaaaaacttgctctctttcaatactcccaatgaagatacatttcactcaccctccacccctgctattctgccatgtctttccctctctctgcatagccagatttgaagtgactgatacccaccccaaaccttgctgttcacagtctccaattcttcatattctaatgggaaagtaaaggtattgtttgaaggaaaactgaagaaaagacttggcttagaacaaatgaggagttatatattttactaggacttttgatagaaattcagctacaacccaaagagagaaagattgagtcttcctgtcaccataggcaataccttttttcttagctggcatgccataaaggccagctatgtgatattagaggaagaaaggatttttctttttaatgatcttccttgggaaattattgtggcctttatttaatttctaactacgtacctgggtgcctatatcgacaaagagtgagaagagcatttttacttttttaaaaaagcaaatacatatatacacatacgtatgcaaatattatagtataatagtgatccctatggagaattaaaggtgagaaagctactttgtggtgtctaggtttctgataaaagggatgatcttaactgaagaatttaaagagatacttaaacagagcaaatgtagtaggaacaagggagtgagccttataagaggacgttcagtctcatttattaaaataataactgagactgggagaggtggctcatgcctgtaaatcccagcactttggtagcctgaagtgggagattgcttgagtccaggagaccagcctgggcaacatagcaaaaccctcatctctatttaaaaaaaaaatagaaaaaaatgtaataactgaagcaactaattaaaaatcttagaagaacaatatttattcttataacagccaactatggtgagttattataaggtaaattgccataatccagcgctgctcacatctaaaaaactttgaggtgtaaaggtaaatcgtaccaatctctgggctgccctagtgacttttttgatacctcagagtcctattgaagaaccaggtggaatgattgtggtaagggctatagtgctggagccaaacaccccagcaagaaaactctaaaaggacaaaagataaggtagtgcctccaaggtggcacctgaaccctctcaggctactttttggtttctactaacaaacctgagggaaggaactgcctccctggcaggatgggcatcaaatcaactctggcttcagatttagttaaaatgaggccgggtgcagcggctcacacctgtcatctcagcactttgggaggccgaggcaggcagatcacaaggtcaggagttcaagaccagcctggccaacatggtgaaaccccatgtctactgaaaatacaaaaattacctggacatggtggcgcgttcctgtaattccagctactcaggaggctgaggcaggagaactgtttgaaccaggacctgggagacggaggttgcagtgagccaagatcacgccactgcactccagcctgggctacagagcaagactc

SEQ ID NO: 424351 - DNA, 1980 bp, Homo sapiens
ttccgggtctcgaggctgctgaaaccgaaaccgctgtgctgtgggcgcagcgccgagattgattcaccttcacctgtgctgcactccagctgacccaagtaggaagccagacgagctgtaaaacatgaacggaagagtggattatttggtcactgaggaagagatcaatcttaccagagggccctcaggtaaatggccaagacctaaagaacctgctgcaccaggatgctgtagacctctttcgtaatgcaggctatgctgtgtctctgagagtgcagcacaggttacaggtgcagaatggacctataggacatcgaggtgaaggggacccaagtggtattcccatatttatggtgctggtgccagtgtttgccctcaccatggtagcagcctgggctttcatgagataccggcaacaactttgaaaaacttgctctctttcaatactcccaatgaagatacatttcactcaccctccacccctgctattctgccatgtctttccctctctctgcatagccagatttgaagtgactgatacccaccccaaaccttgctgttcacagtctccaattcttcatattctaatgggaaagtaaaggtattgtttgaaggaaaactgaagaaaagacttggcttagaacaaatgaggagttatatattttactaggacttttgatagaaattcagctacaacccaaagagagaaagattgagtcttcctgtcaccataggcaataccttttttcttagctggcatgccataaaggccagctatgtgatattagaggaagaaaggatttttctttttaatgatcttccttgggaaattattgtggcctttatttaatttctaactacgtacctgggtgcctatatcgacaaagagtgagaagagcatttttacttttttaaaaaagcaaatacatatatacacatacgtatgcaaatattatagtataatagtgatccctatggagaattaaaggtgagaaagctactttgtggtgtctaggtttctgataaaagggatgatcttaactgaagaatttaaagagatacttaaacagagcaaatgtagtaggaacaagggagtgagccttataagaggacgttcagtctcatttattaaaataataactgagactgggagaggtggctcatgcctgtaaatcccagcactttggtagcctgaagtgggagattgcttgagtccaggagaccagcctgggcaacatagcaaaaccctcatctctatttaaaaaaaaaatagaaaaaaatgtaataactgaagcaactaattaaaaatcttagaagaacaatatttattcttataacagccaactatggtgagttattataaggtaaattgccataatccagcgctgctcacatctaaaaaactttgaggtgtaaaggtaaatcgtaccaatctctgggctgccctagtgacttttttgatacctcagagtcctattgaagaaccaggtggaatgattgtggtaagggctatagtgctggagccaaacaccccagcaagaaaactctaaaaggacaaaagataaggtagtgcctccaaggtggcacctgaaccctctcaggctactttttggtttctactaacaaacctgagggaaggaactgcctccctggcaggatgggcatcaaatcaactctggcttcagatttagttaaaatgaggccgggtgcagcggctcacacctgtcatctcagcactttgggaggccgaggcaggcagatcacaaggtcaggagttcaagaccagcctggccaacatggtgaaaccccatgtctactgaaaatacaaaaattacctggacatggtggcgcgttcctgtaattccagctactcaggaggctgaggcaggagaactgtttgaaccaggacctgggagacggaggttgcagtgagccaagatcacgccactgcactccagcctgggctacagagcaagactc

SEQ ID NO: 424352 - DNA, 2165 bp, Homo sapiens
ttccgggtctcgaggctgctgaaaccgaaaccgctgtgctgtgggcgcagcgccgagattgattcaccttcacctgtgctgcactccagctgacccaagtaggaagccagacgagctgtaaaacatgaacggaagagtggattatttggtcactgaggaagagatcaatcttaccagagggccctcagggctgggcttcaacatcgtcggtgggacagatcagcagtatgtctccaacgacagtggcatctacgtcagccgcatcaaagaaaatggggctgcggccctggatgggcggctccaggagggtgataagatcctttcgaaggagactcagatggaggggcaggattacacactgaatcattggcaggtaaatggccaagacctaaagaacctgctgcaccaggatgctgtagacctctttcgtaatgcaggctatgctgtgtctctgagagtgcagcacaggttacaggtgcagaatggacctataggacatcgaggtgaaggggacccaagtggtattcccatatttatggtgctggtgccagtgtttgccctcaccatggtagcagcctgggctttcatgagataccggcaacaactttgaaaaacttgctctctttcaatactcccaatgaagatacatttcactcaccctccacccctgctattctgccatgtctttccctctctctgcatagccagatttgaagtgactgatacccaccccaaaccttgctgttcacagtctccaattcttcatattctaatgggaaagtaaaggtattgtttgaaggaaaactgaagaaaagacttggcttagaacaaatgaggagttatatattttactaggacttttgatagaaattcagctacaacccaaagagagaaagattgagtcttcctgtcaccataggcaataccttttttcttagctggcatgccataaaggccagctatgtgatattagaggaagaaaggatttttctttttaatgatcttccttgggaaattattgtggcctttatttaatttctaactacgtacctgggtgcctatatcgacaaagagtgagaagagcatttttacttttttaaaaaagcaaatacatatatacacatacgtatgcaaatattatagtataatagtgatccctatggagaattaaaggtgagaaagctactttgtggtgtctaggtttctgataaaagggatgatcttaactgaagaatttaaagagatacttaaacagagcaaatgtagtaggaacaagggagtgagccttataagaggacgttcagtctcatttattaaaataataactgagactgggagaggtggctcatgcctgtaaatcccagcactttggtagcctgaagtgggagattgcttgagtccaggagaccagcctgggcaacatagcaaaaccctcatctctatttaaaaaaaaaatagaaaaaaatgtaataactgaagcaactaattaaaaatcttagaagaacaatatttattcttataacagccaactatggtgagttattataaggtaaattgccataatccagcgctgctcacatctaaaaaactttgaggtgtaaaggtaaatcgtaccaatctctgggctgccctagtgacttttttgatacctcagagtcctattgaagaaccaggtggaatgattgtggtaagggctatagtgctggagccaaacaccccagcaagaaaactctaaaaggacaaaagataaggtagtgcctccaaggtggcacctgaaccctctcaggctactttttggtttctactaacaaacctgagggaaggaactgcctccctggcaggatgggcatcaaatcaactctggcttcagatttagttaaaatgaggccgggtgcagcggctcacacctgtcatctcagcactttgggaggccgaggcaggcagatcacaaggtcaggagttcaagaccagcctggccaacatggtgaaaccccatgtctactgaaaatacaaaaattacctggacatggtggcgcgttcctgtaattccagctactcaggaggctgaggcaggagaactgtttgaaccaggacctgggagacggaggttgcagtgagccaagatcacgccactgcactccagcctgggctacagagcaagactc

SEQ ID NO: 424353 - DNA, 1342 bp, Homo sapiens
ttccgggtctcgaggctgctgaaaccgaaaccgctgtgctgtgggcgcagcgccgagattgattcaccttcacctgtgctgcactccagctgacccaagtaggaagccagacgagctgtaaaacatgaacggaagagtggattatttggtcactgaggaagagatcaatcttaccagagggccctcagggctgggcttcaacatcgtcggtgggacagatcagcagtatgtctccaacgacagtggcatctacgtcagccgcatcaaagaaaatggggctgcggccctggatgggcggctccaggagggtgataagatcctttcggtaaatggccaagacctaaagaacctgctgcaccaggatgctgtagacctctttcgtaatgcaggctatgctgtgtctctgagagtgcagcacaggttacaggtgcagaatggacctataggacatcgaggtgaaggggacccaagtggtattcccatatttatggtgctggtgccagtgtttgccctcaccatggtagcagcctgggctttcatgagataccggcaacaactttgaaaaacttgctctctttcaatactcccaatgaagatacatttcactcaccctccacccctgctattctgccatgtctttccctctctctgcatagccagatttgaagtgactgatacccaccccaaaccttgctgttcacagtctccaattcttcatattctaatgggaaagtaaaggcggagaatgaaaggggcgagagtaaagtgtgttgtcaatgcaagtcaatcattaaccaacaataatttacaaaagaactttatatttgctgtaatcattaaatttagttactaatcccaggaaaagggttagtccttcctcctagtttgtagatttgcaaatggagatgaataattgaatcctattttaatcttttatctgcagtaatctgggcttcttattaccggatatatttgcattttacctccaggccatgttagttcttagaagattattttcctcatgaaccctgttttgttttgcttcctttctgcttcaattctaatgtcacattgcatacctggatgtaaacagcagtcagtttctcagatcaaatagagccctgtagcaacttggaagacacagaagacacacggacataaaactgtatttattatccagggaatgtcactacggattaattatgttaatgaggccatcaaaatctatggtaatctttcaggctttgttgtttgataccagatacagcaaatgagataataatgtgtctaattgtgcctagccagtattggtatttaataaaactttgtcattgaatcttta

SEQ ID NO: 424354 - DNA, 2061 bp, Homo sapiens
ttccgggtctcgaggctgctgaaaccgaaaccgctgtgctgtgggcgcagcgccgagattgattcaccttcacctgtgctgcactccagctgacccaagtaggaagccagacgagctgtaaaacatgaacggaagagtggattatttggtcactgaggaagagatcaatcttaccagagggccctcagggctgggcttcaacatcgtcggtgggacagatcagcagtatgtctccaacgacagtggcatctacgtcagccgcatcaaaggtaaatggccaagacctaaagaacctgctgcaccaggatgctgtagacctctttcgtaatgcaggctatgctgtgtctctgagagtgcagcacaggttacaggtgcagaatggacctataggacatcgaggtgaaggggacccaagtggtattcccatatttatggtgctggtgccagtgtttgccctcaccatggtagcagcctgggctttcatgagataccggcaacaactttgaaaaacttgctctctttcaatactcccaatgaagatacatttcactcaccctccacccctgctattctgccatgtctttccctctctctgcatagccagatttgaagtgactgatacccaccccaaaccttgctgttcacagtctccaattcttcatattctaatgggaaagtaaaggtattgtttgaaggaaaactgaagaaaagacttggcttagaacaaatgaggagttatatattttactaggacttttgatagaaattcagctacaacccaaagagagaaagattgagtcttcctgtcaccataggcaataccttttttcttagctggcatgccataaaggccagctatgtgatattagaggaagaaaggatttttctttttaatgatcttccttgggaaattattgtggcctttatttaatttctaactacgtacctgggtgcctatatcgacaaagagtgagaagagcatttttacttttttaaaaaagcaaatacatatatacacatacgtatgcaaatattatagtataatagtgatccctatggagaattaaaggtgagaaagctactttgtggtgtctaggtttctgataaaagggatgatcttaactgaagaatttaaagagatacttaaacagagcaaatgtagtaggaacaagggagtgagccttataagaggacgttcagtctcatttattaaaataataactgagactgggagaggtggctcatgcctgtaaatcccagcactttggtagcctgaagtgggagattgcttgagtccaggagaccagcctgggcaacatagcaaaaccctcatctctatttaaaaaaaaaatagaaaaaaatgtaataactgaagcaactaattaaaaatcttagaagaacaatatttattcttataacagccaactatggtgagttattataaggtaaattgccataatccagcgctgctcacatctaaaaaactttgaggtgtaaaggtaaatcgtaccaatctctgggctgccctagtgacttttttgatacctcagagtcctattgaagaaccaggtggaatgattgtggtaagggctatagtgctggagccaaacaccccagcaagaaaactctaaaaggacaaaagataaggtagtgcctccaaggtggcacctgaaccctctcaggctactttttggtttctactaacaaacctgagggaaggaactgcctccctggcaggatgggcatcaaatcaactctggcttcagatttagttaaaatgaggccgggtgcagcggctcacacctgtcatctcagcactttgggaggccgaggcaggcagatcacaaggtcaggagttcaagaccagcctggccaacatggtgaaaccccatgtctactgaaaatacaaaaattacctggacatggtggcgcgttcctgtaattccagctactcaggaggctgaggcaggagaactgtttgaaccaggacctgggagacggaggttgcagtgagccaagatcacgccactgcactccagcctgggctacagagcaagactc

SEQ ID NO: 424355 - DNA, 1654 bp, Homo sapiens
ttccgggtctcgaggctgctgaaaccgaaaccgctgtgctgtgggcgcagcgccgagattgattcaccttcacctgtgctgcactccagctgacccaagtaggaagccagacgagctgtaaaacatgaacggaagagtggattatttggtcactgaggaagagatcaatcttaccagagggccctcagggctgggcttcaacatcgtcggtgggacagatcagcagtatgtctccaacgacagtggcatctacgtcagccgcatcaaagaaaatggggctgcggccctggatgggcggctccaggagggtgataagatcctttcggtaaatggccaagacctaaagaacctgctgcaccaggatgctgtagacctctttcgtaatgcaggctatgctgtgtctctgagagtgcagcacaggttacaggtgcagaatggacctataggacatcgaggtgaaggggacccaagtggtattcccatatttatggtgctggtgccagtgtttgccctcaccatggtagcagcctgggctttcatgagataccggcaacaactttgaaaaacttgctctctttcaatactcccaatgaagatacatttcactcaccctccacccctgctattctgccatgtctttccctctctctgcatagccagatttgaagtgactgatacccaccccaaaccttgctgttcacagtctccaattcttcatattctaatgggaaagtaaaggcggagaatgaaaggggcgagagtaaagtgtgttgtcaatgcaagtcaatcattaaccaacaataatttacaaaagaactttatatttgctgtaatcattaaatttagttactaatcccaggaaaagggttagtccttcctcctagtttgtagatttgcaaatggagatgaataattgaatcctattttaatcttttatctgcagtaatctgggcttcttattaccggatatatttgcattttacctccaggccatgttagttcttagaagattattttcctcatgaaccctgttttgttttgcttcctttctgcttcaattctaatgtcacattgcatacctggatgtaaacagcagtcagtttctcagatcaaatagagccctgtagcaacttggaagacacagaagacacacggacataaaactgtatttattatccagggaatgtcactacggattaattatgttaatgaggccatcaaaatctatggtaatctttcaggctttgttgtttgataccagatacagcaaatgagataataatgtgtctaattgtgcctagccagtattggtatttaataaaactttgtcattgaatctttaaaaaaaaaaccacctaacaaacaacacaaaaaaaaagaagggggggagcggtaaaaagattccccgtggggggccagtgttaacctttacccggcttttttgcaaaggcggccccattggggagcgaattaaaagaaagccacgggccggggttaaacacgtggtcgggaacagggtgcttggccttttggagaccccttcttggtgggtgcccatttcgacccacctccggattaggctggaattaaaactacaggttctggtgacaccgcatgcggggaatgtggatattactacatctgactaattagt

SEQ ID NO: 424356 - DNA, 853 bp, Homo sapiens
ttccgggtctcgaggctgctgaaaccgaaaccgctgtgctgtgggcgcagcgccgagattgattcaccttcacctgtgctgcactccagctgacccaagtaggaagccagacgagctgtaaaacatgaacggaagagtggattatttggtcactgaggaagagatcaatcttaccagagggccctcagggctgggcttcaacatcgtcggtgggacagatcagcagtatgtctccaacgacagtggcatctacgtcagccgcatcaaagaaaatggggctgcggccctggatgggcggctccaggagggtgataagatcctttcggtaaatggccaagacctaaagaacctgctgcaccaggatgctgtagacctctttcgtaatgcaggctatgctgtgtctctgagagtgcagcacaggttgctgattgttggaggttcttttggtcttcgtgagttttctcaaatccgatatgatgctgtgaagagtaaaatggatcctgagcttgaaaaaaaactgaaagagaataaaatatctttagagtcggaatatgagaaaatcaaagactccaagtttgatgactggaagaatattcgaggacccaggccttgggaagatcctgacctcctccaaggaagaaatccagaaagccttaagactaagacaacttgactctgctgattcttttttccttttttttttttttaaataaaaatattattaactggacttcctaatatatacttctatcaagtggaaaggaaattccaggcccatggaaacttggatatgggtaatttgatgacaaataatcttcactaaaggtcatgtacaggtttttatacttcccag

SEQ ID NO: 424357 - DNA, 753 bp, Homo sapiens
ttccgggtctcgaggctgctgaaaccgaaaccgctgtgctgtgggcgcagcgccgagattgattcaccttcacctgtgctgcactccagctgacccaagtaggaagccagacgagctgtaaaacatgaacggaagagtggattatttggtcactgaggaagagatcaatcttaccagagggccctcaggtatgtgcggaaagggtcatatctgacagtaggggattagagggtgtaattgcagacacctctgctgctgagccggattcacctggcctcggggcgggcaggccacaacctagaggtttcgtgcaacgcttcggggtgcttagagaaaatatattgaaatccatcattagccagatacgggtctgaggaatccacctcaaaatccagttggatgaacacaaatatatatagtcaagaaggggttctttgtgcaaatcgtgctagaaaagcctttttaaaagcctgcttttttagcctgcttatcgtggataccacatccttctttccgttgcctgttctatccctccccctatgagggaccgtttagtaaaatgggagcataaacggtgtggactctgaatgcatagccgttttcctgcagctaggatccctccctcgctcctttgatttctgggaacttcatttacaatgtcaactagaatgttaaagcaggaagagcccttagaaatcttttattacacaggttcccaaacttggttccgccacaaaattacccagggcttta

SEQ ID NO: 424358 - DNA, 2063 bp, Homo sapiens
ttccgggtctcgaggctgctgaaaccgaaaccgctgtgctgtgggcgcagcgccgagattgattcaccttcacctgtgctgcactccagctgacccaagtaggaagccagacgagctgtaaaacatgaacggaagagtggattatttggtcactgaggaagagatcaatcttaccagagggccctcagggctgggcttcaacatcgtcggtgggacagatcagcagtatgtctccaacgacagtggcatctacgtcagccgcatcaaagaaaatggggctgcggccctggatgggcggctccaggagggtgataagatcctttcggtaaatggccaagacctaaagaacctgctgcaccaggatgctgtagacctctttcgtaatgcaggctatgctgtgtctctgagagtgcagcacaggttacaggtgcagaatggacctataggacatcgaggtgaaggggacccaagtggtattcccatatttatggtgctggtgccagtgtttgccctcaccatggtagcagcctgggctttcatgagataccggcaacaactttgaaaaacttgctctctttcaatactcccaatgaagatacatttcactcaccctccacccctgctattctgccatgtctttccctctctctgcatagccagatttgaagtgactgatacccaccccaaaccttgctgttcacagtctccaattcttcatattctaatgggaaagtaaaggtattgtttgaaggaaaactgaagtagaaattcagctacaacccaaagagagaaagattgagtcttcctgtcaccataggcaataccttttttcttagctggcatgccataaaggccagctatgtgatattagaggaagaaaggatttttctttttaatgatcttccttgggaaattattgtggcctttatttaatttctaactacgtacctgggtgcctatatcgacaaagagtgagaagagcatttttacttttttaaaaaagcaaatacatatatacacatacgtatgcaaatattatagtataatagtgatccctatggagaattaaaggtgagaaagctactttgtggtgtctaggtttctgataaaagggatgatcttaactgaagaatttaaagagatacttaaacagagcaaatgtagtaggaacaagggagtgagccttataagaggacgttcagtctcatttattaaaataataactgagactgggagaggtggctcatgcctgtaaatcccagcactttggtagcctgaagtgggagattgcttgagtccaggagaccagcctgggcaacatagcaaaaccctcatctctatttaaaaaaaaaatagaaaaaaatgtaataactgaagcaactaattaaaaatcttagaagaacaatatttattcttataacagccaactatggtgagttattataaggtaaattgccataatccagcgctgctcacatctaaaaaactttgaggtgtaaaggtaaatcgtaccaatctctgggctgccctagtgacttttttgatacctcagagtcctattgaagaaccaggtggaatgattgtggtaagggctatagtgctggagccaaacaccccagcaagaaaactctaaaaggacaaaagataaggtagtgcctccaaggtggcacctgaaccctctcaggctactttttggtttctactaacaaacctgagggaaggaactgcctccctggcaggatgggcatcaaatcaactctggcttcagatttagttaaaatgaggccgggtgcagcggctcacacctgtcatctcagcactttgggaggccgaggcaggcagatcacaaggtcaggagttcaagaccagcctggccaacatggtgaaaccccatgtctactgaaaatacaaaaattacctggacatggtggcgcgttcctgtaattccagctactcaggaggctgaggcaggagaactgtttgaaccaggacctgggagacggaggttgcagtgagccaagatcacgccactgcactccagcctgggctacagagcaagactc

SEQ ID NO: 424359 - DNA, 1983 bp, Homo sapiens
agaagtcagcctggcagagagactctgaaatgagggattagaggtgttcaaggagcaagagcttcagcctgaagacaagggagcagtccctgaagacgcttctactgagaggtctgccatggcctctcttggcctccaacttgtgggctgacatccaggctgcccaggccatgatggtgacgatcctttcggtaaatggccaagacctaaagaacctgctgcaccaggatgctgtagacctctttcgtaatgcaggctatgctgtgtctctgagagtgcagcacaggttacaggtgcagaatggacctataggacatcgaggtgaaggggacccaagtggtattcccatatttatggtgctggtgccagtgtttgccctcaccatggtagcagcctgggctttcatgagataccggcaacaactttgaaaaacttgctctctttcaatactcccaatgaagatacatttcactcaccctccacccctgctattctgccatgtctttccctctctctgcatagccagatttgaagtgactgatacccaccccaaaccttgctgttcacagtctccaattcttcatattctaatgggaaagtaaaggtattgtttgaaggaaaactgaagaaaagacttggcttagaacaaatgaggagttatatattttactaggacttttgatagaaattcagctacaacccaaagagagaaagattgagtcttcctgtcaccataggcaataccttttttcttagctggcatgccataaaggccagctatgtgatattagaggaagaaaggatttttctttttaatgatcttccttgggaaattattgtggcctttatttaatttctaactacgtacctgggtgcctatatcgacaaagagtgagaagagcatttttacttttttaaaaaagcaaatacatatatacacatacgtatgcaaatattatagtataatagtgatccctatggagaattaaaggtgagaaagctactttgtggtgtctaggtttctgataaaagggatgatcttaactgaagaatttaaagagatacttaaacagagcaaatgtagtaggaacaagggagtgagccttataagaggacgttcagtctcatttattaaaataataactgagactgggagaggtggctcatgcctgtaaatcccagcactttggtagcctgaagtgggagattgcttgagtccaggagaccagcctgggcaacatagcaaaaccctcatctctatttaaaaaaaaaatagaaaaaaatgtaataactgaagcaactaattaaaaatcttagaagaacaatatttattcttataacagccaactatggtgagttattataaggtaaattgccataatccagcgctgctcacatctaaaaaactttgaggtgtaaaggtaaatcgtaccaatctctgggctgccctagtgacttttttgatacctcagagtcctattgaagaaccaggtggaatgattgtggtaagggctatagtgctggagccaaacaccccagcaagaaaactctaaaaggacaaaagataaggtagtgcctccaaggtggcacctgaaccctctcaggctactttttggtttctactaacaaacctgagggaaggaactgcctccctggcaggatgggcatcaaatcaactctggcttcagatttagttaaaatgaggccgggtgcagcggctcacacctgtcatctcagcactttgggaggccgaggcaggcagatcacaaggtcaggagttcaagaccagcctggccaacatggtgaaaccccatgtctactgaaaatacaaaaattacctggacatggtggcgcgttcctgtaattccagctactcaggaggctgaggcaggagaactgtttgaaccaggacctgggagacggaggttgcagtgagccaagatcacgccactgcactccagcctgggctacagagcaagactc

SEQ ID NO: 424360 - DNA, 1025 bp, Homo sapiens
ttccgggtctcgaggctgctgaaaccgaaaccgctgtgctgtgggcgcagcgccgagattgattcaccttcacctgtgctgcactccagctgacccaagtaggaagccagacgagctgtaaaacatgaacggaagagtggattatttggtcactgaggaagagatcaatcttaccagagggccctcagggctgggcttcaacatcgtcggtgggacagatcagcagtatgtctccaacgacagtggcatctacgtcagccgcatcaaagaaaatggggctgcggccctggatgggcggctccaggagggtgataagatcctttcggtaaatggccaagacctaaagaacctgctgcaccaggatgctgtagacctctttcgtaatgcaggctatgctgtgtctctgagagtgcagcacagggcggagaatgaaaggggcgagagtaaagtgtgttgtcaatgcaagtcaatcattaaccaacaataatttacaaaagaactttatatttgctgtaatcattaaatttagttactaatcccaggaaaagggttagtccttcctcctagtttgtagatttgcaaatggagatgaataattgaatcctattttaatcttttatctgcagtaatctgggcttcttattaccggatatatttgcattttacctccaggccatgttagttcttagaagattattttcctcatgaaccctgttttgttttgcttcctttctgcttcaattctaatgtcacattgcatacctggatgtaaacagcagtcagtttctcagatcaaatagagccctgtagcaacttggaagacacagaagacacacggacataaaactgtatttattatccagggaatgtcactacggattaattatgttaatgaggccatcaaaatctatggtaatctttcaggctttgttgtttgataccagatacagcaaatgagataataatgtgtctaattgtgcctagccagtattggtatttaataaaactttgtcattgaatcttta

SEQ ID NO: 424361 - DNA, 525 bp, Homo sapiens
tcccaactcacggctgctttgtccacttcccagacctgcagccccagcacctgcccaccttggcatctcccattaagtcacataatgagggcagagagcaggggcctgtttttgcggacacttgaagtacagcatggaccaggcagagcaaggcgccggatcagatcagttccagaagatatgcagcagctgctctgatttcagtgaaatgtgtgaaaccatgcacaggactttggacaactctcagctgtagcaaatccagtttccccttgggccttccagaagcagggtcctgtctccgcgcaggagcatctcccgtggcaatggctgcacctcggcatccgcattaccagtgcttgcgtggcagtccactaatcgggtgagaaccatattgctttttgcatctcaatgaagcaatagtagcaatttatcaagcacttttttttccagactggtataaaattgtatgtgcttttgtaaaccatttaacaataaaagtaaaatacaaaagggaacagggaacgg

SEQ ID NO: 424362 - DNA, 1077 bp, Homo sapiens
  misc_feature (835)..(835): n is a, c, g, or t
aactccgccccacctgtaccttggaccgctccgccctaggggcggttccagcgcgcttcgctaatcggttctatgctcccattggtctgctttaatgtgaagggcgggtcctagctgattcgctagccccgccttgcgttcctattggctgctcctgctctgcggttccgatcccgcccagcaccgtcccccaccccccgccgcccattggctgcgagaggccggtgcgggccgcactcgcagggcccgtggcggttcaggcgccagagctggccgatcggcgttggccgccgacatgacgcccgaggacccagaggaaacccagccgcttctggggcctcctggcggcaggtctacatctccgaaatcgcctacccagcagtccgggggttgctcggctcctgtgtgcagctaatggtcgtcgtcggcatcctcctggcctacctggcaggctgggtgctggagtggcgctggctggctgtgctgggctgcgtgcccccctccctcatgctgcttctcatgtgcttcatgcccgagaccccgcgcttcctgctgactcagcacaggcgccaggaggccatggccgccctgcggttcctgtggggctccgagcagggctgggaagacccccccatcggggctgagcagcagctgtcgggggtcaacgccgtcatgttctatgcagagaccatctttgaagaggccaagttcaaggacagcagcctggcctcggtcgtcgtgggtgtcatccaggtgctgttcacagctgtggcggctctcatcatggacagagcagggcggaggctgctcctggtcttgtcaggaggtctcaggnccttaaggggagccttcgttggttggcctcccggtttcctggcatcttccaggcgtccttttccacttgtgttctgtgttcctgaaacttaggggacacacttctggacaattcacaggccatttggaggggcgttgcacgccctcactagcggtggacacgcctgtgtctccagtggccagccagagcctgctgccgggccgaatccaccctggcctgttgggggccccctgtgtcccccc

SEQ ID NO: 424363 - DNA, 3509 bp, Homo sapiens
  misc_feature (3501)..(3501): n is a, c, g, or t
aactccgccccacctgtaccttggaccgctccgccctaggggcggttccagcgcgcttcgctaatcggttctatgctcccattggtctgctttaatgtgaagggcgggtcctagctgattcgctagccccgccttgcgttcctattggctgctcctgctctgcggttccgatcccgcccagcaccgtcccccaccccccgccgcccattggctgcgagaggccggtgcgggccgcactcgcagggcccgtggcggttcaggcgccagagctggccgatcggcgttggccgccgacatgacgcccgaggacccagaggaaacccagccgcttctggggcctcctggcggcagcgcgccccgcggccgccgcgtcttcctcgccgccttcgccgctgccctgggcccactcagcttcggcttcgcgctcggctacagctccccggccatccctagcctgcagcgcgccgcgcccccggccccgcgcctggacgacgccgccgcctcctggttcggggctgtcgtgaccctgggtgccgcggcggggggagtgctgggcggctggctggtggaccgcgccgggcgcaagctgagcctcttgctgtgctccgtgcccttcgtggccggctttgccgtcatcaccgcggcccaggacgtgtggatgctgctggggggccgcctcctcaccggcctggcctgcggtgttgcctccctagtggccccggtctacatctccgaaatcgcctacccagcagtccgggggttgctcggctcctgtgtgcagctaatggtcgtcgtcggcatcctcctggcctacctggcaggctgggtgctggagtggcgctggctggctgtgctgggctgcgtgcccccctccctcatgctgcttctcatgtgcttcatgcccgagaccccgcgcttcctgctgactcagcacaggcgccaggaggccatggccgccctgcggttcctgtggggctccgagcagggctgggaagacccccccatcggggctgagcagagctttcacctggccctgctgcggcagcccggcatctacaagcccttcatcatcggcgtctccctgatggccttccagcagctgtcgggggtcaacgccgtcatgttctatgcagagaccatctttgaagaggccaagttcaaggacagcagcctggcctcggtcgtcgtgggtgtcatccaggtgctgttcacagctgtggcggctctcatcatggacagagcagggcggaggctgctcctggtcttgtcaggtgagggttcacccctgtgcagcctccccgccatgcgggggagggccttcgccaaggccaccacactgcaggaggaggacagggagcatttgtgatgacaaacatcatggactaatgcggccatgatttgacagcagcttgtcaccaagcactcactgcaggcctgtccatgccagtggcactcccacaccacgcctttaacctctgtggtgaacccaccagaaggcactctcacagccccagcttatgacgggaaaactgagggccaggaaggtgaagtgactcaagagtttgtgggtccttttggacaagtgactttacctctctgagcctcagtctccccctctgggaagtgggggtaatggcagtgcctccctcagcaccattttgaggagtgggaggtgatccacgtgaggccttcagcaagagctgcggcccacggacatttggtacccagcagctgctgcgaagacgaccgtcggggctgagggttactcgctgctgcttctgtgccggtacctcccatttcctcggcccagagggtctgctccgggaactttttgcagttcgctgaggtccaaggcggggtggctgccacccagtcagggcttctgcggccaaggtgccagaacaccaagctggccgttctctgggagccgggcctgcccctctcagaggcatccaggccatgctgctgcgccctgggccgttccccgggtgccccgcccactgccgccctcccgcctgcaggtgtggtcatggtgttcagcacgagtgccttcggcgcctacttcaagctgacccagggtggccctggcaactcctcgcacgtggccatctcggcgcctgtctctgcacagcctgttgatgccagcgtggggctggcctggctggccgtgggcagcatgtgcctcttcatcgccggctttgcggtgggctgggggcccatcccctggctcctcatgtcagagatcttccctctgcatgtcaagggcgtggcgacaggcatctgcgtcctcaccaactggctcatggcctttctcgtgaccaaggagttcagcagcctcatggaggtcctcaggccctatggagccttctggcttgcctccgctttctgcatcttcagtgtccttttcactttgttctgtgtccctgaaactaaaggaaagactctggaacaaatcacagcccattttgaggggcgatgacagccactcactaggggatggagcaagcctgtgactccaagctgggcccaagcccagagcccctgcctgccccaggggagccagaatccagccccttggagccttggtctgcagggtccctccttcctgtcatgctccctccagcccatgacccggggctaggaggctcactgcctcctgttccagctcctgctgctgctctgaggactcaggaacaccttcgagctttgcagacctgcggtcagccctccatgcgcaagactaaagcagcggaagaggaggtgggcctctaggatctttgtcttctggctggaggtgcttttggaggttgggtgctgggcattcagtcgctcctctcacgcggctgccttatcgggaaggaaatttgtttgccaaataaagactgacacagaaaatcaggtcagtgtctctgggctttgtgcaagctcagtttgaaaagggtttattcccatcactgcccaggacaccctgtggctttacttgctcatggtcagccaagcttacccttcacactgagaagtcatttctggctacttccttgggctcagttccctgggtcatcagccatcaaatcttgttgagtttaaaaaataaacagcaaaaaaaaacaaaacaaaaaaaaacaccttttgttctgttgactttaatggagccagaagtcttttataattttattattaattagctaatatgtgttcattgtagggaaattaaaaaagatttaatatcatttttatagctgttaaccagctgctaggcactgtcctaagcactttacaaatattaactcatttatttggataaacaatgataaaactatttacagccacccctttccagagataacatctctgttgggattttgttctgccaggcacggtggctcacacctttaatcccagtgctttgggaggctgaggcaggaggatctcttgagcccagaaattcgaggctgcaccactgtactccagcctgggagacagaacaagaccccaaccccncccccgca

SEQ ID NO: 424364 - DNA, 2290 bp, Homo sapiens
aactccgccccacctgtaccttggaccgctccgccctaggggcggttccagcgcgcttcgctaatcggttctatgctcccattggtctgctttaatgtgaagggcgggtcctagctgattcgctagccccgccttgcgttcctattggctgctcctgctctgcggttccgatcccgcccagcaccgtcccccaccccccgccgcccattggctgcgagaggccggtgcgggccgcactcgcagggcccgtggcggttcaggcgccagagctggccgatcggcgttggccgccgacatgacgcccgaggacccagaggaaacccagccgcttctggggcctcctggcggcagcgcgccccgcggccgccgcgtcttcctcgccgccttcgccgctgccctgggcccactcagcttcggcttcgcgctcggctacagctccccggccatccctagcctgcagcgcgccgcgcccccggccccgcgcctggacgacgccgccgcctcctggttcggggctgtcgtgaccctgggtgccgcggcggggggagtgctgggcggctggctggtggaccgcgccgggcgcaagctgagcctcttgctgtgctccgtgcccttcgtggccggctttgccgtcatcaccgcggcccaggacgtgtggatgctgctggggggccgcctcctcaccggcctggcctgcggtgttgcctccctagtggccccggtctacatctccgaaatcgcctacccagcagtccgggggttgctcggctcctgtgtgcagctaatggtcgtcgtcggcatcctcctggcctacctggcaggctgggtgctggagtggcgctggctggctgtgctgggctgcgtgcccccctccctcatgctgcttctcatgtgcttcatgcccgagaccccgcgcttcctgctgactcagcacaggcgccaggaggccatggccgccctgcggttcctgtggggctccgagcagggctgggaagacccccccatcggggctgagcagagctttcacctggccctgctgcggcagcccggcatctacaagcccttcatcatcggcgtctccctgatggccttccagcagctgtcgggggtcaacgccgtcatgttctatgcagagaccatctttgaagaggccaagttcaaggacagcagcctggcctcggtcgtcgtgggtgtcatccaggtgctgttcacagctgtggcggctctcatcatggacagagcagggcggaggctgctcctggtcttgtcaggtgtggtcatggtgttcagcacgagtgccttcggcgcctacttcaagctgacccagggtggccctggcaactcctcgcacgtggccatctcggcgcctgtctctgcacagcctgttgatgccagcgtggggctggcctggctggccgtgggcagcatgtgcctcttcatcgccggctttgcggtgggctgggggcccatcccctggctcctcatgtcagagatcttccctctgcatgtcaagggcgtggcgacaggcatctgcgtcctcaccaactggctcatggcctttctcgtgaccaaggagttcagcagcctcatggaggtcctcaggccctatggagccttctggcttgcctccgctttctgcatcttcagtgtccttttcactttgttctgtgtccctgaaactaaaggaaagactctggaacaaatcacagcccattttgaggggcgatgacagccactcactaggggatggagcaagcctgtgactccaagctgggcccaagcccagagcccctgcctgccccaggggagccagaatccagccccttggagccttggtctgcagggtccctccttcctgtcatgctccctccagcccatgacccggggctaggaggctcactgcctcctgttccagctcctgctgctgctctgaggactcaggaacaccttcgagctttgcagacctgcggtcagccctccatgcgcaagactaaagcagcggaagaggaggcacggtggctcacacctttaatcccagtgctttgggaggctgaggcaggaggatctcttgagcccagaaattcgaggctgcacgcacctcggcatccgcattaccagtgcttgcgtggcagtccactaatcgggtgagaaccatattgctttttgcatctcaatgaagcaatagtagcaatttatcaagcacttttttttccagactggtataaaattgtatgtgcttttgtaaaccatttaacaataaaagtaaaatacaaaagggaacagggaacgg

SEQ ID NO: 424365 - DNA, 2389 bp, Homo sapiens
  misc_feature (2381)..(2381): n is a, c, g, or t
aactccgccccacctgtaccttggaccgctccgccctaggggcggttccagcgcgcttcgctaatcggttctatgctcccattggtctgctttaatgtgaagggcgggtcctagctgattcgctagccccgccttgcgttcctattggctgctcctgctctgcggttccgatcccgcccagcaccgtcccccaccccccgccgcccattggctgcgagaggccggtgcgggccgcactcgcagggcccgtggcggttcaggcgccagagctggccgatcggcgttggccgccgacatgacgcccgaggacccagaggaaacccagccgcttctggggcctcctggcggcaggtctacatctccgaaatcgcctacccagcagtccgggggttgctcggctcctgtgtgcagctaatggtcgtcgtcggcatcctcctggcctacctggcaggctgggtgctggagtggcgctggctggctgtgctgggctgcgtgcccccctccctcatgctgcttctcatgtgcttcatgcccgagaccccgcgcttcctgctgactcagcacaggcgccaggaggccatggccgccctgcggttcctgtggggctccgagcagggctgggaagacccccccatcggggctgagcagagctttcacctggccctgctgcggcagcccggcatctacaagcccttcatcatcggcgtctccctgatggccttccagcagctgtcgggggtcaacgccgtcatgttctatgcagagaccatctttgaagaggccaagttcaaggacagcagcctggcctcggtcgtcgtgggtgtcatccaggtgctgttcacagctgtggcggctctcatcatggacagagcagggcggaggctgctcctggtcttgtcaggtgtggtcatggtgttcagcacgagtgccttcggcgcctacttcaagctgacccagggtggccctggcaactcctcgcacgtggccatctcggcgcctgtctctgcacagcctgttgatgccagcgtggggctggcctggctggccgtgggcagcatgtgcctcttcatcgccggctttgcggtgggctgggggcccatcccctggctcctcatgtcagagatcttccctctgcatgtcaagggcgtggcgacaggcatctgcgtcctcaccaactggctcatggcctttctcgtgaccaaggagttcagcagcctcatggaggtcctcaggccctatggagccttctggcttgcctccgctttctgcatcttcagtgtccttttcactttgttctgtgtccctgaaactaaaggaaagactctggaacaaatcacagcccattttgaggggcgatgacagccactcactaggggatggagcaagcctgtgactccaagctgggcccaagcccagagcccctgcctgccccaggggagccagaatccagccccttggagccttggtctgcagggtccctccttcctgtcatgctccctccagcccatgacccggggctaggaggctcactgcctcctgttccagctcctgctgctgctctgaggactcaggaacaccttcgagctttgcagacctgcggtcagccctccatgcgcaagactaaagcagcggaagaggaggtgggcctctaggatctttgtcttctggctggaggtgcttttggaggttgggtgctgggcattcagtcgctcctctcacgcggctgccttatcgggaaggaaatttgtttgccaaataaagactgacacagaaaatcaggtcagtgtctctgggctttgtgcaagctcagtttgaaaagggtttattcccatcactgcccaggacaccctgtggctttacttgctcatggtcagccaagcttacccttcacactgagaagtcatttctggctacttccttgggctcagttccctgggtcatcagccatcaaatcttgttgagtttaaaaaataaacagcaaaaaaaaacaaaacaaaaaaaaacaccttttgttctgttgactttaatggagccagaagtcttttataattttattattaattagctaatatgtgttcattgtagggaaattaaaaaagatttaatatcatttttatagctgttaaccagctgctaggcactgtcctaagcactttacaaatattaactcatttatttggataaacaatgataaaactatttacagccacccctttccagagataacatctctgttgggattttgttctgccaggcacggtggctcacacctttaatcccagtgctttgggaggctgaggcaggaggatctcttgagcccagaaattcgaggctgcaccactgtactccagcctgggagacagaacaagaccccaaccccncccccgca

SEQ ID NO: 424366 - DNA, 2190 bp, Homo sapiens
  misc_feature (2182)..(2182): n is a, c, g, or t
caggcctgggggcgcggctccccctggcgggaccttctgggtgccaggcttgaagtccctgcgttatctcgcggtccctcccgtcgaccctgggaaggatcctactgttctctccattttacactgaggtcatgacatgcagtctcggaaaggtctacatctccgaaatcgcctacccagcagtccgggggttgctcggctcctgtgtgcagctaatggtcgtcgtcggcatcctcctggcctacctggcaggctgggtgctggagtggcgctggctggctgtgctgggctgcgtgcccccctccctcatgctgcttctcatgtgcttcatgcccgagaccccgcgcttcctgctgactcagcacaggcgccaggaggccatggccgccctgcggttcctgtggggctccgagcagggctgggaagacccccccatcggggctgagcagagctttcacctggccctgctgcggcagcccggcatctacaagcccttcatcatcggcgtctccctgatggccttccagcagctgtcgggggtcaacgccgtcatgttctatgcagagaccatctttgaagaggccaagttcaaggacagcagcctggcctcggtcgtcgtgggtgtcatccaggtgctgttcacagctgtggcggctctcatcatggacagagcagggcggaggctgctcctggtcttgtcaggtgtggtcatggtgttcagcacgagtgccttcggcgcctacttcaagctgacccagggtggccctggcaactcctcgcacgtggccatctcggcgcctgtctctgcacagcctgttgatgccagcgtggggctggcctggctggccgtgggcagcatgtgcctcttcatcgccggctttgcggtgggctgggggcccatcccctggctcctcatgtcagagatcttccctctgcatgtcaagggcgtggcgacaggcatctgcgtcctcaccaactggctcatggcctttctcgtgaccaaggagttcagcagcctcatggaggtcctcaggccctatggagccttctggcttgcctccgctttctgcatcttcagtgtccttttcactttgttctgtgtccctgaaactaaaggaaagactctggaacaaatcacagcccattttgaggggcgatgacagccactcactaggggatggagcaagcctgtgactccaagctgggcccaagcccagagcccctgcctgccccaggggagccagaatccagccccttggagccttggtctgcagggtccctccttcctgtcatgctccctccagcccatgacccggggctaggaggctcactgcctcctgttccagctcctgctgctgctctgaggactcaggaacaccttcgagctttgcagacctgcggtcagccctccatgcgcaagactaaagcagcggaagaggaggtgggcctctaggatctttgtcttctggctggaggtgcttttggaggttgggtgctgggcattcagtcgctcctctcacgcggctgccttatcgggaaggaaatttgtttgccaaataaagactgacacagaaaatcaggtcagtgtctctgggctttgtgcaagctcagtttgaaaagggtttattcccatcactgcccaggacaccctgtggctttacttgctcatggtcagccaagcttacccttcacactgagaagtcatttctggctacttccttgggctcagttccctgggtcatcagccatcaaatcttgttgagtttaaaaaataaacagcaaaaaaaaacaaaacaaaaaaaaacaccttttgttctgttgactttaatggagccagaagtcttttataattttattattaattagctaatatgtgttcattgtagggaaattaaaaaagatttaatatcatttttatagctgttaaccagctgctaggcactgtcctaagcactttacaaatattaactcatttatttggataaacaatgataaaactatttacagccacccctttccagagataacatctctgttgggattttgttctgccaggcacggtggctcacacctttaatcccagtgctttgggaggctgaggcaggaggatctcttgagcccagaaattcgaggctgcaccactgtactccagcctgggagacagaacaagaccccaaccccncccccgca

SEQ ID NO: 424367 - DNA, 2192 bp, Homo sapiens
  misc_feature (2184)..(2184): n is a, c, g, or t
aactccgccccacctgtaccttggaccgctccgccctaggggcggttccagcgcgcttcgctaatcggttctatgctcccattggtctgctttaatgtgaagggcgggtcctagctgattcgctagccccgccttgcgttcctattggctgctcctgctctgcggttccgatcccgcccagcaccgtcccccaccccccgccgcccattggctgcgagaggccggtgcgggccgcactcgcagggcccgtggcggttcaggcgccagagctggccgatcggcgttggccgccgacatgacgcccgaggacccagaggaaacccagccgcttctggggcctcctggcggcaggtctacatctccgaaatcgcctacccagcagtccgggggttgctcggctcctgtgtgcagctaatggtcgtcgtcggcatcctcctggcctacctggcagagctttcacctggccctgctgcggcagcccggcatctacaagcccttcatcatcggcgtctccctgatggccttccagcagctgtcgggggtcaacgccgtcatgttctatgcagagaccatctttgaagaggccaagttcaaggacagcagcctggcctcggtcgtcgtgggtgtcatccaggtgctgttcacagctgtggcggctctcatcatggacagagcagggcggaggctgctcctggtcttgtcaggtgtggtcatggtgttcagcacgagtgccttcggcgcctacttcaagctgacccagggtggccctggcaactcctcgcacgtggccatctcggcgcctgtctctgcacagcctgttgatgccagcgtggggctggcctggctggccgtgggcagcatgtgcctcttcatcgccggctttgcggtgggctgggggcccatcccctggctcctcatgtcagagatcttccctctgcatgtcaagggcgtggcgacaggcatctgcgtcctcaccaactggctcatggcctttctcgtgaccaaggagttcagcagcctcatggaggtcctcaggccctatggagccttctggcttgcctccgctttctgcatcttcagtgtccttttcactttgttctgtgtccctgaaactaaaggaaagactctggaacaaatcacagcccattttgaggggcgatgacagccactcactaggggatggagcaagcctgtgactccaagctgggcccaagcccagagcccctgcctgccccaggggagccagaatccagccccttggagccttggtctgcagggtccctccttcctgtcatgctccctccagcccatgacccggggctaggaggctcactgcctcctgttccagctcctgctgctgctctgaggactcaggaacaccttcgagctttgcagacctgcggtcagccctccatgcgcaagactaaagcagcggaagaggaggtgggcctctaggatctttgtcttctggctggaggtgcttttggaggttgggtgctgggcattcagtcgctcctctcacgcggctgccttatcgggaaggaaatttgtttgccaaataaagactgacacagaaaatcaggtcagtgtctctgggctttgtgcaagctcagtttgaaaagggtttattcccatcactgcccaggacaccctgtggctttacttgctcatggtcagccaagcttacccttcacactgagaagtcatttctggctacttccttgggctcagttccctgggtcatcagccatcaaatcttgttgagtttaaaaaataaacagcaaaaaaaaacaaaacaaaaaaaaacaccttttgttctgttgactttaatggagccagaagtcttttataattttattattaattagctaatatgtgttcattgtagggaaattaaaaaagatttaatatcatttttatagctgttaaccagctgctaggcactgtcctaagcactttacaaatattaactcatttatttggataaacaatgataaaactatttacagccacccctttccagagataacatctctgttgggattttgttctgccaggcacggtggctcacacctttaatcccagtgctttgggaggctgaggcaggaggatctcttgagcccagaaattcgaggctgcaccactgtactccagcctgggagacagaacaagaccccaaccccncccccgca

SEQ ID NO: 424368 - DNA, 3313 bp, Homo sapiens
  misc_feature (3305)..(3305): n is a, c, g, or t
aactccgccccacctgtaccttggaccgctccgccctaggggcggttccagcgcgcttcgctaatcggttctatgctcccattggtctgctttaatgtgaagggcgggtcctagctgattcgctagccccgccttgcgttcctattggctgctcctgctctgcggttccgatcccgcccagcaccgtcccccaccccccgccgcccattggctgcgagaggccggtgcgggccgcactcgcagggcccgtggcggttcaggcgccagagctggccgatcggcgttggccgccgacatgacgcccgaggacccagaggaaacccagccgcttctggggcctcctggcggcaggtgagctccggggaacccgggcccggatgcggcctcgccctcccgcccctccgcgtccgctccgctcaccctcggccctgtccccccagcgcgccccgcggccgccgcgtcttcctcgccgccttcgccgctgccctgggcccactcagcttcggcttcgcgctcggctacagctccccggccatccctagcctgcagcgcgccgcgcccccggccccgcgcctggacgacgccgccgcctcctggttcggggtctacatctccgaaatcgcctacccagcagtccgggggttgctcggctcctgtgtgcagctaatggtcgtcgtcggcatcctcctggcctacctggcaggctgggtgctggagtggcgctggctggctgtgctgggctgcgtgcccccctccctcatgctgcttctcatgtgcttcatgcccgagaccccgcgcttcctgctgactcagcacaggcgccaggaggccatggccgccctgcggttcctgtggggctccgagcagggctgggaagacccccccatcggggctgagcagcagctgtcgggggtcaacgccgtcatgttctatgcagagaccatctttgaagaggccaagttcaaggacagcagcctggcctcggtcgtcgtgggtgtcatccaggtgctgttcacagctgtggcggctctcatcatggacagagcagggcggaggctgctcctggtcttgtcaggtgagggttcacccctgtgcagcctccccgccatgcgggggagggccttcgccaaggccaccacactgcaggaggaggacagggagcatttgtgatgacaaacatcatggactaatgcggccatgatttgacagcagcttgtcaccaagcactcactgcaggcctgtccatgccagtggcactcccacaccacgcctttaacctctgtggtgaacccaccagaaggcactctcacagccccagcttatgacgggaaaactgagggccaggaaggtgaagtgactcaagagtttgtgggtccttttggacaagtgactttacctctctgagcctcagtctccccctctgggaagtgggggtaatggcagtgcctccctcagcaccattttgaggagtgggaggtgatccacgtgaggccttcagcaagagctgcggcccacggacatttggtacccagcagctgctgcgaagacgaccgtcggggctgagggttactcgctgctgcttctgtgccggtacctcccatttcctcggcccagagggtctgctccgggaactttttgcagttcgctgaggtccaaggcggggtggctgccacccagtcagggcttctgcggccaaggtgccagaacaccaagctggccgttctctgggagccgggcctgcccctctcagaggcatccaggccatgctgctgcgccctgggccgttccccgggtgccccgcccactgccgccctcccgcctgcaggtgtggtcatggtgttcagcacgagtgccttcggcgcctacttcaagctgacccagggtggccctggcaactcctcgcacgtggccatctcggcgcctgtctctgcacagcctgttgatgccagcgtggggctggcctggctggccgtgggcagcatgtgcctcttcatcgccggctttgcggtgggctgggggcccatcccctggctcctcatgtcagagatcttccctctgcatgtcaagggcgtggcgacaggcatctgcgtcctcaccaactggctcatggcctttctcgtgaccaaggagttcagcagcctcatggaggtcctcaggccctatggagccttctggcttgcctccgctttctgcatcttcagtgtccttttcactttgttctgtgtccctgaaactaaaggaaagactctggaacaaatcacagcccattttgaggggcgatgacagccactcactaggggatggagcaagcctgtgactccaagctgggcccaagcccagagcccctgcctgccccaggggagccagaatccagccccttggagccttggtctgcagggtccctccttcctgtcatgctccctccagcccatgacccggggctaggaggctcactgcctcctgttccagctcctgctgctgctctgaggactcaggaacaccttcgagctttgcagacctgcggtcagccctccatgcgcaagactaaagcagcggaagaggaggtgggcctctaggatctttgtcttctggctggaggtgcttttggaggttgggtgctgggcattcagtcgctcctctcacgcggctgccttatcgggaaggaaatttgtttgccaaataaagactgacacagaaaatcaggtcagtgtctctgggctttgtgcaagctcagtttgaaaagggtttattcccatcactgcccaggacaccctgtggctttacttgctcatggtcagccaagcttacccttcacactgagaagtcatttctggctacttccttgggctcagttccctgggtcatcagccatcaaatcttgttgagtttaaaaaataaacagcaaaaaaaaacaaaacaaaaaaaaacaccttttgttctgttgactttaatggagccagaagtcttttataattttattattaattagctaatatgtgttcattgtagggaaattaaaaaagatttaatatcatttttatagctgttaaccagctgctaggcactgtcctaagcactttacaaatattaactcatttatttggataaacaatgataaaactatttacagccacccctttccagagataacatctctgttgggattttgttctgccaggcacggtggctcacacctttaatcccagtgctttgggaggctgaggcaggaggatctcttgagcccagaaattcgaggctgcaccactgtactccagcctgggagacagaacaagaccccaaccccncccccgca

SEQ ID NO: 424369 - DNA, 2123 bp, Homo sapiens
  misc_feature (2115)..(2115): n is a, c, g, or t
agcgaggaggatgggttcagtggggaggggagggtcagggctgtaggaggtgcttagctagggccaggcccagacctgaggcaggtgctggatgtgttggtggtggcagggatgagggcagcagcttgctctttgcccagattacctctttgtggctcccccccacctatcaggaagtgccctgggcaggtgagggtcatctcacctgacacatggggaggctgggacttgtctgcacacctgaggacacagggggtgctgggatgaggagccaagacgtgggagtcagcgctccccaagccttaggacagtagacccccagaggggggccgcttgcgggaggggagagagaaatcctgatggccagtatccgtcagagcagagctttcacctggccctgctgcggcagcccggcatctacaagcccttcatcatcggcgtctccctgatggccttccagcagctgtcgggggtcaacgccgtcatgttctatgcagagaccatctttgaagaggccaagttcaaggacagcagcctggcctcggtcgtcgtgggtgtcatccaggtgctgttcacagctgtggcggctctcatcatggacagagcagggcggaggctgctcctggtcttgtcaggtgtggtcatggtgttcagcacgagtgccttcggcgcctacttcaagctgacccagggtggccctggcaactcctcgcacgtggccatctcggcgcctgtctctgcacagcctgttgatgccagcgtggggctggcctggctggccgtgggcagcatgtgcctcttcatcgccggctttgcggtgggctgggggcccatcccctggctcctcatgtcagagatcttccctctgcatgtcaagggcgtggcgacaggcatctgcgtcctcaccaactggctcatggcctttctcgtgaccaaggagttcagcagcctcatggaggtcctcaggccctatggagccttctggcttgcctccgctttctgcatcttcagtgtccttttcactttgttctgtgtccctgaaactaaaggaaagactctggaacaaatcacagcccattttgaggggcgatgacagccactcactaggggatggagcaagcctgtgactccaagctgggcccaagcccagagcccctgcctgccccaggggagccagaatccagccccttggagccttggtctgcagggtccctccttcctgtcatgctccctccagcccatgacccggggctaggaggctcactgcctcctgttccagctcctgctgctgctctgaggactcaggaacaccttcgagctttgcagacctgcggtcagccctccatgcgcaagactaaagcagcggaagaggaggtgggcctctaggatctttgtcttctggctggaggtgcttttggaggttgggtgctgggcattcagtcgctcctctcacgcggctgccttatcgggaaggaaatttgtttgccaaataaagactgacacagaaaatcaggtcagtgtctctgggctttgtgcaagctcagtttgaaaagggtttattcccatcactgcccaggacaccctgtggctttacttgctcatggtcagccaagcttacccttcacactgagaagtcatttctggctacttccttgggctcagttccctgggtcatcagccatcaaatcttgttgagtttaaaaaataaacagcaaaaaaaaacaaaacaaaaaaaaacaccttttgttctgttgactttaatggagccagaagtcttttataattttattattaattagctaatatgtgttcattgtagggaaattaaaaaagatttaatatcatttttatagctgttaaccagctgctaggcactgtcctaagcactttacaaatattaactcatttatttggataaacaatgataaaactatttacagccacccctttccagagataacatctctgttgggattttgttctgccaggcacggtggctcacacctttaatcccagtgctttgggaggctgaggcaggaggatctcttgagcccagaaattcgaggctgcaccactgtactccagcctgggagacagaacaagaccccaaccccncccccgca

SEQ ID NO: 424370 - DNA, 2112 bp, Homo sapiens
  misc_feature (2104)..(2104): n is a, c, g, or t
caggcctgggggcgcggctccccctggcgggaccttctgggtgccaggcttgaagtccctgcgttatctcgcggtccctcccgtcgaccctgggaaggatcctactgttctctccattttacactgaggtcatgacatgcagtctcggaaaggtctacatctccgaaatcgcctacccagcagtccgggggttgctcggctcctgtgtgcagctaatggtcgtcgtcggcatcctcctggcctacctggcaggctgggtgctggagtggcgctggctggctgtgctgggctgcgtgcccccctccctcatgctgcttctcatgtgcttcatgcccgagaccccgcgcttcctgctgactcagcacaggcgccaggaggccatggccgccctgcggttcctgtggggctccgagcagggctgggaagacccccccatcggggctgagcagcagctgtcgggggtcaacgccgtcatgttctatgcagagaccatctttgaagaggccaagttcaaggacagcagcctggcctcggtcgtcgtgggtgtcatccaggtgctgttcacagctgtggcggctctcatcatggacagagcagggcggaggctgctcctggtcttgtcaggtgtggtcatggtgttcagcacgagtgccttcggcgcctacttcaagctgacccagggtggccctggcaactcctcgcacgtggccatctcggcgcctgtctctgcacagcctgttgatgccagcgtggggctggcctggctggccgtgggcagcatgtgcctcttcatcgccggctttgcggtgggctgggggcccatcccctggctcctcatgtcagagatcttccctctgcatgtcaagggcgtggcgacaggcatctgcgtcctcaccaactggctcatggcctttctcgtgaccaaggagttcagcagcctcatggaggtcctcaggccctatggagccttctggcttgcctccgctttctgcatcttcagtgtccttttcactttgttctgtgtccctgaaactaaaggaaagactctggaacaaatcacagcccattttgaggggcgatgacagccactcactaggggatggagcaagcctgtgactccaagctgggcccaagcccagagcccctgcctgccccaggggagccagaatccagccccttggagccttggtctgcagggtccctccttcctgtcatgctccctccagcccatgacccggggctaggaggctcactgcctcctgttccagctcctgctgctgctctgaggactcaggaacaccttcgagctttgcagacctgcggtcagccctccatgcgcaagactaaagcagcggaagaggaggtgggcctctaggatctttgtcttctggctggaggtgcttttggaggttgggtgctgggcattcagtcgctcctctcacgcggctgccttatcgggaaggaaatttgtttgccaaataaagactgacacagaaaatcaggtcagtgtctctgggctttgtgcaagctcagtttgaaaagggtttattcccatcactgcccaggacaccctgtggctttacttgctcatggtcagccaagcttacccttcacactgagaagtcatttctggctacttccttgggctcagttccctgggtcatcagccatcaaatcttgttgagtttaaaaaataaacagcaaaaaaaaacaaaacaaaaaaaaacaccttttgttctgttgactttaatggagccagaagtcttttataattttattattaattagctaatatgtgttcattgtagggaaattaaaaaagatttaatatcatttttatagctgttaaccagctgctaggcactgtcctaagcactttacaaatattaactcatttatttggataaacaatgataaaactatttacagccacccctttccagagataacatctctgttgggattttgttctgccaggcacggtggctcacacctttaatcccagtgctttgggaggctgaggcaggaggatctcttgagcccagaaattcgaggctgcaccactgtactccagcctgggagacagaacaagaccccaaccccncccccgca

SEQ ID NO: 424371 - DNA, 381 bp, Homo sapiens
gaccgagggggagtgggacaaaccgctccccaggcctgggggcgcggctccccctggcgggaccttctgggtgccaggcttgaagtccctgcgttatctcgcggtccctcccgtcgaccctgggaaggatcctactgttctctccattttacactgaggtcatgacatgcagtctcggaaaggtgaagtcctttgcccaggcgaggtccacagctagtcagaggggaagcagttgcaggaacccagggttgtcccacttagccgtgcccctcttttgctctgcaaacctgcggatgatccacaggagcccactccctacattttggttttcatccctggcttcgggtcaatgactgcaattagcaggaagttcctgtcctg

SEQ ID NO: 424372 - DNA, 2143 bp, Homo sapiens
aactccgccccacctgtaccttggaccgctccgccctaggggcggttccagcgcgcttcgctaatcggttctatgctcccattggtctgctttaatgtgaagggcgggtcctagctgattcgctagccccgccttgcgttcctattggctgctcctgctctgcggttccgatcccgcccagcaccgtcccccaccccccgccgcccattggctgcgagaggccggtgcgggccgcactcgcagggcccgtggcggttcaggcgccagagctggccgatcggcgttggccgccgacatgacgcccgaggacccagaggaaacccagccgcttctggggcctcctggcggcagcgcgccccgcggccgccgcgtcttcctcgccgccttcgccgctgccctgggcccactcagcttcggcttcgcgctcggctacagctccccggccatccctagcctgcagcgcgccgcgcccccggccccgcgcctggacgacgccgccgcctcctggttcggggctgtcgtgaccctgggtgccgcggcggggggagtgctgggcggctggctggtggaccgcgccgggcgcaagctgagcctcttgctgtgctccgtgcccttcgtggccggctttgccgtcatcaccgcggcccaggacgtgtggatgctgctggggggccgcctcctcaccggcctggcctgcggtgttgcctccctagtggccccggtctacatctccgaaatcgcctacccagcagtccgggggttgctcggctcctgtgtgcagctaatggtcgtcgtcggcatcctcctggcctacctggcaggctgggtgctggagtggcgctggctggctgtgctgggctgcgtgcccccctccctcatgctgcttctcatgtgcttcatgcccgagaccccgcgcttcctgctgactcagcacaggcgccaggaggccatggccgccctgcggttcctgtggggctccgagcagggctgggaagacccccccatcggggctgagcagagctttcacctggccctgctgcggcagcccggcatctacaagcccttcatcatcggcgtctccctgatggccttccagcagctgtcgggggtcaacgccgtcatgttctatgcagagaccatctttgaagaggccaagttcaaggacagcagcctggcctcggtcgtcgtgggtgtcatccaggtgctgttcacagctgtggcggctctcatcatggacagagcagggcggaggctgctcctggtcttgtcaggtgtggtcatggtgttcagcacgagtgccttcggcgcctacttcaagctgacccagggtggccctggcaactcctcgcacgtggccatctcggcgcctgtctctgcacagcctgttgatgccagcgtggggctggcctggctggccgtgggcagcatgtgcctcttcatcgccggctttgcggtgggctgggggcccatcccctggctcctcatgtcagagatcttccctctgcatgtcaagggcgtggcgacaggcatctgcgtcctcaccaactggctcatggcctttctcgtgaccaaggagttcagcagcctcatggaggtcctcaggccctatggagccttctggcttgcctccgctttctgcatcttcagtgtccttttcactttgttctgtgtccctgaaactaaaggaaagactctggaacaaatcacagcccattttgaggggcgatgacagccactcactaggggatggagcaagcctgtgactccaagctgggcccaagcccagagcccctgcctgccccaggggagccagaatccagccccttggagccttggtctgcagggtccctccttcctgtcatgctccctccagcccatgacccggggctaggaggctcactgcctcctgttccagctcctgctgctgctctgaggactcaggaacaccttcgagctttgcagacctgcggtcagccctccatgcgcaagactaaagcagcggaagaggaggtgggcctctaggatctttgtcttctggctggaggtgcttttggaggttgggtgctgggcattcagtcgctcctctcacgcggctgccttatcgggaaggaaatttgtttgccaaataaagactgacacagaa

SEQ ID NO: 424373 - DNA, 2759 bp, Homo sapiens
  misc_feature (2751)..(2751): n is a, c, g, or t
aactccgccccacctgtaccttggaccgctccgccctaggggcggttccagcgcgcttcgctaatcggttctatgctcccattggtctgctttaatgtgaagggcgggtcctagctgattcgctagccccgccttgcgttcctattggctgctcctgctctgcggttccgatcccgcccagcaccgtcccccaccccccgccgcccattggctgcgagaggccggtgcgggccgcactcgcagggcccgtggcggttcaggcgccagagctggccgatcggcgttggccgccgacatgacgcccgaggacccagaggaaacccagccgcttctggggcctcctggcggcagcgcgccccgcggccgccgcgtcttcctcgccgccttcgccgctgccctgggcccactcagcttcggcttcgcgctcggctacagctccccggccatccctagcctgcagcgcgccgcgcccccggccccgcgcctggacgacgccgccgcctcctggttcggggctgtcgtgaccctgggtgccgcggcggggggagtgctgggcggctggctggtggaccgcgccgggcgcaagctgagcctcttgctgtgctccgtgcccttcgtggccggctttgccgtcatcaccgcggcccaggacgtgtggatgctgctggggggccgcctcctcaccggcctggcctgcggtgttgcctccctagtggccccggtctacatctccgaaatcgcctacccagcagtccgggggttgctcggctcctgtgtgcagctaatggtcgtcgtcggcatcctcctggcctacctggcaggctgggtgctggagtggcgctggctggctgtgctgggctgcgtgcccccctccctcatgctgcttctcatgtgcttcatgcccgagaccccgcgcttcctgctgactcagcacaggcgccaggaggccatggccgccctgcggttcctgtggggctccgagcagggctgggaagacccccccatcggggctgagcagagctttcacctggccctgctgcggcagcccggcatctacaagcccttcatcatcggcgtctccctgatggccttccagcagctgtcgggggtcaacgccgtcatgttctatgcagagaccatctttgaagaggccaagttcaaggacagcagcctggcctcggtcgtcgtgggtgtcatccaggtgctgttcacagctgtggcggctctcatcatggacagagcagggcggaggctgctcctggtcttgtcaggtgtggtcatggtgttcagcacgagtgccttcggcgcctacttcaagctgacccagggtggccctggcaactcctcgcacgtggccatctcggcgcctgtctctgcacagcctgttgatgccagcgtggggctggcctggctggccgtgggcagcatgtgcctcttcatcgccggctttgcggtgggctgggggcccatcccctggctcctcatgtcagagatcttccctctgcatgtcaagggcgtggcgacaggcatctgcgtcctcaccaactggctcatggcctttctcgtgaccaaggagttcagcagcctcatggaggtcctcaggccctatggagccttctggcttgcctccgctttctgcatcttcagtgtccttttcactttgttctgtgtccctgaaactaaaggaaagactctggaacaaatcacagcccattttgaggggcgatgacagccactcactaggggatggagcaagcctgtgactccaagctgggcccaagcccagagcccctgcctgccccaggggagccagaatccagccccttggagccttggtctgcagggtccctccttcctgtcatgctccctccagcccatgacccggggctaggaggctcactgcctcctgttccagctcctgctgctgctctgaggactcaggaacaccttcgagctttgcagacctgcggtcagccctccatgcgcaagactaaagcagcggaagaggaggtgggcctctaggatctttgtcttctggctggaggtgcttttggaggttgggtgctgggcattcagtcgctcctctcacgcggctgccttatcgggaaggaaatttgtttgccaaataaagactgacacagaaaatcaggtcagtgtctctgggctttgtgcaagctcagtttgaaaagggtttattcccatcactgcccaggacaccctgtggctttacttgctcatggtcagccaagcttacccttcacactgagaagtcatttctggctacttccttgggctcagttccctgggtcatcagccatcaaatcttgttgagtttaaaaaataaacagcaaaaaaaaacaaaacaaaaaaaaacaccttttgttctgttgactttaatggagccagaagtcttttataattttattattaattagctaatatgtgttcattgtagggaaattaaaaaagatttaatatcatttttatagctgttaaccagctgctaggcactgtcctaagcactttacaaatattaactcatttatttggataaacaatgataaaactatttacagccacccctttccagagataacatctctgttgggattttgttctgccaggcacggtggctcacacctttaatcccagtgctttgggaggctgaggcaggaggatctcttgagcccagaaattcgaggctgcaccactgtactccagcctgggagacagaacaagaccccaaccccncccccgca

SEQ ID NO: 424374 - DNA, 2848 bp, Homo sapiens
  misc_feature (2840)..(2840): n is a, c, g, or t
aactccgccccacctgtaccttggaccgctccgccctaggggcggttccagcgcgcttcgctaatcggttctatgctcccattggtctgctttaatgtgaagggcgggtcctagctgattcgctagccccgccttgcgttcctattggctgctcctgctctgcggttccgatcccgcccagcaccgtcccccaccccccgccgcccattggctgcgagaggccggtgcgggccgcactcgcagggcccgtggcggttcaggcgccagagctggccgatcggcgttggccgccgacatgacgcccgaggacccagaggaaacccagccgcttctggggcctcctggcggcaggtgagctccggggaacccgggcccggatgcggcctcgccctcccgcccctccgcgtccgctccgctcaccctcggccctgtccccccagcgcgccccgcggccgccgcgtcttcctcgccgccttcgccgctgccctgggcccactcagcttcggcttcgcgctcggctacagctccccggccatccctagcctgcagcgcgccgcgcccccggccccgcgcctggacgacgccgccgcctcctggttcggggctgtcgtgaccctgggtgccgcggcggggggagtgctgggcggctggctggtggaccgcgccgggcgcaagctgagcctcttgctgtgctccgtgcccttcgtggccggctttgccgtcatcaccgcggcccaggacgtgtggatgctgctggggggccgcctcctcaccggcctggcctgcggtgttgcctccctagtggccccggtctacatctccgaaatcgcctacccagcagtccgggggttgctcggctcctgtgtgcagctaatggtcgtcgtcggcatcctcctggcctacctggcaggctgggtgctggagtggcgctggctggctgtgctgggctgcgtgcccccctccctcatgctgcttctcatgtgcttcatgcccgagaccccgcgcttcctgctgactcagcacaggcgccaggaggccatggccgccctgcggttcctgtggggctccgagcagggctgggaagacccccccatcggggctgagcagagctttcacctggccctgctgcggcagcccggcatctacaagcccttcatcatcggcgtctccctgatggccttccagcagctgtcgggggtcaacgccgtcatgttctatgcagagaccatctttgaagaggccaagttcaaggacagcagcctggcctcggtcgtcgtgggtgtcatccaggtgctgttcacagctgtggcggctctcatcatggacagagcagggcggaggctgctcctggtcttgtcaggtgtggtcatggtgttcagcacgagtgccttcggcgcctacttcaagctgacccagggtggccctggcaactcctcgcacgtggccatctcggcgcctgtctctgcacagcctgttgatgccagcgtggggctggcctggctggccgtgggcagcatgtgcctcttcatcgccggctttgcggtgggctgggggcccatcccctggctcctcatgtcagagatcttccctctgcatgtcaagggcgtggcgacaggcatctgcgtcctcaccaactggctcatggcctttctcgtgaccaaggagttcagcagcctcatggaggtcctcaggccctatggagccttctggcttgcctccgctttctgcatcttcagtgtccttttcactttgttctgtgtccctgaaactaaaggaaagactctggaacaaatcacagcccattttgaggggcgatgacagccactcactaggggatggagcaagcctgtgactccaagctgggcccaagcccagagcccctgcctgccccaggggagccagaatccagccccttggagccttggtctgcagggtccctccttcctgtcatgctccctccagcccatgacccggggctaggaggctcactgcctcctgttccagctcctgctgctgctctgaggactcaggaacaccttcgagctttgcagacctgcggtcagccctccatgcgcaagactaaagcagcggaagaggaggtgggcctctaggatctttgtcttctggctggaggtgcttttggaggttgggtgctgggcattcagtcgctcctctcacgcggctgccttatcgggaaggaaatttgtttgccaaataaagactgacacagaaaatcaggtcagtgtctctgggctttgtgcaagctcagtttgaaaagggtttattcccatcactgcccaggacaccctgtggctttacttgctcatggtcagccaagcttacccttcacactgagaagtcatttctggctacttccttgggctcagttccctgggtcatcagccatcaaatcttgttgagtttaaaaaataaacagcaaaaaaaaacaaaacaaaaaaaaacaccttttgttctgttgactttaatggagccagaagtcttttataattttattattaattagctaatatgtgttcattgtagggaaattaaaaaagatttaatatcatttttatagctgttaaccagctgctaggcactgtcctaagcactttacaaatattaactcatttatttggataaacaatgataaaactatttacagccacccctttccagagataacatctctgttgggattttgttctgccaggcacggtggctcacacctttaatcccagtgctttgggaggctgaggcaggaggatctcttgagcccagaaattcgaggctgcaccactgtactccagcctgggagacagaacaagaccccaaccccncccccgca

SEQ ID NO: 424375 - DNA, 2552 bp, Homo sapiens
  misc_feature (2544)..(2544): n is a, c, g, or t
aactccgccccacctgtaccttggaccgctccgccctaggggcggttccagcgcgcttcgctaatcggttctatgctcccattggtctgctttaatgtgaagggcgggtcctagctgattcgctagccccgccttgcgttcctattggctgctcctgctctgcggttccgatcccgcccagcaccgtcccccaccccccgccgcccattggctgcgagaggccggtgcgggccgcactcgcagggcccgtggcggttcaggcgccagagctggccgatcggcgttggccgccgacatgacgcccgaggacccagaggaaacccagccgcttctggggcctcctggcggcagcgcgccccgcggccgccgcgtcttcctcgccgccttcgccgctgccctgggcccactcagcttcggcttcgcgctcggctacagctccccggccatccctagcctgcagcgcgccgcgcccccggccccgcgcctggacgacgccgccgcctcctggttcggggtctacatctccgaaatcgcctacccagcagtccgggggttgctcggctcctgtgtgcagctaatggtcgtcgtcggcatcctcctggcctacctggcaggctgggtgctggagtggcgctggctggctgtgctgggctgcgtgcccccctccctcatgctgcttctcatgtgcttcatgcccgagaccccgcgcttcctgctgactcagcacaggcgccaggaggccatggccgccctgcggttcctgtggggctccgagcagggctgggaagacccccccatcggggctgagcagagctttcacctggccctgctgcggcagcccggcatctacaagcccttcatcatcggcgtctccctgatggccttccagcagctgtcgggggtcaacgccgtcatgttctatgcagagaccatctttgaagaggccaagttcaaggacagcagcctggcctcggtcgtcgtgggtgtcatccaggtgctgttcacagctgtggcggctctcatcatggacagagcagggcggaggctgctcctggtcttgtcaggtgtggtcatggtgttcagcacgagtgccttcggcgcctacttcaagctgacccagggtggccctggcaactcctcgcacgtggccatctcggcgcctgtctctgcacagcctgttgatgccagcgtggggctggcctggctggccgtgggcagcatgtgcctcttcatcgccggctttgcggtgggctgggggcccatcccctggctcctcatgtcagagatcttccctctgcatgtcaagggcgtggcgacaggcatctgcgtcctcaccaactggctcatggcctttctcgtgaccaaggagttcagcagcctcatggaggtcctcaggccctatggagccttctggcttgcctccgctttctgcatcttcagtgtccttttcactttgttctgtgtccctgaaactaaaggaaagactctggaacaaatcacagcccattttgaggggcgatgacagccactcactaggggatggagcaagcctgtgactccaagctgggcccaagcccagagcccctgcctgccccaggggagccagaatccagccccttggagccttggtctgcagggtccctccttcctgtcatgctccctccagcccatgacccggggctaggaggctcactgcctcctgttccagctcctgctgctgctctgaggactcaggaacaccttcgagctttgcagacctgcggtcagccctccatgcgcaagactaaagcagcggaagaggaggtgggcctctaggatctttgtcttctggctggaggtgcttttggaggttgggtgctgggcattcagtcgctcctctcacgcggctgccttatcgggaaggaaatttgtttgccaaataaagactgacacagaaaatcaggtcagtgtctctgggctttgtgcaagctcagtttgaaaagggtttattcccatcactgcccaggacaccctgtggctttacttgctcatggtcagccaagcttacccttcacactgagaagtcatttctggctacttccttgggctcagttccctgggtcatcagccatcaaatcttgttgagtttaaaaaataaacagcaaaaaaaaacaaaacaaaaaaaaacaccttttgttctgttgactttaatggagccagaagtcttttataattttattattaattagctaatatgtgttcattgtagggaaattaaaaaagatttaatatcatttttatagctgttaaccagctgctaggcactgtcctaagcactttacaaatattaactcatttatttggataaacaatgataaaactatttacagccacccctttccagagataacatctctgttgggattttgttctgccaggcacggtggctcacacctttaatcccagtgctttgggaggctgaggcaggaggatctcttgagcccagaaattcgaggctgcaccactgtactccagcctgggagacagaacaagaccccaaccccncccccgca

SEQ ID NO: 424376 - DNA, 2651 bp, Homo sapiens
  misc_feature (2643)..(2643): n is a, c, g, or t
aactccgccccacctgtaccttggaccgctccgccctaggggcggttccagcgcgcttcgctaatcggttctatgctcccattggtctgctttaatgtgaagggcgggtcctagctgattcgctagccccgccttgcgttcctattggctgctcctgctctgcggttccgatcccgcccagcaccgtcccccaccccccgccgcccattggctgcgagaggccggtgcgggccgcactcgcagggcccgtggcggttcaggcgccagagctggccgatcggcgttggccgccgacatgacgcccgaggacccagaggaaacccagccgcttctggggcctcctggcggcaggtgagctccggggaacccgggcccggatgcggcctcgccctcccgcccctccgcgtccgctccgctcaccctcggccctgtccccccagcgcgccccgcggccgccgcgtcttcctcgccgccttcgccgctgccctgggcccactcagcttcggcttcgcgctcggctacagctccccggccatccctagcctgcagcgcgccgcgcccccggccccgcgcctggacgacgccgccgcctcctggttcggggctgtcgtgaccctgggtgccgcggcggggggagtgctgggcggctggctggtggaccgcgccgggcgcaagctgagcctcttgctgtgctccgtgcccttcgtggccggctttgccgtcatcaccgcggcccaggacgtgtggatgctgctggggggccgcctcctcaccggcctggcctgcggtgttgcctccctagtggccccggtctacatctccgaaatcgcctacccagcagtccgggggttgctcggctcctgtgtgcagctaatggtcgtcgtcggcatcctcctggcctacctggcagagctttcacctggccctgctgcggcagcccggcatctacaagcccttcatcatcggcgtctccctgatggccttccagcagctgtcgggggtcaacgccgtcatgttctatgcagagaccatctttgaagaggccaagttcaaggacagcagcctggcctcggtcgtcgtgggtgtcatccaggtgctgttcacagctgtggcggctctcatcatggacagagcagggcggaggctgctcctggtcttgtcaggtgtggtcatggtgttcagcacgagtgccttcggcgcctacttcaagctgacccagggtggccctggcaactcctcgcacgtggccatctcggcgcctgtctctgcacagcctgttgatgccagcgtggggctggcctggctggccgtgggcagcatgtgcctcttcatcgccggctttgcggtgggctgggggcccatcccctggctcctcatgtcagagatcttccctctgcatgtcaagggcgtggcgacaggcatctgcgtcctcaccaactggctcatggcctttctcgtgaccaaggagttcagcagcctcatggaggtcctcaggccctatggagccttctggcttgcctccgctttctgcatcttcagtgtccttttcactttgttctgtgtccctgaaactaaaggaaagactctggaacaaatcacagcccattttgaggggcgatgacagccactcactaggggatggagcaagcctgtgactccaagctgggcccaagcccagagcccctgcctgccccaggggagccagaatccagccccttggagccttggtctgcagggtccctccttcctgtcatgctccctccagcccatgacccggggctaggaggctcactgcctcctgttccagctcctgctgctgctctgaggactcaggaacaccttcgagctttgcagacctgcggtcagccctccatgcgcaagactaaagcagcggaagaggaggtgggcctctaggatctttgtcttctggctggaggtgcttttggaggttgggtgctgggcattcagtcgctcctctcacgcggctgccttatcgggaaggaaatttgtttgccaaataaagactgacacagaaaatcaggtcagtgtctctgggctttgtgcaagctcagtttgaaaagggtttattcccatcactgcccaggacaccctgtggctttacttgctcatggtcagccaagcttacccttcacactgagaagtcatttctggctacttccttgggctcagttccctgggtcatcagccatcaaatcttgttgagtttaaaaaataaacagcaaaaaaaaacaaaacaaaaaaaaacaccttttgttctgttgactttaatggagccagaagtcttttataattttattattaattagctaatatgtgttcattgtagggaaattaaaaaagatttaatatcatttttatagctgttaaccagctgctaggcactgtcctaagcactttacaaatattaactcatttatttggataaacaatgataaaactatttacagccacccctttccagagataacatctctgttgggattttgttctgccaggcacggtggctcacacctttaatcccagtgctttgggaggctgaggcaggaggatctcttgagcccagaaattcgaggctgcaccactgtactccagcctgggagacagaacaagaccccaaccccncccccgca

SEQ ID NO: 424377 - DNA, 2132 bp, Homo sapiens
  misc_feature (2124)..(2124): n is a, c, g, or t
cgcagctggtgtgattggcccgtgccatgtgccttcatgaacagttgtgataatggcaatgtcagtagcgaacatgagggcagatgtgcagaggcagcgaggccccatctctgaagctgagtctttgaggctggcaaggcccaggctggctcaccctggctctgacgccagcctcctccacccaccccccgcaggctgggtgctggagtggcgctggctggctgtgctgggctgcgtgcccccctccctcatgctgcttctcatgtgcttcatgcccgagaccccgcgcttcctgctgactcagcacaggcgccaggaggccatggccgccctgcggttcctgtggggctccgagcagggctgggaagacccccccatcggggctgagcagagctttcacctggccctgctgcggcagcccggcatctacaagcccttcatcatcggcgtctccctgatggccttccagcagctgtcgggggtcaacgccgtcatgttctatgcagagaccatctttgaagaggccaagttcaaggacagcagcctggcctcggtcgtcgtgggtgtcatccaggtgctgttcacagctgtggcggctctcatcatggacagagcagggcggaggctgctcctggtcttgtcaggtgtggtcatggtgttcagcacgagtgccttcggcgcctacttcaagctgacccagggtggccctggcaactcctcgcacgtggccatctcggcgcctgtctctgcacagcctgttgatgccagcgtggggctggcctggctggccgtgggcagcatgtgcctcttcatcgccggctttgcggtgggctgggggcccatcccctggctcctcatgtcagagatcttccctctgcatgtcaagggcgtggcgacaggcatctgcgtcctcaccaactggctcatggcctttctcgtgaccaaggagttcagcagcctcatggaggtcctcaggccctatggagccttctggcttgcctccgctttctgcatcttcagtgtccttttcactttgttctgtgtccctgaaactaaaggaaagactctggaacaaatcacagcccattttgaggggcgatgacagccactcactaggggatggagcaagcctgtgactccaagctgggcccaagcccagagcccctgcctgccccaggggagccagaatccagccccttggagccttggtctgcagggtccctccttcctgtcatgctccctccagcccatgacccggggctaggaggctcactgcctcctgttccagctcctgctgctgctctgaggactcaggaacaccttcgagctttgcagacctgcggtcagccctccatgcgcaagactaaagcagcggaagaggaggtgggcctctaggatctttgtcttctggctggaggtgcttttggaggttgggtgctgggcattcagtcgctcctctcacgcggctgccttatcgggaaggaaatttgtttgccaaataaagactgacacagaaaatcaggtcagtgtctctgggctttgtgcaagctcagtttgaaaagggtttattcccatcactgcccaggacaccctgtggctttacttgctcatggtcagccaagcttacccttcacactgagaagtcatttctggctacttccttgggctcagttccctgggtcatcagccatcaaatcttgttgagtttaaaaaataaacagcaaaaaaaaacaaaacaaaaaaaaacaccttttgttctgttgactttaatggagccagaagtcttttataattttattattaattagctaatatgtgttcattgtagggaaattaaaaaagatttaatatcatttttatagctgttaaccagctgctaggcactgtcctaagcactttacaaatattaactcatttatttggataaacaatgataaaactatttacagccacccctttccagagataacatctctgttgggattttgttctgccaggcacggtggctcacacctttaatcccagtgctttgggaggctgaggcaggaggatctcttgagcccagaaattcgaggctgcaccactgtactccagcctgggagacagaacaagaccccaaccccncccccgca

SEQ ID NO: 424378 - DNA, 2435 bp, Homo sapiens
  misc_feature (2427)..(2427): n is a, c, g, or t
aactccgccccacctgtaccttggaccgctccgccctaggggcggttccagcgcgcttcgctaatcggttctatgctcccattggtctgctttaatgtgaagggcgggtcctagctgattcgctagccccgccttgcgttcctattggctgctcctgctctgcggttccgatcccgcccagcaccgtcccccaccccccgccgcccattggctgcgagaggccggtgcgggccgcactcgcagggcccgtggcggttcaggcgccagagctggccgatcggcgttggccgccgacatgacgcccgaggacccagaggaaacccagccgcttctggggcctcctggcggcagcgcgccccgcggccgccgcgtcttcctcgccgccttcgccgctgccctgggcccactcagcttcggcttcgcgctcggctacagctccccggccatccctagcctgcagcgcgccgcgcccccggccccgcgcctggacgacgccgccgcctcctggttcggggctgtcgtgaccctgggtgccgcggcggggggagtgctgggcggctggctggtggaccgcgccgggcgcaagctgagcctcttgctgtgctccgtgcccttcgtggccggctttgccgtcatcaccgcggcccaggacgtgtggatgctgctggggggccgcctcctcaccggcctggcctgcggtgttgcctccctagtggccccggtctacatctccgaaatcgcctacccagcagtccgggggttgctcggctcctgtgtgcagctaatggtcgtcgtcggcatcctcctggcctacctggcaggctgggtgctggagtggcgctggctggctgtgctgggctgcgtgcccccctccctcatgctgcttctcatgtgcttcatgcccgagaccccgcgcttcctgctgactcagcacaggcgccaggaggccatggccgccctgcggttcctgtggggctccgagcagggctgggaagacccccccatcggggctgagcagagctttcacctggccctgctgcggcagcccggcatctacaagcccttcatcatcggcgtctccctgatggccttccagcagctgtcgggggtcaacgccgtcatgttctatgcagagaccatctttgaagaggccaagttcaaggacagcagcctggcctcggtcgtcgtgggtgtcatccaggtgctgttcacagctgtggcggctctcatcatggacagagcagggcggaggctgctcctggtcttgtcaggtgtggtcatggtgttcagcacgagtgccttcggcgcctacttcaagctgacccagggtggccctggcaactcctcgcacgtggccatctcggcgcctgtctctgcacagcctgttgatgccagcgtggggctggcctggctggccgtgggcagcatgtgcctcttcatcgccggctttgcggtgggctgggggcccatcccctggctcctcatgtcagagatcttccctctgcatgtcaagggcgtggcgacaggcatctgcgtcctcaccaactggctcatggcctttctcgtgaccaaggagttcagcagcctcatgctcctgctgctgctctgaggactcaggaacaccttcgagctttgcagacctgcggtcagccctccatgcgcaagactaaagcagcggaagaggaggtgggcctctaggatctttgtcttctggctggaggtgcttttggaggttgggtgctgggcattcagtcgctcctctcacgcggctgccttatcgggaaggaaatttgtttgccaaataaagactgacacagaaaatcaggtcagtgtctctgggctttgtgcaagctcagtttgaaaagggtttattcccatcactgcccaggacaccctgtggctttacttgctcatggtcagccaagcttacccttcacactgagaagtcatttctggctacttccttgggctcagttccctgggtcatcagccatcaaatcttgttgagtttaaaaaataaacagcaaaaaaaaacaaaacaaaaaaaaacaccttttgttctgttgactttaatggagccagaagtcttttataattttattattaattagctaatatgtgttcattgtagggaaattaaaaaagatttaatatcatttttatagctgttaaccagctgctaggcactgtcctaagcactttacaaatattaactcatttatttggataaacaatgataaaactatttacagccacccctttccagagataacatctctgttgggattttgttctgccaggcacggtggctcacacctttaatcccagtgctttgggaggctgaggcaggaggatctcttgagcccagaaattcgaggctgcaccactgtactccagcctgggagacagaacaagaccccaaccccncccccgca

SEQ ID NO: 424379 - DNA, 1819 bp, Homo sapiens
aactccgccccacctgtaccttggaccgctccgccctaggggcggttccagcgcgcttcgctaatcggttctatgctcccattggtctgctttaatgtgaagggcgggtcctagctgattcgctagccccgccttgcgttcctattggctgctcctgctctgcggttccgatcccgcccagcaccgtcccccaccccccgccgcccattggctgcgagaggccggtgcgggccgcactcgcagggcccgtggcggttcaggcgccagagctggccgatcggcgttggccgccgacatgacgcccgaggacccagaggaaacccagccgcttctggggcctcctggcggcagcgcgccccgcggccgccgcgtcttcctcgccgccttcgccgctgccctgggcccactcagcttcggcttcgcgctcggctacagctccccggccatccctagcctgcagcgcgccgcgcccccggccccgcgcctggacgacgccgccgcctcctggttcggggctgtcgtgaccctgggtgccgcggcggggggagtgctgggcggctggctggtggaccgcgccgggcgcaagctgagcctcttgctgtgctccgtgcccttcgtggccggctttgccgtcatcaccgcggcccaggacgtgtggatgctgctggggggccgcctcctcaccggcctggcctgcggtgttgcctccctagtggccccggtctacatctccgaaatcgcctacccagcagtccgggggttgctcggctcctgtgtgcagctaatggtcgtcgtcggcatcctcctggcctacctggcaggctgggtgctggagtggcgctggctggctgtgctgggctgcgtgcccccctccctcatgctgcttctcatgtgcttcatgcccgagaccccgcgcttcctgctgactcagcacaggcgccaggaggccatggccgccctgcggttcctgtggggctccgagcagggctgggaagacccccccatcggggctgagcagagctttcacctggccctgctgcggcagcccggcatctacaagcccttcatcatcggcgtctccctgatggccttccagcagctgtcgggggtcaacgccgtcatgttctatgcagagaccatctttgaagaggccaagttcaaggacagcagcctggcctcggtcgtcgtgggtgtcatccaggtgctgttcacagctgtggcggctctcatcatggacagagcagggcggaggctgctcctggtcttgtcaggtgtggtcatggtgttcagcacgagtgccttcggcgcctacttcaagctgacccagggtggccctggcaactcctcgcacgtggccatctcggcgcctgtctctgcacagcctgttgatgccagcgtggggctggcctggctggccgtgggcagcatgtgcctcttcatcgccggctttgcggtgggctgggggcccatcccctggctcctcatgtcagagatcttccctctgcatgtcaagggcgtggcgacaggcatctgcgtcctcaccaactggctcatggcctttctcgtgaccaaggagttcagcagcctcatgctcctgctgctgctctgaggactcaggaacaccttcgagctttgcagacctgcggtcagccctccatgcgcaagactaaagcagcggaagaggaggtgggcctctaggatctttgtcttctggctggaggtgcttttggaggttgggtgctgggcattcagtcgctcctctcacgcggctgccttatcgggaaggaaatttgtttgccaaataaagactgacacagaa

SEQ ID NO: 424380 - DNA, 495 bp, Homo sapiens
  misc_feature (495)..(495): n is a, c, g, or t
ttttttttttggtatttttagtagagatagctgtgttgaccaggctgcgaactcctgacctcaagtgatccgcctgcttcggcctccgaaagtgctaggattacaggcatgagccactgtgcctggcctggggtttctaattttcttaattcttacaacttcttatgaagacttttactaatatggctttttccaggcttcccaaactgtatttcaggttataataattttattgttctgtttcttgcagagtaccaagttcgatccatagcaagtcatgttcgtcctgacaggcagactctcttatttagtgcaacttttcggaagaagattgaaaagttggccagagacatcctgatcgaccctattcgagtggtgcagggagatattggagaggtaaccctaagcagggctggatgggaccttaatgggtttatttctcatattatggaacacagaattaatttctcactattgagataaaaaaaaaagatn

SEQ ID NO: 424381 - DNA, 3925 bp, Homo sapiens
cggtggcggtggtggcggtggcggcggcggtggtggtggtggcggcggcggcggcgaagggggcggagaggaaggagcgcggcgggaccgggccgggacagcgcgtactttgggctccgggattcgctccgcgcccgcggttgtagcagctgccgctgcagccatagcagcaggacttcctcaagcgcagggactatgtcttaaggcgctttgcagagccaagctcatttctggcacataagaggtcagtcattggcaccatgaactggaataaaggtggtcctggcactaagcgaggatttggctttggaggttttgccatcagtgctgggaaaaaggaggaacccaaactcccacagcagtcccacagtgcctttggggcaaccagctcttcttctggatttggaaagtcagctccaccacagcttccttctttctacaaaattggatctaagcgggccaactttgatgaagaaaatgcctattttgaagatgaggaagaagattctagcaacgttgatttaccttacattcctgctgaaaactcaccaactcgccagcaattccattccaagccagtagattctgacagcgatgatgatcccttggaggcattcatggctgaagtggaggatcaggcagctagagacatgaagaggcttgaagaaaaggacaaggaaagaaaaaacgtaaagggtattcgagatgacattgaagaggaagatgaccaagaagcttattttcgatacatggcagaaaacccaactgctggtgtggttcaggaggaagaggaagacaatctagaatatgatagtgacggaaatccaattgcacctaccaaaaaaatcattgatcctcttccccccattgatcattcagagattgactatccaccatttgaaaaaaacttttacaatgagcatgaagagataaccaacctcactccacagcagttaatagatctccggcataagctcaatcttcgggtctctggtgctgcacctcctagaccaggaagtagctttgctcattttgggtttgacgaacaacttatgcaccagattcggaaatctgaatacacacagcccactccaatacagtgccagggtgtgcctgtggcattaagtggtagagacatgattggtattgccaaaacaggtagtgggaaaactgcagccttcatttggcccatgttgattcatataatggaccagaaggagttggaaccaggtgatggaccaattgcagtgattgtgtgtcctaccagggagctttgccagcagatccatgcagaatgtaagcggtttggaaaagcatataatcttcgatcagtggccgtatatggaggagggagtatgtgggagcaggccaaggcccttcaggagggggcagagattgttgtgtgtaccccaggtcgactgatagatcatgtgaaaaagaaagctaccaatcttcaaagagtctcttaccttgtgtttgatgaagcagatcgaatgtttgacatgggatttgagtaccaagttcgatccatagcaagtcatgttcgtcctgacaggcagactctcttatttagtgcaacttttcggaagaagattgaaaagttggccagagacatcctgatcgaccctattcgagtggtgcagggagatattggagaggcaaatgaagatgtgacacagattgtggagattctccattctggacctagtaaatggaactggcttacccggcgtctggtagaatttacctcttcagggagtgtcctcctctttgttactaaaaaagccaatgctgaagagctagcgaataaccttaaacaggagggtcataatcttgggctgctccatggggatatggatcagagtgagagaaacaaggtcatttcagactttaagaaaaaggacatcccagtcctggtggccacagatgttgcagcccgtggtctggacattccttcaattaagactgtcattaactatgatgtggcacgagacattgatacccacacgcataggattggccgcacaggaagagcgggtgagaaaggtgtggcctataccctactcactcccaaggacagcaattttgctggtgacctggtccggaacttggaaggagccaatcaacacgtttctaaggaactcctagatctggcaatgcagaatgcctggtttcggaaatctcgattcaaaggagggaaaggaaaaaagctgaacattggtggaggaggcctaggctacagggagcggcctggcctgggctctgagaacatggatcgaggaaataacaatgtaatgagcaattatgaggcctacaagccttccacaggagctatgggagatcgactaacggcaatgaaagcagctttccagtcacagtacaagagtcactttgttgcagccagtttaagtaatcagaaggctggaagttctgctgctggggcaagtgggtggactagtgcagggagcttgaattctgttccaactaactcagcacaacagggccataacagtcctgacagccccgtcaccagtgccgccaagggcatcccaggctttggcaatactggcaacatcagtggtgcccctgtgacctacccgtctgccggagcccaaggagtcaacaacacagcttcagggaataacagccgagaagggactgggggcagcaacgggaaaagagagagatatactgagaaccggggcagcagccgtcacagtcacggagagactggcaatcggcatagcgatagtccacgtcacggagatggtggtcgccatggagatggataccgccatccagaaagcagcagccgtcatactgatggccatcggcacggggagaacagacatggaggaagcgcaggccggcatggggagaaccggggtgcaaatgatggtcggaatggggaaagcaggaaagaagcttttaatcgtgagagcaagatggagcccaagatggaacccaaagtggacagcagcaagatggacaaggtggacagcaagacagataagacagctgacggctttgctgtcccagagccgcctaaacgcaagaaaagtcgatgggacagttagaggggatgtgctaaagcgtgaaatcagttgtccttaatttttagaaagattttggtaactaggtgtctcagggctgggttggggtccaaagtgtaaggaccccctgcccttagtggagagctggagcttggagacattaccccttcatcagaaggaattttcggatgttttcttgggaagctgttttggtccttggaagcagtgagagctgggaagcttcttttggctctaggtgagttgtcatgcgggtaagttgaggttatcttgggataaagggtcttctagggcacaaaactcactctaggtttatattgtatgtagcttatattttttactaaggtgtcaccttataagcatctataaattgagttctttttcttagttgtatggccaggcagtccccattttaggagttggcttctgcaaattcaatccattgagctaactgttggggagcaatttggtagttgtagacatttgcagggaagggagatgtctgattctaaatgggagttgatgctcaggtccccagccaggtttgcatccagccctgagacatgtaggaaacacctttcagacccaggctctgaagattcccagaagccacaaggattgaagggaaaaggtgatcctggtaactgttccaggattgctccaggtttgagatggtattgctaaatttaaaattaaacaagagacccaacaacagcttttaaagtgtcttctatttcattgtattttttttaacttgccccaatgatagaaaagtcttttgctgaaatgattttgatgatttttgtttatcgtttataaaaaggaaaagaaatatacaaactttgacttttgtg

SEQ ID NO: 424382 - DNA, 3854 bp, Homo sapiens
cggtggcggtggtggcggtggcggcggcggtggtggtggtggcggcggcggcggcgaagggggcggagaggaaggagcgcggcgggaccgggccgggacagcgcgtactttgggctccgggattcgctccgcgcccgcggttgtagcagctgccgctgcagccatagcagcaggtcagtcattggcaccatgaactggaataaaggtggtcctggcactaagcgaggatttggctttggaggttttgccatcagtgctgggaaaaaggaggaacccaaactcccacagcagtcccacagtgcctttggggcaaccagctcttcttctggatttggaaagtcagctccaccacagcttccttctttctacaaaattggatctaagcgggccaactttgatgaagaaaatgcctattttgaagatgaggaagaagattctagcaacgttgatttaccttacattcctgctgaaaactcaccaactcgccagcaattccattccaagccagtagattctgacagcgatgatgatcccttggaggcattcatggctgaagtggaggatcaggcagctagagacatgaagaggcttgaagaaaaggacaaggaaagaaaaaacgtaaagggtattcgagatgacattgaagaggaagatgaccaagaagcttattttcgatacatggcagaaaacccaactgctggtgtggttcaggaggaagaggaagacaatctagaatatgatagtgacggaaatccaattgcacctaccaaaaaaatcattgatcctcttccccccattgatcattcagagattgactatccaccatttgaaaaaaacttttacaatgagcatgaagagataaccaacctcactccacagcagttaatagatctccggcataagctcaatcttcgggtctctggtgctgcacctcctagaccaggaagtagctttgctcattttgggtttgacgaacaacttatgcaccagattcggaaatctgaatacacacagcccactccaatacagtgccagggtgtgcctgtggcattaagtggtagagacatgattggtattgccaaaacaggtagtgggaaaactgcagccttcatttggcccatgttgattcatataatggaccagaaggagttggaaccaggtgatggaccaattgcagtgattgtgtgtcctaccagggagctttgccagcagatccatgcagaatgtaagcggtttggaaaagcatataatcttcgatcagtggccgtatatggaggagggagtatgtgggagcaggccaaggcccttcaggagggggcagagattgttgtgtgtaccccaggtcgactgatagatcatgtgaaaaagaaagctaccaatcttcaaagagtctcttaccttgtgtttgatgaagcagatcgaatgtttgacatgggatttgagtaccaagttcgatccatagcaagtcatgttcgtcctgacaggcagactctcttatttagtgcaacttttcggaagaagattgaaaagttggccagagacatcctgatcgaccctattcgagtggtgcagggagatattggagaggcaaatgaagatgtgacacagattgtggagattctccattctggacctagtaaatggaactggcttacccggcgtctggtagaatttacctcttcagggagtgtcctcctctttgttactaaaaaagccaatgctgaagagctagcgaataaccttaaacaggagggtcataatcttgggctgctccatggggatatggatcagagtgagagaaacaaggtcatttcagactttaagaaaaaggacatcccagtcctggtggccacagatgttgcagcccgtggtctggacattccttcaattaagactgtcattaactatgatgtggcacgagacattgatacccacacgcataggattggccgcacaggaagagcgggtgagaaaggtgtggcctataccctactcactcccaaggacagcaattttgctggtgacctggtccggaacttggaaggagccaatcaacacgtttctaaggaactcctagatctggcaatgcagaatgcctggtttcggaaatctcgattcaaaggagggaaaggaaaaaagctgaacattggtggaggaggcctaggctacagggagcggcctggcctgggctctgagaacatggatcgaggaaataacaatgtaatgagcaattatgaggcctacaagccttccacaggagctatgggagatcgactaacggcaatgaaagcagctttccagtcacagtacaagagtcactttgttgcagccagtttaagtaatcagaaggctggaagttctgctgctggggcaagtgggtggactagtgcagggagcttgaattctgttccaactaactcagcacaacagggccataacagtcctgacagccccgtcaccagtgccgccaagggcatcccaggctttggcaatactggcaacatcagtggtgcccctgtgacctacccgtctgccggagcccaaggagtcaacaacacagcttcagggaataacagccgagaagggactgggggcagcaacgggaaaagagagagatatactgagaaccggggcagcagccgtcacagtcacggagagactggcaatcggcatagcgatagtccacgtcacggagatggtggtcgccatggagatggataccgccatccagaaagcagcagccgtcatactgatggccatcggcacggggagaacagacatggaggaagcgcaggccggcatggggagaaccggggtgcaaatgatggtcggaatggggaaagcaggaaagaagcttttaatcgtgagagcaagatggagcccaagatggaacccaaagtggacagcagcaagatggacaaggtggacagcaagacagataagacagctgacggctttgctgtcccagagccgcctaaacgcaagaaaagtcgatgggacagttagaggggatgtgctaaagcgtgaaatcagttgtccttaatttttagaaagattttggtaactaggtgtctcagggctgggttggggtccaaagtgtaaggaccccctgcccttagtggagagctggagcttggagacattaccccttcatcagaaggaattttcggatgttttcttgggaagctgttttggtccttggaagcagtgagagctgggaagcttcttttggctctaggtgagttgtcatgcgggtaagttgaggttatcttgggataaagggtcttctagggcacaaaactcactctaggtttatattgtatgtagcttatattttttactaaggtgtcaccttataagcatctataaattgagttctttttcttagttgtatggccaggcagtccccattttaggagttggcttctgcaaattcaatccattgagctaactgttggggagcaatttggtagttgtagacatttgcagggaagggagatgtctgattctaaatgggagttgatgctcaggtccccagccaggtttgcatccagccctgagacatgtaggaaacacctttcagacccaggctctgaagattcccagaagccacaaggattgaagggaaaaggtgatcctggtaactgttccaggattgctccaggtttgagatggtattgctaaatttaaaattaaacaagagacccaacaacagcttttaaagtgtcttctatttcattgtattttttttaacttgccccaatgatagaaaagtcttttgctgaaatgattttgatgatttttgtttatcgtttataaaaaggaaaagaaatatacaaactttgacttttgtg

SEQ ID NO: 424383 - DNA, 3996 bp, Homo sapiens
cggtggcggtggtggcggtggcggcggcggtggtggtggtggcggcggcggcggcgaagggggcggagaggaaggagcgcggcgggaccgggccgggacagcgcgtactttgggctccgggattcgctccgcgcccgcggttgtagcagctgccgctgcagccatagcagcaggacttcctcaagcgcagggactatgtcttaaggcgctttgcagagccaagctcatttctggcacataagaggtcagtcattggcaccatgaactggaataaaggtggtcctggcactaagcgaggatttggctttggaggttttgccatcagtgctgggaaaaaggaggaacccaaactcccacagcagtcccacagtgcctttggggcaaccagctcttcttctggatttggaaagtcagctccaccacagcttccttctttctacaaaattggatctaagcgggccaactttgatgaagaaaatgcctattttgaagatgaggaagaagattctagcaacgttgatttaccttacattcctgctgaaaactcaccaactcgccagcaattccattccaagccagtagattctgacagcgatgatgatcccttggaggcattcatggctgaagtggaggatcaggcagctagagacatgaagaggcttgaagaaaaggacaaggaaagaaaaaacgtaaagggtattcgagatgacattgaagaggaagatgaccaagaagcttattttcgatacatggcagaaaacccaactgctggtgtggttcaggaggaagaggaagacaatctagaatatgatagtgacggaaatccaattgcacctaccaaaaaaatcattgatcctcttccccccattgatcattcagagattgactatccaccatttgaaaaaaacttttacaatgagcatgaagagataaccaacctcactccacagcagttaatagatctccggcataagctcaatcttcgggtctctggtgctgcacctcctagaccaggaagtagctttgctcattttgggtttgacgaacaacttatgcaccagattcggaaatctgaatacacacagcccactccaatacagtgccagggtgtgcctgtggcattaagtggtagagacatgattggtattgccaaaacaggtagtgggaaaactgcagccttcatttggcccatgttgattcatataatggaccagaaggagttggaaccaggtgatggaccaattgcagtgattgtgtgtcctaccagggagctttgccagcagatccatgcagaatgtaagcggtttggaaaagcatataatcttcgatcagtggccgtatatggaggagggagtatgtgggagcaggccaaggcccttcaggagggggcagagattgttgtgtgtaccccaggtcgactgatagatcatgtgaaaaagaaagctaccaatcttcaaagagtctcttaccttgtgtttgatgaagcagatcgaatgtttgacatgggatttgagtaccaagttcgatccatagcaagtcatgttcgtcctgacaggcagactctcttatttagtgcaacttttcggaagaagattgaaaagttggccagagacatcctgatcgaccctattcgagtggtgcagggagatattggagaggcaaatgaagatgtgacacagattgtggagattctccattctggacctagtaaatggaactggcttacccggcgtctggtagaatttacctcttcagggagtgtcctcctctttgttactaaaaaagccaatgctgaagagctagcgaataaccttaaacaggagggtcataatcttgggctgctccatggggatatggatcagagtgagagaaacaaggtcatttcagactttaagaaaaaggacatcccagtcctggtggccacagatgttgcagcccgtggtctggacattccttcaattaagactgtcattaactatgatgtggcacgagacattgatacccacacgcataggattggccgcacaggaagagcgggtgagaaaggtgtggcctataccctactcactcccaaggacagcaattttgctggtgacctggtccggaacttggaaggagccaatcaacacgtttctaaggaactcctagatctggcaatgcagaatgcctggtttcggaaatctcgattcaaaggagggaaaggaaaaaagctgaacattggtggaggaggcctaggctacagggagcggcctggcctgggctctgagaacatggatcgaggaaataacaatgtaatgagcaattatgaggcctacaagccttccacaggagctatgggagatcgactaacggcaatgaaagcagctttccagtcacagtacaagagtcactttgttgcagccagtttaagtaatcagaaggctggaagttctgctgctggggcaagtgggtggactagtgcagggagcttgaattctgttccaactaactcagcacaacagggccataacagtcctgacagccccgtcaccagtgccgccaagggcatcccaggctttggcaatactggcaacatcagtggtgcccctgtgacctacccgtctgccggagcccaaggagtcaacaacacagcttcagggaataacagccgagaagggactgggggcagcaacgggaaaagagagagatatactgagaaccggggcagcagccgtcacagtcacggagagactggcaatcggcatagcgatagtccacgtcacggagatggtggtcgccatggagatggataccgccatccagaaagcagcagccgtcatactgatggccatcggcacggggagaacagacatggaggaagcgcaggccggcatggggagaaccggggtgcaaatgatggtcggaatggggaaagcaggaaagaagcttttaatcgtgagagcaagatggagcccaagatggaacccaaagtggacagcagcaagatggacaaggtggacagcaagacagataagacagctgacggctttgctgtcccagagccgcctaaacgcaagaaaagtcgatgggacagttagaggggatgtgctaaagcgtgaaatcagttgtccttaatttttagaaagattttggtaactaggtgtctcagggctgggttggggtccaaagtgtaaggaccccctgcccttagtggagagctggagcttggagacattaccccttcatcagaaggaattttcggatgttttcttgggaagctgttttggtccttggaagcagtgagagctgggaagcttcttttggctctaggtgagttgtcatgcgggtaagttgaggttatcttgggataaagggtcttctagggcacaaaactcactctaggtttatattgtatgtagcttatattttttactaaggtgtcaccttataagcatctataaattgagttctttttcttagttgtatggccaggcagtccccattttaggagttggcttctgcaaattcaatccattgagctaactgttggggagcaatttggtagttgtagacatttgcagggaagggagatgtctgattctaaatgggagttgatgctcaggtccccagccaggtttgcatccagccctgagacatgtaggaaacacctttcagacccaggctctgaagattcccagaagccacaaggattgaagggaaaaggtgatcctggtaactgttccaggattgctccaggtttgagatggtattgctaaatttaaaattaaacaagagacccaacaacagcttttaaagtgtcttctatttcattgtattttttttaacttgccccaatgatagaaaagtcttttgctgaaatgattttgatgatttttgtttatcgtttataaaaaggaaaagaaatatacaaactttgacttttgtgactttgtgaaggtttctttaagatgtgcattcctttctgcttgctctctagtaaatgttttactaccggga

SEQ ID NO: 424384 - DNA, 4794 bp, Homo sapiens
cggtggcggtggtggcggtggcggcggcggtggtggtggtggcggcggcggcggcgaagggggcggagaggaaggagcgcggcgggaccgggccgggacagcgcgtactttgggctccgggattcgctccgcgcccgcggttgtagcagctgccgctgcagccatagcagcaggacttcctcaagcgcagggactatgtcttaaggcgctttgcagagccaagctcatttctggcacataagaggtcagtcattggcaccatgaactggaataaaggtggtcctggcactaagcgaggatttggctttggaggttttgccatcagtgctgggaaaaaggaggaacccaaactcccacagcagtcccacagtgcctttggggcaaccagctcttcttctggatttggaaagtcagctccaccacagcttccttctttctacaaaattggatctaagcgggccaactttgatgaagaaaatgcctattttgaagatgaggaagaagattctagcaacgttgatttaccttacattcctgctgaaaactcaccaactcgccagcaattccattccaagccagtagattctgacagcgatgatgatcccttggaggcattcatggctgaagtggaggatcaggcagctagagacatgaagaggcttgaagaaaaggacaaggaaagaaaaaacgtaaagggtattcgagatgacattgaagaggaagatgaccaagtgagttcctatgcagtatttctatcttttatttttatccacaaagtctatactggggacaagctagagcttgccttcactcaaaatggccattcctgacattcagcagggaatgtcatttgatttgctccttttgtacctgtgtgaccaattggtaatacatagattcacatggctttcccccatattgaagatggaatttttgatcaactgtgacatccaaagcaaatacgagctttattcagcttgcttctttttaaatccaaaattaatgtttattctgataaatcaagtggtagagtagtgtgggatctattgatggcctctggtaacatctaacctctgtctcttagtaagtgtcctgtttgtggttcttgtatttcaagctggaacattaattactgtccattagtctcttttcccccattgttcagttgtggagtgatgagaatcagagtgagtggtagccgtttccaggtttgtgacctttctaattagcgttaacttccaaacttggattgttaaagccacagcatgtgttctatggctctgggcagggttgatagacaccccactccaggaaggctgtggaacagacagatttgtaagtcttctattaaacaagttgcaacatttaatagtactaactgtttaattcatttcttctgattgttcttctgaatattgctattattaaaggaatcattgctagtaaggatcttgccttacttggtaggtatgttaactgtgcaattatctggtacactatgtgcgctaattacaggagcagaaacattctcaattgtacttgggtgtgattatgttcttgtgctttcctgcaggaagcttattttcgatacatggcagaaaacccaactgctggtgtggttcaggaggaagaggaagacaatctagaatatgatagtgacggaaatccaattgcacctaccaaaaaaatcattgatcctcttccccccattgatcattcagagactaactttgaataattggacctgcagattgactatccaccatttgaaaaaaacttttacaatgagcatgaagagataaccaacctcactccacagcagttaatagatctccggcataagctcaatcttcgggtctctggtgctgcacctcctagaccaggaagtagctttgctcattttgggtttgacgaacaacttatgcaccagattcggaaatctgaatacacacagcccactccaatacagtgccagggtgtgcctgtggcattaagtggtagagacatgattggtattgccaaaacaggtagtgggaaaactgcagccttcatttggcccatgttgattcatataatggaccagaaggagttggaaccaggtgatggaccaattgcagtgattgtgtgtcctaccagggagctttgccagcagatccatgcagaatgtaagcggtttggaaaagcatataatcttcgatcagtggccgtatatggaggagggagtatgtgggagcaggccaaggcccttcaggagggggcagagattgttgtgtgtaccccaggtcgactgatagatcatgtgaaaaagaaagctaccaatcttcaaagagtctcttaccttgtgtttgatgaagcagatcgaatgtttgacatgggatttgagtaccaagttcgatccatagcaagtcatgttcgtcctgacaggcagactctcttatttagtgcaacttttcggaagaagattgaaaagttggccagagacatcctgatcgaccctattcgagtggtgcagggagatattggagaggcaaatgaagatgtgacacagattgtggagattctccattctggacctagtaaatggaactggcttacccggcgtctggtagaatttacctcttcagggagtgtcctcctctttgttactaaaaaagccaatgctgaagagctagcgaataaccttaaacaggagggtcataatcttgggctgctccatggggatatggatcagagtgagagaaacaaggtcatttcagactttaagaaaaaggacatcccagtcctggtggccacagatgttgcagcccgtggtctggacattccttcaattaagactgtcattaactatgatgtggcacgagacattgatacccacacgcataggattggccgcacaggaagagcgggtgagaaaggtgtggcctataccctactcactcccaaggacagcaattttgctggtgacctggtccggaacttggaaggagccaatcaacacgtttctaaggaactcctagatctggcaatgcagaatgcctggtttcggaaatctcgattcaaaggagggaaaggaaaaaagctgaacattggtggaggaggcctaggctacagggagcggcctggcctgggctctgagaacatggatcgaggaaataacaatgtaatgagcaattatgaggcctacaagccttccacaggagctatgggagatcgactaacggcaatgaaagcagctttccagtcacagtacaagagtcactttgttgcagccagtttaagtaatcagaaggctggaagttctgctgctggggcaagtgggtggactagtgcagggagcttgaattctgttccaactaactcagcacaacagggccataacagtcctgacagccccgtcaccagtgccgccaagggcatcccaggctttggcaatactggcaacatcagtggtgcccctgtgacctacccgtctgccggagcccaaggagtcaacaacacagcttcagggaataacagccgagaagggactgggggcagcaacgggaaaagagagagatatactgagaaccggggcagcagccgtcacagtcacggagagactggcaatcggcatagcgatagtccacgtcacggagatggtggtcgccatggagatggataccgccatccagaaagcagcagccgtcatactgatggccatcggcacggggagaacagacatggaggaagcgcaggccggcatggggagaaccggggtgcaaatgatggtcggaatggggaaagcaggaaagaagcttttaatcgtgagagcaagatggagcccaagatggaacccaaagtggacagcagcaagatggacaaggtggacagcaagacagataagacagctgacggctttgctgtcccagagccgcctaaacgcaagaaaagtcgatgggacagttagaggggatgtgctaaagcgtgaaatcagttgtccttaatttttagaaagattttggtaactaggtgtctcagggctgggttggggtccaaagtgtaaggaccccctgcccttagtggagagctggagcttggagacattaccccttcatcagaaggaattttcggatgttttcttgggaagctgttttggtccttggaagcagtgagagctgggaagcttcttttggctctaggtgagttgtcatgcgggtaagttgaggttatcttgggataaagggtcttctagggcacaaaactcactctaggtttatattgtatgtagcttatattttttactaaggtgtcaccttataagcatctataaattgagttctttttcttagttgtatggccaggcagtccccattttaggagttggcttctgcaaattcaatccattgagctaactgttggggagcaatttggtagttgtagacatttgcagggaagggagatgtctgattctaaatgggagttgatgctcaggtccccagccaggtttgcatccagccctgagacatgtaggaaacacctttcagacccaggctctgaagattcccagaagccacaaggattgaagggaaaaggtgatcctggtaactgttccaggattgctccaggtttgagatggtattgctaaatttaaaattaaacaagagacccaacaacagcttttaaagtgtcttctatttcattgtattttttttaacttgccccaatgatagaaaagtcttttgctgaaatgattttgatgatttttgtttatcgtttataaaaaggaaaagaaatatacaaactttgacttttgtg

SEQ ID NO: 424385 - DNA, 3952 bp, Homo sapiens
cggtggcggtggtggcggtggcggcggcggtggtggtggtggcggcggcggcggcgaagggggcggagaggaaggagcgcggcgggaccgggccgggacagcgcgtactttgggctccgggattcgctccgcgcccgcggttgtagcagctgccgctgcagccatagcagcaggacttcctcaagcgcagggactatgtcttaaggcgctttgcagagccaagctcatttctggcacataagaggtcagtcattggcaccatgaactggaataaaggtggtcctggcactaagcgaggatttggctttggaggttttgccatcagtgctgggaaaaaggaggaacccaaactcccacagcagtcccacagtgcctttggggcaaccagctcttcttctggatttggaaagtcagctccaccacagcttccttctttctacaaaattggatctaagcgggccaactttgatgaagaaaatgcctattttgaagatgaggaagaagattctagcaacgttgatttaccttacattcctgctgaaaactcaccaactcgccagcaattccattccaagccagtagattctgacagcgatgatgatcccttggaggcattcatggctgaagtggaggatcaggcagctagagacatgaagaggcttgaagaaaaggacaaggaaagaaaaaacgtaaagggtattcgagatgacattgaagaggaagatgaccaagaagcttattttcgatacatggcagaaaacccaactgctggtgtggttcaggaggaagaggaagacaatctagaatatgatagtgacggaaatccaattgcacctaccaaaaaaatcattgatcctcttccccccattgatcattcagagactaactttgaataattggacctgcagattgactatccaccatttgaaaaaaacttttacaatgagcatgaagagataaccaacctcactccacagcagttaatagatctccggcataagctcaatcttcgggtctctggtgctgcacctcctagaccaggaagtagctttgctcattttgggtttgacgaacaacttatgcaccagattcggaaatctgaatacacacagcccactccaatacagtgccagggtgtgcctgtggcattaagtggtagagacatgattggtattgccaaaacaggtagtgggaaaactgcagccttcatttggcccatgttgattcatataatggaccagaaggagttggaaccaggtgatggaccaattgcagtgattgtgtgtcctaccagggagctttgccagcagatccatgcagaatgtaagcggtttggaaaagcatataatcttcgatcagtggccgtatatggaggagggagtatgtgggagcaggccaaggcccttcaggagggggcagagattgttgtgtgtaccccaggtcgactgatagatcatgtgaaaaagaaagctaccaatcttcaaagagtctcttaccttgtgtttgatgaagcagatcgaatgtttgacatgggatttgagtaccaagttcgatccatagcaagtcatgttcgtcctgacaggcagactctcttatttagtgcaacttttcggaagaagattgaaaagttggccagagacatcctgatcgaccctattcgagtggtgcagggagatattggagaggcaaatgaagatgtgacacagattgtggagattctccattctggacctagtaaatggaactggcttacccggcgtctggtagaatttacctcttcagggagtgtcctcctctttgttactaaaaaagccaatgctgaagagctagcgaataaccttaaacaggagggtcataatcttgggctgctccatggggatatggatcagagtgagagaaacaaggtcatttcagactttaagaaaaaggacatcccagtcctggtggccacagatgttgcagcccgtggtctggacattccttcaattaagactgtcattaactatgatgtggcacgagacattgatacccacacgcataggattggccgcacaggaagagcgggtgagaaaggtgtggcctataccctactcactcccaaggacagcaattttgctggtgacctggtccggaacttggaaggagccaatcaacacgtttctaaggaactcctagatctggcaatgcagaatgcctggtttcggaaatctcgattcaaaggagggaaaggaaaaaagctgaacattggtggaggaggcctaggctacagggagcggcctggcctgggctctgagaacatggatcgaggaaataacaatgtaatgagcaattatgaggcctacaagccttccacaggagctatgggagatcgactaacggcaatgaaagcagctttccagtcacagtacaagagtcactttgttgcagccagtttaagtaatcagaaggctggaagttctgctgctggggcaagtgggtggactagtgcagggagcttgaattctgttccaactaactcagcacaacagggccataacagtcctgacagccccgtcaccagtgccgccaagggcatcccaggctttggcaatactggcaacatcagtggtgcccctgtgacctacccgtctgccggagcccaaggagtcaacaacacagcttcagggaataacagccgagaagggactgggggcagcaacgggaaaagagagagatatactgagaaccggggcagcagccgtcacagtcacggagagactggcaatcggcatagcgatagtccacgtcacggagatggtggtcgccatggagatggataccgccatccagaaagcagcagccgtcatactgatggccatcggcacggggagaacagacatggaggaagcgcaggccggcatggggagaaccggggtgcaaatgatggtcggaatggggaaagcaggaaagaagcttttaatcgtgagagcaagatggagcccaagatggaacccaaagtggacagcagcaagatggacaaggtggacagcaagacagataagacagctgacggctttgctgtcccagagccgcctaaacgcaagaaaagtcgatgggacagttagaggggatgtgctaaagcgtgaaatcagttgtccttaatttttagaaagattttggtaactaggtgtctcagggctgggttggggtccaaagtgtaaggaccccctgcccttagtggagagctggagcttggagacattaccccttcatcagaaggaattttcggatgttttcttgggaagctgttttggtccttggaagcagtgagagctgggaagcttcttttggctctaggtgagttgtcatgcgggtaagttgaggttatcttgggataaagggtcttctagggcacaaaactcactctaggtttatattgtatgtagcttatattttttactaaggtgtcaccttataagcatctataaattgagttctttttcttagttgtatggccaggcagtccccattttaggagttggcttctgcaaattcaatccattgagctaactgttggggagcaatttggtagttgtagacatttgcagggaagggagatgtctgattctaaatgggagttgatgctcaggtccccagccaggtttgcatccagccctgagacatgtaggaaacacctttcagacccaggctctgaagattcccagaagccacaaggattgaagggaaaaggtgatcctggtaactgttccaggattgctccaggtttgagatggtattgctaaatttaaaattaaacaagagacccaacaacagcttttaaagtgtcttctatttcattgtattttttttaacttgccccaatgatagaaaagtcttttgctgaaatgattttgatgatttttgtttatcgtttataaaaaggaaaagaaatatacaaactttgacttttgtg

SEQ ID NO: 424386 - DNA, 2694 bp, Homo sapiens
gaactgacgttttaattattgtggtaggggcctacgcaggagggaaagggtgacctggaaggcctggaaaaaatcaggtttcatttcttacctgtacatatgcgctatgtgaaaaattactctgaattgggacttggaattcagttatggctgcttagagaatccttcagttgcttgccatggttattgttaaggaaagctctacaaagtagtggggcatacaaattaggtatgtacaccaggtggagagcaaggtgattggaaaggagaggtgagttttgagctgcacttgacttgctgaaggcccaaggagaactgggattgttcaaggtcttctcgatgcaggtagaaatataatgcctagtccttgttcaggtgccctgtggctccaatgtcacaatcatctgtttcatttcttccttctcaggcaaatgaagatgtgacacagattgtggagattctccattctggacctagtaaatggaactggcttacccggcgtctggtagaatttacctcttcagggagtgtcctcctctttgttactaaaaaagccaatgctgaagagctagcgaataaccttaaacaggagggtcataatcttgggctgctccatggggatatggatcagagtgagagaaacaaggtcatttcagactttaagaaaaaggacatcccagtcctggtggccacagatgttgcagcccgtggtctggacattccttcaattaagactgtcattaactatgatgtggcacgagacattgatacccacacgcataggattggccgcacaggaagagcgggtgagaaaggtgtggcctataccctactcactcccaaggacagcaattttgctggtgacctggtccggaacttggaaggagccaatcaacacgtttctaaggaactcctagatctggcaatgcagaatgcctggtttcggaaatctcgattcaaaggagggaaaggaaaaaagctgaacattggtggaggaggcctaggctacagggagcggcctggcctgggctctgagaacatggatcgaggaaataacaatgtaatgagcaattatgaggcctacaagccttccacaggagctatgggagatcgactaacggcaatgaaagcagctttccagtcacagtacaagagtcactttgttgcagccagtttaagtaatcagaaggctggaagttctgctgctggggcaagtgggtggactagtgcagggagcttgaattctgttccaactaactcagcacaacagggccataacagtcctgacagccccgtcaccagtgccgccaagggcatcccaggctttggcaatactggcaacatcagtggtgcccctgtgacctacccgtctgccggagcccaaggagtcaacaacacagcttcagggaataacagccgagaagggactgggggcagcaacgggaaaagagagagatatactgagaaccggggcagcagccgtcacagtcacggagagactggcaatcggcatagcgatagtccacgtcacggagatggtggtcgccatggagatggataccgccatccagaaagcagcagccgtcatactgatggccatcggcacggggagaacagacatggaggaagcgcaggccggcatggggagaaccggggtgcaaatgatggtcggaatggggaaagcaggaaagaagcttttaatcgtgagagcaagatggagcccaagatggaacccaaagtggacagcagcaagatggacaaggtggacagcaagacagataagacagctgacggctttgctgtcccagagccgcctaaacgcaagaaaagtcgatgggacagttagaggggatgtgctaaagcgtgaaatcagttgtccttaatttttagaaagattttggtaactaggtgtctcagggctgggttggggtccaaagtgtaaggaccccctgcccttagtggagagctggagcttggagacattaccccttcatcagaaggaattttcggatgttttcttgggaagctgttttggtccttggaagcagtgagagctgggaagcttcttttggctctaggtgagttgtcatgcgggtaagttgaggttatcttgggataaagggtcttctagggcacaaaactcactctaggtttatattgtatgtagcttatattttttactaaggtgtcaccttataagcatctataaattgagttctttttcttagttgtatggccaggcagtccccattttaggagttggcttctgcaaattcaatccattgagctaactgttggggagcaatttggtagttgtagacatttgcagggaagggagatgtctgattctaaatgggagttgatgctcaggtccccagccaggtttgcatccagccctgagacatgtaggaaacacctttcagacccaggctctgaagattcccagaagccacaaggattgaagggaaaaggtgatcctggtaactgttccaggattgctccaggtttgagatggtattgctaaatttaaaattaaacaagagacccaacaacagcttttaaagtgtcttctatttcattgtattttttttaacttgccccaatgatagaaaagtcttttgctgaaatgattttgatgatttttgtttatcgtttataaaaaggaaaagaaatatacaaactttgacttttgtg

SEQ ID NO: 424387 - DNA, 1720 bp, Homo sapiens
cggtggcggtggtggcggtggcggcggcggtggtggtggtggcggcggcggcggcgaagggggcggagaggaaggagcgcggcgggaccgggccgggacagcgcgtactttgggctccgggattcgctccgcgcccgcggttgtagcagctgccgctgcagccatagcagcaggacttcctcaagcgcagggactatgtcttaaggcgctttgcagagccaagctcatttctggcacataagaggtcagtcattggcaccatgaactggaataaaggtggtcctggcactaagcgaggatttggctttggaggttttgccatcagtgctgggaaaaaggaggaacccaaactcccacagcagtcccacagtgcctttggggcaaccagctcttcttctggatttggaaagtcagctccaccacagcttccttctttctacaaaattggatctaagcgggccaactttgatgaagaaaatgcctattttgaagatgaggaagaagattctagcaacgttgatttaccttacattcctgctgaaaactcaccaactcgccagcaattccattccaagccagtagattctgacagcgatgatgatcccttggaggcattcatggctgaagtggaggatcaggcagctagagacatgaagaggcttgaagaaaaggacaaggaaagaaaaaacgtaaagggtattcgagatgacattgaagaggaagatgaccaagaagcttattttcgatacatggcagaaaacccaactgctggtgtggttcaggaggaagaggaagacaatctagaatatgatagtgacggaaatccaattgcacctaccaaaaaaatcattgatcctcttccccccattgatcattcagagattgactatccaccatttgaaaaaaacttttacaatgagcatgaagagataaccaacctcactccacagcagttaatagatctccggcataagctcaatcttcgggtctctggtgctgcacctcctagaccaggaagtagctttgctcattttgggtttgacgaacaacttatgcaccagattcggaaatctgaatacacacagcccactccaatacagtgccagggtgtgcctgtggcattaagtggtagagacatgattggtattgccaaaacaggtagtgggaaaactgcagccttcatttggcccatgttgattcatataatggaccagaaggagttggaaccaggtgatggaccaattgcagtgattgtgtgtcctaccagggagctttgccagcagatccatgcagaatgtaagcggtttggaaaagcatataatcttcgatcagtggccgtatatggaggagggagtatgtgggagcaggccaaggcccttcaggagggggcagagattgttgtgtgtaccccaggtcgactgatagatcatgtgaaaagaaagctaccatctgtcaagaaggcaaataacttcctgtggcctccaattgtctgctcacgagcttggatgtcagaaaaggaaccccagaaacaggaccgggttcggataaggtttcgactgataaagtttagactaaacaaaaaaaagggggcgctagaattccgaaggccagtcctccccttttaaagggccaaggagtatacaacgcgcgttcaagttcagaacatggcgttacacacactgggaatgcccccaatccaaattagaatgcaggtaaaaac

SEQ ID NO: 424388 - DNA, 285 bp, Homo sapiens
gggcaaccagctcttcttctggatttggaaagtcagctccaccacagcttccttctttctacaaaattggatctaagcgggccaactttgatgaagaaaatgcgtaagtggtaattcctggtagtgtagcaaagtttggactttgatatattcattctatcagcagaaattgaggcaaagaaactttgtttctcaaataataatgaattcttaaattatgtgtctcgctgaattccattgttcctaataagttaaattatcaggtttactcatttgtaaggaatg

SEQ ID NO: 424389 - DNA, 500 bp, Homo sapiens
atcatcccatttaaaagaaatgcaaactgcagattatagagtgcagctacacatatatataatggggtggatagtttatagtgtgctcattgctgctttgttattattagtgttgagagttcctgtgctgtgtggaattcaacactaatctgctgtaagtatggagctgggtatgtggaacatttgcagggaagtttgtttctccgcttgtttttccaggggtattcgagatgacattgaagaggaagatgaccaagtgagttcctatgcagtatttctatcttttatttttatccacaaagtctatactggggacaagctagagcttgccttcactcaaaatggccattcctgacattcagcagggaatgtcatttgatttgctccttttgtacctgtgtgaccaattggtaatacatagattcacatggctttcccccatattgaagatggaatttttgatcaactgtgacatccaaagcaaatacgagctttattca

SEQ ID NO: 424390 - DNA, 767 bp, Homo sapiens
ctaggtgcagtttgaacagggcttgacagtggctggaccatcactaagtgagactttaattcatcaagcataactgaaaatggaggcagtagattatatcttggtagccagcatgtgtagacttgtcttatttggagcccacttggaattttcatttcaagagtaagatacattaatttttttctaccatctggttaatacttaatgcaaaatggcaaaagaacagttatggcttcccaattcattgaacaattttttttccgttttatttgttatgagaaaattaattttgagttaagaaatttttaatcatttaaaattgtatgacaattatcttgggaatatttatcatggagtttttaatatgaggtttatatttgttaccatttgaggtttttccttttcattgtatgattttggcttacagacttgtatttttacttcatactccagctaaaatgctagatccaggtaagtattgttgaacttcaaatgctgttaatgttgaagtacaagtcattctggggagttgtctctatctctaggtctctggtgctgcacctcctagaccaggaagtagctttgctcattttgggtttgacgaacaacttatgcaccagattcggaaatctgaatacacacagcccactccaatacagtgccaggtaagtaaaacataatgaaagaaaaataaagtagggtagtctttcatgactatattaatttaaaaacaaatcacagcagtaaaacagtgtttagtgtagaac

SEQ ID NO: 424391 - DNA, 448 bp, Homo sapiens
aggctctgaagattcccagaagccacaaggattgaagggaaaaggtgatcctggtaactgttccaggattgctccaggtttgagatggtattgctaaatttaaaattaaacaagagacccaacaacagcttttaaagtgtcttctatttcattgtattttttttaacttgccccaatgatagaaaagtcttttgctgaaatgattttgatgatttttgtttatcgtttataaaaaggaaaagaaatatacaaactttgacttttgtgactttgtgaaggtttctttaagatgtgcattcctttctgcttgctctctagtaaatgttttactaccgggacctgtggatcgtttgtcatttctgtctatgaattggtacatattaagaatagtgccgcacacagtgtagggacagatagggaagtgcttattaaaactgtcagaaaagac

SEQ ID NO: 424392 - DNA, 3888 bp, Homo sapiens
cggtggcggtggtggcggtggcggcggcggtggtggtggtggcggcggcggcggcgaagggggcggagaggaaggagcgcggcgggaccgggccgggacagcgcgtactttgggctccgggattcgctccgcgcccgcggttgtagcagctgccgctgcagccatagcagcaggacttcctcaagcgcagggactatgtcttaaggcgctttgcagagccaagctcatttctggcacataagaggtcagtcattggcaccatgaactggaataaaggtggtcctggcactaagcgaggatttggctttggaggttttgccatcagtgctgggaaaaaggaggaacccaaactcccacagcagtcccacagtgcctttggggcaaccagctcttcttctggatttggaaagtcagctccaccacagcttccttctttctacaaaattggatctaagcgggccaactttgatgaagaaaatgcctattttgaagatgaggaagaagattctagcaacgttgatttaccttacattcctgctgaaaactcaccaactcgccagcaattccattccaagccagtagattctgacagcgatgatgatcccttggaggcattcatggctgaagtggaggatcaggcagctagagacatgaagaggcttgaagaaaaggacaaggaaagaaaaaacgtaaagaagcttattttcgatacatggcagaaaacccaactgctggtgtggttcaggaggaagaggaagacaatctagaatatgatagtgacggaaatccaattgcacctaccaaaaaaatcattgatcctcttccccccattgatcattcagagattgactatccaccatttgaaaaaaacttttacaatgagcatgaagagataaccaacctcactccacagcagttaatagatctccggcataagctcaatcttcgggtctctggtgctgcacctcctagaccaggaagtagctttgctcattttgggtttgacgaacaacttatgcaccagattcggaaatctgaatacacacagcccactccaatacagtgccagggtgtgcctgtggcattaagtggtagagacatgattggtattgccaaaacaggtagtgggaaaactgcagccttcatttggcccatgttgattcatataatggaccagaaggagttggaaccaggtgatggaccaattgcagtgattgtgtgtcctaccagggagctttgccagcagatccatgcagaatgtaagcggtttggaaaagcatataatcttcgatcagtggccgtatatggaggagggagtatgtgggagcaggccaaggcccttcaggagggggcagagattgttgtgtgtaccccaggtcgactgatagatcatgtgaaaaagaaagctaccaatcttcaaagagtctcttaccttgtgtttgatgaagcagatcgaatgtttgacatgggatttgagtaccaagttcgatccatagcaagtcatgttcgtcctgacaggcagactctcttatttagtgcaacttttcggaagaagattgaaaagttggccagagacatcctgatcgaccctattcgagtggtgcagggagatattggagaggcaaatgaagatgtgacacagattgtggagattctccattctggacctagtaaatggaactggcttacccggcgtctggtagaatttacctcttcagggagtgtcctcctctttgttactaaaaaagccaatgctgaagagctagcgaataaccttaaacaggagggtcataatcttgggctgctccatggggatatggatcagagtgagagaaacaaggtcatttcagactttaagaaaaaggacatcccagtcctggtggccacagatgttgcagcccgtggtctggacattccttcaattaagactgtcattaactatgatgtggcacgagacattgatacccacacgcataggattggccgcacaggaagagcgggtgagaaaggtgtggcctataccctactcactcccaaggacagcaattttgctggtgacctggtccggaacttggaaggagccaatcaacacgtttctaaggaactcctagatctggcaatgcagaatgcctggtttcggaaatctcgattcaaaggagggaaaggaaaaaagctgaacattggtggaggaggcctaggctacagggagcggcctggcctgggctctgagaacatggatcgaggaaataacaatgtaatgagcaattatgaggcctacaagccttccacaggagctatgggagatcgactaacggcaatgaaagcagctttccagtcacagtacaagagtcactttgttgcagccagtttaagtaatcagaaggctggaagttctgctgctggggcaagtgggtggactagtgcagggagcttgaattctgttccaactaactcagcacaacagggccataacagtcctgacagccccgtcaccagtgccgccaagggcatcccaggctttggcaatactggcaacatcagtggtgcccctgtgacctacccgtctgccggagcccaaggagtcaacaacacagcttcagggaataacagccgagaagggactgggggcagcaacgggaaaagagagagatatactgagaaccggggcagcagccgtcacagtcacggagagactggcaatcggcatagcgatagtccacgtcacggagatggtggtcgccatggagatggataccgccatccagaaagcagcagccgtcatactgatggccatcggcacggggagaacagacatggaggaagcgcaggccggcatggggagaaccggggtgcaaatgatggtcggaatggggaaagcaggaaagaagcttttaatcgtgagagcaagatggagcccaagatggaacccaaagtggacagcagcaagatggacaaggtggacagcaagacagataagacagctgacggctttgctgtcccagagccgcctaaacgcaagaaaagtcgatgggacagttagaggggatgtgctaaagcgtgaaatcagttgtccttaatttttagaaagattttggtaactaggtgtctcagggctgggttggggtccaaagtgtaaggaccccctgcccttagtggagagctggagcttggagacattaccccttcatcagaaggaattttcggatgttttcttgggaagctgttttggtccttggaagcagtgagagctgggaagcttcttttggctctaggtgagttgtcatgcgggtaagttgaggttatcttgggataaagggtcttctagggcacaaaactcactctaggtttatattgtatgtagcttatattttttactaaggtgtcaccttataagcatctataaattgagttctttttcttagttgtatggccaggcagtccccattttaggagttggcttctgcaaattcaatccattgagctaactgttggggagcaatttggtagttgtagacatttgcagggaagggagatgtctgattctaaatgggagttgatgctcaggtccccagccaggtttgcatccagccctgagacatgtaggaaacacctttcagacccaggctctgaagattcccagaagccacaaggattgaagggaaaaggtgatcctggtaactgttccaggattgctccaggtttgagatggtattgctaaatttaaaattaaacaagagacccaacaacagcttttaaagtgtcttctatttcattgtattttttttaacttgccccaatgatagaaaagtcttttgctgaaatgattttgatgatttttgtttatcgtttataaaaaggaaaagaaatatacaaactttgacttttgtg

SEQ ID NO: 424393 - DNA, 4155 bp, Homo sapiens
cggtggcggtggtggcggtggcggcggcggtggtggtggtggcggcggcggcggcgaagggggcggagaggaaggagcgcggcgggaccgggccgggacagcgcgtactttgggctccgggattcgctccgcgcccgcggttgtagcagctgccgctgcagccatagcagcaggacttcctcaagcgcagggactatgtcttaaggcgctttgcagagccaagctcatttctggcacataagaggtcagtcattggcaccatgaactggaataaaggtggtcctggcactaagcgaggatttggctttggaggttttgccatcagtgctgggaaaaaggaggaacccaaactcccacagcagtcccacagtgcctttggggcaaccagctcttcttctggatttggaaagtcagctccaccacagcttccttctttctacaaaattggatctaagcgggccaactttgatgaagaaaatgcctattttgaagatgaggaagaagattctagcaacgttgatttaccttacattcctgctgaaaactcaccaactcgccagcaattccattccaagccagtagattctgacagcgatgatgatcccttggaggcattcatggctgaagtggaggatcaggcagctagagacatgaagaggcttgaagaaaaggacaaggaaagaaaaaacgtaaagggtattcgagatgacattgaagaggaagatgaccaagaagcttattttcgatacatggcagaaaacccaactgctggtgtggttcaggaggaagaggaagacaatctagaatatgatagtgacggaaatccaattgcacctaccaaaaaaatcattgatcctcttccccccattgatcattcagagattgactatccaccatttgaaaaaaacttttacaatgagcatgaagagataaccaacctcactccacagcagttaatagatctccggcataagctcaatcttcgggtctctggtgctgcacctcctagaccaggaagtagctttgctcattttgggtttgacgaacaacttatgcaccagattcggaaatctgaatacacacagcccactccaatacagtgccagggtgtgcctgtggcattaagtggtagagacatgattggtattgccaaaacaggtagtgggaaaactgcagccttcatttggcccatgttgattcatataatggaccagaaggagttggaaccaggtgatggaccaattgcagtgattgtgtgtcctaccagggagctttgccagcagatccatgcagaatgtaagcggtttggaaaagcatataatcttcgatcagtggccgtatatggaggagggagtatgtgggagcaggccaaggcccttcaggagggggcagagattgttgtgtgtaccccaggtcgactgatagatcatgtgaaaaagaaagctaccaatcttcaaagagtctcttaccttgtgtttgatgaagcagatcgaatgtttgacatgggatttgagtaccaagttcgatccatagcaagtcatgttcgtcctgacaggcagactctcttatttagtgcaacttttcggaagaagattgaaaagttggccagagacatcctgatcgaccctattcgagtggtgcagggagatattggagaggcaaatgaagatgtgacacagattgtggagattctccattctggacctagtaaatggaactggcttacccggcgtctggtagaatttacctcttcagggagtgtcctcctctttgttactaaaaaagccaatgctgaagagctagcgaataaccttaaacaggagggtcataatcttgggctgctccatggggatatggatcagagtgagagaaacaaggtcatttcagactttaagaaaaaggacatcccagtcctggtggccacagatgttgcagcccgtggtctggacattccttcaattaagactgtcattaactatgatgtggcacgagacattgatacccacacgcataggattggccgcacaggaagagcgggtgagaaaggtgtggcctataccctactcactcccaaggacagcaattttgctggtgacctggtccggaacttggaaggagccaatcaacacgtttctaaggaactcctagatctggcaatgcagaatgcctggtttcggaaatctcgattcaaaggagggaaaggaaaaaagctgaacattggtggaggaggcctaggctacagggagcggcctggcctgggctctgagaacatggatcgaggaaataacaatgtaatgagcaattatgaggcctacaagccttccacaggagctatgggagatcgactaacggcaatgaaagcagctttccagtcacagtacaagagtcactttgttgcagccagtttaagtaatcagaaggctggaagttctgctgctggggcaagtgggtggactagtgcagggagcttgaattctgttccaactaactcagcacaacagggccataacagtcctgacagccccgtcaccagtgccgccaagggcatcccaggctttggcaatactggcaacatcagtggtgcccctgtgacctacccgtctgccggagcccaaggagtcaacaacacagcttcagggaataacagccgagaagggactgggggcagcaacgggaaaagagagagatatactgagaaccggggcagcagccgtcacagtcacggagagactggcaatcggcatagcgatagtccacgtcacggagatggtggtcgccatggagatggataccgccatccagaaagcagcagccgtcatactgatggccatcggcacggggagaacagacatggaggaagcgcaggccggcatggggagaaccggggtgcaaatgatggtcggaatggggaaagcaggaaagaagcttttaatcgtgagagcaagatggagcccaagatggaacccaaagtggacagcagcaagatggacaaggtggacagcaagacagataagacagctgacggctttgctgtcccagagccgcctaaacgcaagaaaagtcgatgggacagttagaggggatgtgctaaagcgtgaaatcagttgtccttaatttttagaaagattttggtaactaggtgtctcagggctgggttggggtccaaagtgtaaggaccccctgcccttagtggagagctggagcttggagacattaccccttcatcagaaggaattttcggatgttttcttgggaagctgttttggtccttggaagcagtgagagctgggaagcttcttttggctctaggtgagttgtcatgcgggtaagttgaggttatcttgggataaagggtcttctagggcacaaaactcactctaggtttatattgtatgtagcttatattttttactaaggtgtcaccttataagcatctataaattgagttctttttcttagttgtatggccaggcagtccccattttaggagttggcttctgcaaattcaatccattgagctaactgttggggagcaatttggtagttgtagacatttgcagggaagggagatgtctgattctaaatgggagttgatgctcaggtccccagccaggtttgcatccagccctgagacatgtaggaaacacctttcagacccaggctctgaagattcccagaagccacaaggattgaagggaaaaggtgatcctggtaactgttccaggattgctccaggtttgagatggtattgctaaatttaaaattaaacaagagacccaacaacagcttttaaagtgtcttctatttcattgtattttttttaacttgccccaatgatagaaaagtcttttgctgaaatgattttgatgatttttgtttatcgtttataaaaaggaaaagaaatatacaaactttgacttttgtgactttgtgaaggtttctttaagatgtgcattcctttctgcttgctctctagtaaatgttttactaccgggaaaaaaaaaaaaacaaagaaaaaacaaattgttggggccgccgcccgaaaatttaaaaactcgtgggggggcccagtaagaaacggaaggtccagaacggcgaaagggggtccccaaaaaccggggcgggtgaaacaggtctggtgggtaagcgaaacgg

SEQ ID NO: 424394 - DNA, 2060 bp, Homo sapiens
cggctagtacgaggctcgtgttaatcggccgaggaggacatcccagtcttggtggccacagatgttgcagcccgtggtctggacattccttcaattaagactgtcattaactatgatgtggcacgagacattgatacccacacgcataggattggccgcacaggaagagcgggtgagaaaggtgtggcctataccctactcactcccaaggacagcaattttgctggtgacctggtccggaacttggaaggagccaatcaacacgtttctaaggaactcctagatctggcaatgcagaatgcctggtttcggaaatctcgattcaaaggagggaaaggaaaaaagctgaacattggtggaggaggcctaggctacagggagcggcctggcctgggctctgagaacatggatcgaggaaataacaatgtaatgagcaattatgaggcctacaagccttccacaggagctatgggagatcgactaacggcaatgaaagcagctttccagtcacagtacaagagtcactttgttgcagccagtttaagtaatcagaaggctggaagttctgctgctggggcaagtgggtggactagtgcagggagcttgaattctgttccaactaactcagcacaacagggccataacagtcctgacagccccgtcaccagtgccgccaagggcatcccaggctttggcaatactggcaacatcagtggtgcccctgtgacctacccgtctgccggagcccaaggagtcaacaacacagcttcagggaataacagccgagaagggactgggggcagcaacgggaaaagagagagatatactgagaaccggggcagcagccgtcacagtcacggagagactggcaatcggcatagcgatagtccacgtcacggagatggtggtcgccatggagatggataccgccatccagaaagcagcagccgtcatactgatggccatcggcacggggagaacagacatggaggaagcgcaggccggcatggggagaaccggggtgcaaatgatggtcggaatggggaaagcaggaaagaagcttttaatcgtgagagcaagatggagcccaagatggaacccaaagtggacagcagcaagatggacaaggtggacagcaagacagataagacagctgacggctttgctgtcccagagccgcctaaacgcaagaaaagtcgatgggacagttagaggggatgtgctaaagcgtgaaatcagttgtccttaatttttagaaagattttggtaactaggtgtctcagggctgggttggggtccaaagtgtaaggaccccctgcccttagtggagagctggagcttggagacattaccccttcatcagaaggaattttcggatgttttcttgggaagctgttttggtccttggaagcagtgagagctgggaagcttcttttggctctaggtgagttgtcatgcgggtaagttgaggttatcttgggataaagggtcttctagggcacaaaactcactctaggtttatattgtatgtagcttatattttttactaaggtgtcaccttataagcatctataaattgagttctttttcttagttgtatggccaggcagtccccattttaggagttggcttctgcaaattcaatccattgagctaactgttggggagcaatttggtagttgtagacatttgcagggaagggagatgtctgattctaaatgggagttgatgctcaggtccccagccaggtttgcatccagccctgagacatgtaggaaacacctttcagacccaggctctgaagattcccagaagccacaaggattgaagggaaaaggtgatcctggtaactgttccaggattgctccaggtttgagatggtattgctaaatttaaaattaaacaagagacccaacaacagcttttaaagtgtcttctatttcattgtattttttttaacttgccccaatgatagaaaagtcttttgctgaaatgattttgatgatttttgtttatcgtttataaaaaggaaaagaaatatacaaactttgacttttgtg

SEQ ID NO: 424395 - DNA, 1742 bp, Homo sapiens
ggggacgagtcatttcaatcggccgagggaccgaccgccgccggccgggttgcaggcggggcacctcgggcaggacctccctggtcggaagtggccgtgagcccaagccgcggtcccgggccggcacccaggatgggcgaggtggaggccccgggccgcttgtggctcgagagcccccctgggggagcgccccccatcttcctgccctcggacgggcaagccctggtcctgggcaggggacccctgacccaggttacggaccggaagtgctccagaactcaagtggagctggtcgcagatcctgagacccggacagtggcagtgaaacagctgggagttaacccctcaactaccgggacccaggagttgaagccggggttggagggctctctgggggtgggggacacactgtatttggtcaatggcctccacccactgaccctgcgctgggaagagacccgcacaccagaatcccagccagatactccgcctggcacccctctggtgtcccaagatgagaagagagatgctgagctgccgaagaagcgtatgcggaagtcaaaccccggctgggagaacttggagaagttgctagtgttcaccgcagctggggtgaaaccccagggcaaggtggctggctttgatctggacgggacgctcatcaccacacgctctgggaaggtctttcccactggccccagtgactggaggatcttgtacccagagattccccgtaagctccgagagctggaagccgagggctacaagctggtgatcttcaccaaccagatgagcatcgggcgcgggaagctgccagccgaggagttcaaggccaaggtggaggctgtggtggagaagctgggggtccccttccaggtgctggtggccacgcacgcaggcttgtaccggaagccggtgacgggcatgtgggaccatctgcaggagcaggccaacgacggcacgcccatatccatcggggacagcatctttgtgggagacgcagccggacgcccggccaactgggccccggggcggaagaagaaagacttctcctgcgccgatcgcctgtttgccctcaaccttggcctgcccttcgccacgcctgaggagttctttctcaagtggccagcagccggcttcgagctcccagcctttgatccgaggactgtctcccgctcagggcctctctgcctccccgagtccagggccctcctgagcgccagcccggaggtggttgtcgcagtgggattccctggggccgggaagtccacctttctcaagaagcacctcgtgtcggccggatatgtccacgtgaacagggacacgctaggctcctggcagcgctgtgtgaccacgtgtgagacagccctgaagcaagggaaacgggtcgccatcgacaacacaaacccagacgccgcgagccgcgccaggtacgtccagtgtgcccgagccgcgggcgtcccctgccgctgcttcctcttcaccgccactctggagcaggcgcgccacaacaaccggtttcgagagatgacggactcctctcatatccccgtgtcagacatggtcatgtatggctacaggaagcagttcgaggccccaacgctggctgaaggcttctctgccatcctggagatcccgttccggctatgggtggagccgaggctggggcggctgtactgccagttctccgagggctgagccccgcccagctcccctccacaataaacgctgtttctccttga

SEQ ID NO: 424396 - DNA, 2111 bp, Homo sapiens
gcgggaacaatccagagggacgcttggctgctacgcgggattgcagtggtgcagccagccccgaagtcggaaggtgctctctagggagtacaggaagataaagtttgtgcttgatttagaattagctagatcctttgggggagaggggatcgagccgatttcgggaggatgttcactgcgcggatgatgctcaggccatcgagaaatccagaaacaggcgacgaccttcgtcaagagaaaaatgatcctgtggagaaaagtaaatgtcgctaggttgggatggatggtaacaggccaagccccggacctatatctagccacattttttgtcaaggaggaaaccaattctgtagagaaaagtacctccctgtcccttgcaaggaccagtgtcaggcaatcctagtgccactatctggctactgcatgtcaaggagccaatcccatgtagaaataaactgcctcttactccctggatgctatagcctgaagcaggccacactccccagaaatgagggacccaatcacacaaggatgcaaatcctgactccacccctccaatcctcagtggagctggtcgcagatcctgagacccggacagtggcagtgaaacagctgggagttaacccctcaactaccgggacccaggagttgaagccggggttggagggctctctgggggtgggggacacactgtatttggtcaatggcctccacccactgaccctgcgctgggaagagacccgcacaccagaatcccagccagatactccgcctggcacccctctggtgtcccaagatgagaagagagatgctgagctgccgaagaagcgtatgcggaagtcaaaccccggctgggagaacttggagaagttgctagtgttcaccgcagctggggtgaaaccccagggcaaggtggctggctttgatctggacgggacgctcatcaccacacgctctgggaaggtctttcccactggccccagtgactggaggtgataagaggcaaaacaagggagtgagtgaggcctggagtccacctctggccccgggtcacccctgccgcttcatacctgccgtaggatcttgtacccagagattccccgtaagctccgagagctggaagccgagggctacaagctggtgatcttcaccaaccagatgagcatcgggcgcgggaagctgccagccgaggagttcaaggccaaggtggaggctgtggtggagaagctgggggtccccttccaggtgctggtggccacgcacgcaggcttgtaccggaagccggtgacgggcatgtgggaccatctgcaggagcaggccaacgacggcacgcccatatccatcggggacagcatctttgtgggagacgcagccggacgcccggccaactgggccccggggcggaagaagaaagacttctcctgcgccgatcgcctgtttgccctcaaccttggcctgcccttcgccacgcctgaggagttctttctcaagtggccagcagccggcttcgagctcccagcctttgatccgaggactgtctcccgctcagggcctctctgcctccccgagtccagggccctcctgagcgccagcccggaggtggttgtcgcagtgggattccctggggccgggaagtccacctttctcaagaagcacctcgtgtcggccggatatgtccacgtgaacagggacacgctaggctcctggcagcgctgtgtgaccacgtgtgagacagccctgaagcaagggaaacgggtcgccatcgacaacacaaacccagacgccgcgagccgcgccaggtacgtccagtgtgcccgagccgcgggcgtcccctgccgctgcttcctcttcaccgccactctggagcaggcgcgccacaacaaccggtttcgagagatgacggactcctctcatatccccgtgtcagacatggtcatgtatggctacaggaagcagttcgaggccccaacgctggctgaaggcttctctgccatcctggagatcccgttccggctatgggtggagccgaggctggggcggctgtactgccagttctccgagggctgagccccgcccagctcccctccacaataaacgctgtttctccttga

SEQ ID NO: 424397 - DNA, 331 bp, Homo sapiens
gcgggaacaatccagagggacgcttggctgctacgcgggattgcagtggtgcagccagccccgaagtcggaaggtgctctctagggagtacaggaagataaagtttgtgcttgatttagaattagctagatcctttgggggagaggggatcgagccgatttcgggaggatgttcactgcgcggatgatgctcaggccatcgagaaatccagaaacaggcgacgaccttcgtcaagagaaaaatgatcctgtggagaaaagtaaatgtcgctaggttgggatggatggtaacaggccaagccccggtcaacccacagccacggtcaacccac

SEQ ID NO: 424398 - DNA, 1992 bp, Homo sapiens
ggggacgagtcatttcaatcggccgagggaccgaccgccgccggccgggttgcaggcggggcacctcgggcaggacctccctggtcggaagtggccgtgagcccaagccgcggtcccgggtgagtacggggcggggcggaggcatgtgcgaggctctctgcctgtacgctggaaagtggggattgcaactcggggagggatggagcacgcgtcgtcgcctgggaaacgggtcgacccgcggaaggcgagcgggtgggacttccggagcagttaatggtgggaaactttctagtggatgtgggaggaggcgggacttcctgcagcaaattggggctgtgcgccgctcaagcccgtttacctgctccccaggccggcacccaggatgggcgaggtggaggccccgggccgcttgtggctcgagagcccccctgggggagcgccccccatcttcctgccctcggacgggcaagccctggtcctgggcaggggacccctgacccaggttacggaccggaagtgctccagaactcaagtggagctggtcgcagatcctgagacccggacagtggcagtgaaacagctgggagttaacccctcaactaccgggacccaggagttgaagccggggttggagggctctctgggggtgggggacacactgtatttggtcaatggcctccacccactgaccctgcgctgggaagagacccgcacaccagaatcccagccagatactccgcctggcacccctctggtgtcccaagatgagaagagagatgctgagctgccgaagaagcgtatgcggaagtcaaaccccggctgggagaacttggagaagttgctagtgttcaccgcagctggggtgaaaccccagggcaaggtggctggctttgatctggacgggacgctcatcaccacacgctctgggaaggtctttcccactggccccagtgactggaggatcttgtacccagagattccccgtaagctccgagagctggaagccgagggctacaagctggtgatcttcaccaaccagatgagcatcgggcgcgggaagctgccagccgaggagttcaaggccaaggtggaggctgtggtggagaagctgggggtccccttccaggtgctggtggccacgcacgcaggcttgtaccggaagccggtgacgggcatgtgggaccatctgcaggagcaggccaacgacggcacgcccatatccatcggggacagcatctttgtgggagacgcagccggacgcccggccaactgggccccggggcggaagaagaaagacttctcctgcgccgatcgcctgtttgccctcaaccttggcctgcccttcgccacgcctgaggagttctttctcaagtggccagcagccggcttcgagctcccagcctttgatccgaggactgtctcccgctcagggcctctctgcctccccgagtccagggccctcctgagcgccagcccggaggtggttgtcgcagtgggattccctggggccgggaagtccacctttctcaagaagcacctcgtgtcggccggatatgtccacgtgaacagggacacgctaggctcctggcagcgctgtgtgaccacgtgtgagacagccctgaagcaagggaaacgggtcgccatcgacaacacaaacccagacgccgcgagccgcgccaggtacgtccagtgtgcccgagccgcgggcgtcccctgccgctgcttcctcttcaccgccactctggagcaggcgcgccacaacaaccggtttcgagagatgacggactcctctcatatccccgtgtcagacatggtcatgtatggctacaggaagcagttcgaggccccaacgctggctgaaggcttctctgccatcctggagatcccgttccggctatgggtggagccgaggctggggcggctgtactgccagttctccgagggctgagccccgcccagctcccctccacaataaacgctgtttctccttga

SEQ ID NO: 424399 - DNA, 1854 bp, Homo sapiens
atcctttttatagatgaggaaactagaacatcgagggtgaagccaaagaaggacttaggggcgctgtcgggggcggaggtttcctcgactgacaatgaccatcagatgggaaaaaaatcttcctccctgggatgaaaattagaagtcaaggtggaaagaggcaaatctgctaacggaggatccagtccccgctaccggcctgagcctcgcgttgcagcaagagagatgaaggccggcacccaggatgggcgaggtggaggccccgggccgcttgtggctcgagagcccccctgggggagcgccccccatcttcctgccctcggacgggcaagccctggtcctgggcaggggacccctgacccaggttacggaccggaagtgctccagaactcaagtggagctggtcgcagatcctgagacccggacagtggcagtgaaacagctgggagttaacccctcaactaccgggacccaggagttgaagccggggttggagggctctctgggggtgggggacacactgtatttggtcaatggcctccacccactgaccctgcgctgggaagagacccgcacaccagaatcccagccagatactccgcctggcacccctctggtgtcccaagatgagaagagagatgctgagctgccgaagaagcgtatgcggaagtcaaaccccggctgggagaacttggagaagttgctagtgttcaccgcagctggggtgaaaccccagggcaaggtggctggctttgatctggacgggacgctcatcaccacacgctctgggaaggtctttcccactggccccagtgactggaggatcttgtacccagagattccccgtaagctccgagagctggaagccgagggctacaagctggtgatcttcaccaaccagatgagcatcgggcgcgggaagctgccagccgaggagttcaaggccaaggtggaggctgtggtggagaagctgggggtccccttccaggtgctggtggccacgcacgcaggcttgtaccggaagccggtgacgggcatgtgggaccatctgcaggagcaggccaacgacggcacgcccatatccatcggggacagcatctttgtgggagacgcagccggacgcccggccaactgggccccggggcggaagaagaaagacttctcctgcgccgatcgcctgtttgccctcaaccttggcctgcccttcgccacgcctgaggagttctttctcaagtggccagcagccggcttcgagctcccagcctttgatccgaggactgtctcccgctcagggcctctctgcctccccgagtccagggccctcctgagcgccagcccggaggtggttgtcgcagtgggattccctggggccgggaagtccacctttctcaagaagcacctcgtgtcggccggatatgtccacgtgaacagggacacgctaggctcctggcagcgctgtgtgaccacgtgtgagacagccctgaagcaagggaaacgggtcgccatcgacaacacaaacccagacgccgcgagccgcgccaggtacgtccagtgtgcccgagccgcgggcgtcccctgccgctgcttcctcttcaccgccactctggagcaggcgcgccacaacaaccggtttcgagagatgacggactcctctcatatccccgtgtcagacatggtcatgtatggctacaggaagcagttcgaggccccaacgctggctgaaggcttctctgccatcctggagatcccgttccggctatgggtggagccgaggctggggcggctgtactgccagttctccgagggctgagccccgcccagctcccctccacaataaacgctgtttctccttga

SEQ ID NO: 424400 - DNA, 1922 bp, Homo sapiens
ggggacgagtcatttcaatcggccgagggaccgaccgccgccggccgggttgcaggcggggcacctcgggcaggacctccctggtcggaagtggccgtgagcccaagccgcggtcccgggccggcacccaggatgggcgaggtggaggccccgggccgcttgtggctcgagagcccccctgggggagcgccccccatcttcctgccctcggacgggcaagccctggtcctgggcaggggacccctgacccaggttacggaccggaagtgctccagaactcaagtggagctggtcgcagatcctgagacccggacagtggcagtgaaacagctgggagttaacccctcaactaccgggacccaggagttgaagccggggttggagggctctctgggggtgggggacacactgtatttggtcaatggcctccacccactgaccctgcgctgggaagagacccgcacaccagaatcccagccagatactccgcctggcacccctctggtgtcccaagatgagaagagagatgctgagctgccgaagaagcgtatgcggaagtcaaaccccggctgggagaacttggagaagttgctagtgttcaccgcagctggggtgaaaccccagggcaaggtggctggctttgatctggacgggacgctcatcaccacacgctctgggaaggtctttcccactggccccagtgactggaggatcttgtacccagagattccccgtaagctccgagagctggaagccgagggctacaagctggtgatcttcaccaaccagatgagcatcgggcgcgggaagctgccagccgaggagttcaaggccaaggtggaggctgtggtggagaagctgggggtccccttccaggtgctggtggccacgcacgcaggcttgtaccggaagccggtgacgggcatgtgggaccatctgcaggagcaggccaacgacggcacgcccatatccatcggggacagcatctttgtgggagacgcagccggacgcccggccaactgggccccggggcggaagaagaaagacttctcctgcgccgatcgcctgtttgccctcaaccttggcctgcccttcgccacgcctgaggagttctttctcaagtggccagcagccggcttcgagctcccagcctttgatccgaggactgtctcccgctcagggcctctctgcctccccgagtccagggccctcctgagcgccagcccggaggtggttgtcgcagtgggattccctggggccgggaagtccacctttctcaagaagcacctcgtgtcggccggatatgtccacgtgaacagggacacgctaggctcctggcagcgctgtgtgaccacgtgtgagacagccctgaagcaagggaaacgggtcgccatcgacaacacaaacccagacgccgcgagccgcgccaggtacgtccagtgtgcccgagccgcgggcgtcccctgccgctgcttcctcttcaccgccactctggagcaggcgcgccacaacaaccgggtgagcccgctcagcccggacaccccccgggctgcaccccctgacccccctcctcccctgacccctgggcctgccgcccctctgatgttccccacagtttcgagagatgacggactcctctcatatccccgtgtcagacatggtcatgtatggctacaggtactgttggggatagcagggggcaggggcactggctgggccacatgatccaggctgtccctcactgttcccaccactgccaggaagcagttcgaggccccaacgctggctgaaggcttctctgccatcctggagatcccgttccggctatgggtggagccgaggctggggcggctgtactgccagttctccgagggctgagccccgcccagctcccctccacaataaacgctgtttctccttga

SEQ ID NO: 424401 - DNA, 1839 bp, Homo sapiens
ggggacgagtcatttcaatcggccgagggaccgaccgccgccggccgggttgcaggcggggcacctcgggcaggacctccctggtcggaagtggccgtgagcccaagccgcggtcccgggccggcacccaggatgggcgaggtggaggccccgggccgcttgtggctcgagagcccccctgggggagcgccccccatcttcctgccctcggacgggcaagccctggtcctgggcaggggacccctgacccaggttacggaccggaagtgctccagaactcaagtggagctggtcgcagatcctgagacccggacagtggcagtgaaacagctgggagttaacccctcaactaccgggacccaggagttgaagccggggttggagggctctctgggggtgggggacacactgtatttggtcaatggcctccacccactgaccctgcgctgggaagagacccgcacaccagaatcccagccagatactccgcctggcacccctctggtgtcccaagatgagaagagagatgctgagctgccgaagaagcgtatgcggaagtcaaaccccggctgggagaacttggagaagttgctagtgttcaccgcagctggggtgaaaccccagggcaaggtggctggctttgatctggacgggacgctcatcaccacacgctctgggaaggtctttcccactggccccagtgactggaggatcttgtacccagagattccccgtaagctccgagagctggaagccgagggctacaagctggtgatcttcaccaaccagatgagcatcgggcgcgggaagctgccagccgaggagttcaaggccaaggtggaggctgtggtggagaagctgggggtccccttccaggtgctggtggccacgcacgcaggcttgtaccggaagccggtgacgggcatgtgggaccatctgcaggagcaggccaacgacggcacgcccatatccatcggggacagcatctttgtgggagacgcagccggacgcccggccaactgggccccggggcggaagaagaaagacttctcctgcgccgatcgcctgtttgccctcaaccttggcctgcccttcgccacgcctgaggagttctttctcaagtggccagcagccggcttcgagctcccagcctttgatccgaggactgtctcccgctcagggcctctctgcctccccgagtccagggccctcctgagcgccagcccggaggtggttgtcgcagtgggattccctggggccgggaagtccacctttctcaagaagcacctcgtgtcggccggatatgtccacgtgaacagggacacgctaggctcctggcagcgctgtgtgaccacgtgtgagacagccctgaagcaagggaaacgggtcgccatcgacaacacaaacccagacgccgcgagccgcgccaggtacgtccagtgtgcccgagccgcgggcgtcccctgccgctgcttcctcttcaccgccactctggagcaggcgcgccacaacaaccgggtgagcccgctcagcccggacaccccccgggctgcaccccctgacccccctcctcccctgacccctgggcctgccgcccctctgatgttccccacagtttcgagagatgacggactcctctcatatccccgtgtcagacatggtcatgtatggctacaggaagcagttcgaggccccaacgctggctgaaggcttctctgccatcctggagatcccgttccggctatgggtggagccgaggctggggcggctgtactgccagttctccgagggctgagccccgcccagctcccctccacaataaacgctgtttctccttga

SEQ ID NO: 424402 - DNA, 1825 bp, Homo sapiens
ggggacgagtcatttcaatcggccgagggaccgaccgccgccggccgggttgcaggcggggcacctcgggcaggacctccctggtcggaagtggccgtgagcccaagccgcggtcccgggccggcacccaggatgggcgaggtggaggccccgggccgcttgtggctcgagagcccccctgggggagcgccccccatcttcctgccctcggacgggcaagccctggtcctgggcaggggacccctgacccaggttacggaccggaagtgctccagaactcaagtggagctggtcgcagatcctgagacccggacagtggcagtgaaacagctgggagttaacccctcaactaccgggacccaggagttgaagccggggttggagggctctctgggggtgggggacacactgtatttggtcaatggcctccacccactgaccctgcgctgggaagagacccgcacaccagaatcccagccagatactccgcctggcacccctctggtgtcccaagatgagaagagagatgctgagctgccgaagaagcgtatgcggaagtcaaaccccggctgggagaacttggagaagttgctagtgttcaccgcagctggggtgaaaccccagggcaaggtggctggctttgatctggacgggacgctcatcaccacacgctctgggaaggtctttcccactggccccagtgactggaggatcttgtacccagagattccccgtaagctccgagagctggaagccgagggctacaagctggtgatcttcaccaaccagatgagcatcgggcgcgggaagctgccagccgaggagttcaaggccaaggtggaggctgtggtggagaagctgggggtccccttccaggtgctggtggccacgcacgcaggcttgtaccggaagccggtgacgggcatgtgggaccatctgcaggagcaggccaacgacggcacgcccatatccatcggggacagcatctttgtgggagacgcagccggacgcccggccaactgggccccggggcggaagaagaaagacttctcctgcgccgatcgcctgtttgccctcaaccttggcctgcccttcgccacgcctgaggagttctttctcaagtggccagcagccggcttcgagctcccagcctttgatccgaggactgtctcccgctcagggcctctctgcctccccgagtccagggccctcctgagcgccagcccggaggtggttgtcgcagtgggattccctggggccgggaagtccacctttctcaagaagcacctcgtgtcggccggatatgtccacgtgaacagggacacgctaggctcctggcagcgctgtgtgaccacgtgtgagacagccctgaagcaagggaaacgggtcgccatcgacaacacaaacccagacgccgcgagccgcgccaggtacgtccagtgtgcccgagccgcgggcgtcccctgccgctgcttcctcttcaccgccactctggagcaggcgcgccacaacaaccggtttcgagagatgacggactcctctcatatccccgtgtcagacatggtcatgtatggctacaggtactgttggggatagcagggggcaggggcactggctgggccacatgatccaggctgtccctcactgttcccaccactgccaggaagcagttcgaggccccaacgctggctgaaggcttctctgccatcctggagatcccgttccggctatgggtggagccgaggctggggcggctgtactgccagttctccgagggctgagccccgcccagctcccctccacaataaacgctgtttctccttga

SEQ ID NO: 424403 - DNA, 1499 bp, Homo sapiens
ggggacgagtcatttcaatcggccgagggaccgaccgccgccggccgggttgcaggcggggcacctcgggcaggacctccctggtcggaagtggccgtgagcccaagccgcggtcccgggccggcacccaggatgggcgaggtggaggccccgggccgcttgtggctcgagagcccccctgggggagcgccccccatcttcctgccctcggacgggcaagccctggtcctgggcaggggacccctgacccaggttacggaccggaagtgctccagaactcaagtggagctggtcgcagatcctgagacccggacagtggcagtgaaacagctgggagttaacccctcaactaccgggacccaggagttgaagccggggttggagggctctctgggggtgggggacacactgtatttggtcaatggcctccacccactgaccctgcgctgggaagagacccgcacaccagaatcccagccagatactccgcctggcacccctctggtgtcccaagatgagaagagagatgctgagctgccgaagaagcgtatgcggaagtcaaaccccggctgggagaacttggagaagttgctagtgttcaccgcagctggggtgaaaccccagggcaaggtggctggctttgatctggacgggacgctcatcaccacacgctctgggaaggtctttcccactggccccagtgactggaggatcttgtacccagagattccccgtaagctccgagagctggaagccgagggctacaagctggtgatcttcaccaaccagatgagcatcgggcgcgggaagctgccagccgaggagttcaaggccaaggtggaggctgtggtggagaagctgggggtccccttccaggtgctggtggccacgcacgcaggcttgtaccggaagccggtgacgggcatgtgggaccatctgcaggagcaggccaacgacggcacgcccatatccatcggggacagcatctttgtgggagacgcagccggacgcccggccaactgggccccggggcggaagaagaaagacttctcctgcgccgatcgcctgtttgccctcaaccttggcctgcccttcgccacgcctgaggagttctttctcaagtggccagcagccggcttcgagctcccagcctttgatccgaggactgtctcccgctcagggcctctctgcctccccgagtccagggccctcctgagcgccagcccggaggtggttgtcgcagtgggattccctggggccgggaagttcacctttttaaagaagcaccacgagaaggacggaaatatccacgtaaaacaagggacacgctaagctcctggcaacgctgagagaccacatgtggaaacgcccaaaaaacaaggtaaaagggtcgacaacgtacaacaataaccccaaaccccaagagccgagccaggaacatcacaatgagccccaagccacagggcttcacctgccaattgatttctttttaaccgtaa

SEQ ID NO: 424404 - DNA, 1711 bp, Homo sapiens
tctgacgttctcgatcggcccagtcttctcgtcccaggtcgctgcccgagtggcgcctatggtgagtcgtatcatttgcttaggcgctgagccgccctgtgttgcgagcgttcgctgcaactgttcactagctgtctagacttggcgatctctctgtgtccgtgagccttgacgtatctgtggatgctgacgataacttgggccggaaacgtagccttacagaagatataatggctctgagtgtaaatattctgatacccagagatgtatagactgtgtaaacactatgctgacttatgctctgtctgctagccgagatccgcgttaacttgaggtcctgagtgtatgagggctacttatacacatgagcgtactgactgtatttggtcaatggcctccacccactgaccctgcgctgggaagagacccgcacaccagaatcccagccagatactccgcctggcacccctctggtgtcccaagatgagaagagagatgctgagctgccgaagaagcgtatgcggaagtcaaaccccggctgggagaacttggagaagttgctagtgttcaccgcagctggggtgaaaccccagggcaaggtggctggctttgatctggacgggacgctcatcaccacacgctctgggaaggtctttcccactggccccagtgactggaggatcttgtacccagagattccccgtaagctccgagagctggaagccgagggctacaagctggtgatcttcaccaaccagatgagcatcgggcgcgggaagctgccagccgaggagttcaaggccaaggtggaggctgtggtggagaagctgggggtccccttccaggtgctggtggccacgcacgcaggcttgtaccggaagccggtgacgggcatgtgggaccatctgcaggagcaggccaacgacggcacgcccatatccatcggggacagcatctttgtgggagacgcagccggacgcccggccaactgggccccggggcggaagaagaaagacttctcctgcgccgatcgcctgtttgccctcaaccttggcctgcccttcgccacgcctgaggagttctttctcaagtggccagcagccggcttcgagctcccagcctttgatccgaggactgtctcccgctcagggcctctctgcctccccgagtccagggccctcctgagcgccagcccggaggtggttgtcgcagtgggattccctggggccgggaagtccacctttctcaagaagcacctcgtgtcggccggatatgtccacgtgaacagggacacgctaggctcctggcagcgctgtgtgaccacgtgtgagacagccctgaagcaagggaaacgggtcgccatcgacaacacaaacccagacgccgcgagccgcgccaggtacgtccagtgtgcccgagccgcgggcgtcccctgccgctgcttcctcttcaccgccactctggagcaggcgcgccacaacaaccggtttcgagagatgacggactcctctcatatccccgtgtcagacatggtcatgtatggctacaggaagcagttcgaggccccaacgctggctgaaggcttctctgccatcctggagatcccgttccggctatgggtggagccgaggctggggcggctgtactgccagttctccgagggctgagccccgcccagctcccctccacaataaacgctgtttctccttga

SEQ ID NO: 424405 - DNA, 1088 bp, Homo sapiens
  misc_feature (54)..(54): n is a, c, g, or t
  misc_feature (64)..(64): n is a, c, g, or t
ttgatctgacggacgttatcacaaaggtgtggaagttttcccactgccccagtnactggaggtntgtaccaagagattccccgtaagtccgagagctggaagcgaggctacaagctggtgatcttcaccaaccagatgagcatcgggcgcgggaagctgccagccgaggagttcaaggccaaggtggaggctgtggtggagaagctgggggtccccttccaggtgctggtggccacgcacgcaggcttgtaccggaagccggtgacgggcatgtgggaccatctgcaggagcaggccaacgacggcacgcccatatccatcggggacagcatctttgtgggagacgcagccggacgcccggccaactgggccccggggcggaagaagaaagacttctcctgcgccgatcgcctgtttgccctcaaccttggcctgcccttcgccacgcctgaggagttctttctcaagtggccagcagccggcttcgagctcccagcctttgatccgaggactgtctcccgctcagggcctctctgcctccccgagtccagggccctcctgagcgccagcccggaggtggttgtcgcagtgggattccctggggccgggaagtccacctttctcaagaagcacctcgtgtcggccggatatgtccacgtgaacagggacacgctaggctcctggcagcgctgtgtgaccacgtgtgagacagccctgaagcaagggaaacgggtcgccatcgacaacacaaacccagacgccgcgagccgcgccaggtacgtccagtgtgcccgagccgcgggcgtcccctgccgctgcttcctcttcaccgccactctggagcaggcgcgccacaacaaccggtttcgagagatgacggactcctctcatatccccgtgtcagacatggtcatgtatggctacaggaagcagttcgaggccccaacgctggctgaaggcttctctgccatcctggagatcccgttccggctatgggtggagccgaggctggggcggctgtactgccagttctccgagggctgagccccgcccagctcccctccacaataaacgctgtttctccttga

SEQ ID NO: 424406 - DNA, 450 bp, Homo sapiens
gcatagttcctgacatgcagttagcacccaaagctttgctcctgcttttattttcacggttattagcccaccgaggtggtgaaggccaggggaagaaggaggctgggtaagacattaacccccattttaaagactgtaatcctggggctggcgtcataaggagtaacaggagacagtaaggttaagatgtcgggccccactcagaggcatcacggatgcttgagatggaggtgctctgtgactcggtttccccatctgtgagatggcagtgataacaccctgcctggcagggttggtgtgagtcagcctgtgagtgaggagggtcagaggtatcacagtgctgctgtttgtctttccttggtgacaccaggtggctggctttgatctggacgggacgctcatcaccacacgctctgggaaggtctttcccactggccccagtgactggag

SEQ ID NO: 424407 - DNA, 361 bp, Homo sapiens
gacccctgacccaggttacggaccggaagtgctccagaactcaaggtgagcggggcctgagctggagggggtgtggcctgctgcaaaagcgggaacaatccagagggacgcttggctgctacgcgggattgcagtggtgcagccagccccgaagtcggaaggtgctctctagggagtacaggaagataaagtttgtgcttgatttagaattagctagatcctttgggggagaggggatcgagccgatttcgggaggatgttcactgcgcggatgatgctcaggccatcgagaaatccagaaacaggcgacgaccttcgtcaagagaaaaatgatcctgtggagaaaagtaaatgtcgctag

SEQ ID NO: 424408 - DNA, 1632 bp, Homo sapiens
ggggacgagtcatttcaatcggccgagggaccgaccgccgccggccgggttgcaggcggggcacctcgggcaggacctccctggtcggaagtggccgtgagcccaagccgcggtcccgggccggcacccaggatgggcgaggtggaggccccgggccgcttgtggctcgagagcccccctgggggagcgccccccatcttcctgccctcggacgggcaagccctggtcctgggcaggggacccctgacccaggttacggaccggaagtgctccagaactcaagtggagctggtcgcagatcctgagacccggacagtggcagtgaaacagctgggagttaacccctcaactaccgggacccaggagttgaagccggggttggagggctctctgggggtgggggacacactgtatttggtcaatggcctccacccactgaccctgcgctgggaagagacccgcacaccagaatcccagccagatactccgcctggcacccctctggtgtcccaagatgagaagagagatgctgagctgccgaagaagcgtatgcggaagtcaaaccccggctgggagaacttggagaagttgctagtgttcaccgcagctggggtgaaaccccagggcaaggtggctggctttgatctggacgggacgctcatcaccacacgctctgggaaggtctttcccactggccccagtgactggaggatcttgtacccagagattccccgtaagctccgagagctggaagccgagggctacaagctggtgatcttcaccaaccagatgagcatcgggcgcgggaagctgccagccgaggagttcaaggccaaggtggaggctgtggtggagaagctgggggtccccttccaggtgctggtggccacgcacgcaggcttgtaccggaagccggtgacgggcatgtgggaccatctgcaggagcaggccaacgacggcacgcccatatccatcggggacagcatctttgtgggagacgcagccggacgcccggccaactgggccccggggcggaagaagaaagacttctcctgcgccgatcgcctgtttgccctcaaccttggcctgcccttcgccacgcctgaggagttctttctcaagtggccagcagccggcttcgagctcccagcctttgatccgaggactgtctcccgctcagggcctctctgcctccccgagtccagggccctcctgagcgccagcccggaggtggttgtcgcagtgggattccctggggccgggaagtccacctttctcaagaagcacctcgtgtcggccggatatgtccacgtgaacagggtacgtccagtgtgcccgagccgcgggcgtcccctgccgctgcttcctcttcaccgccactctggagcaggcgcgccacaacaaccggtttcgagagatgacggactcctctcatatccccgtgtcagacatggtcatgtatggctacaggaagcagttcgaggccccaacgctggctgaaggcttctctgccatcctggagatcccgttccggctatgggtggagccgaggctggggcggctgtactgccagttctccgagggctgagccccgcccagctcccctccacaataaacgctgtttctccttga

SEQ ID NO: 424409 - DNA, 1825 bp, Homo sapiens
ggggacgagtcatttcaatcggccgagggaccgaccgccgccggccgggttgcaggcggggcacctcgggcaggacctccctggtcggaagtggccgtgagcccaagccgcggtcccgggccggcacccaggatgggcgaggtggaggccccgggccgcttgtggctcgagagcccccctgggggagcgccccccatcttcctgccctcggacgggcaagccctggtcctgggcaggggacccctgacccaggttacggaccggaagtgctccagaactcaagcctgaagcaggccacactccccagaaatgagggacccaatcacacaaggatgcaaatcctgactccacccctccaatcctcagtggagctggtcgcagatcctgagacccggacagtggcagtgaaacagctgggagttaacccctcaactaccgggacccaggagttgaagccggggttggagggctctctgggggtgggggacacactgtatttggtcaatggcctccacccactgaccctgcgctgggaagagacccgcacaccagaatcccagccagatactccgcctggcacccctctggtgtcccaagatgagaagagagatgctgagctgccgaagaagcgtatgcggaagtcaaaccccggctgggagaacttggagaagttgctagtgttcaccgcagctggggtgaaaccccagggcaaggtggctggctttgatctggacgggacgctcatcaccacacgctctgggaaggtctttcccactggccccagtgactggaggatcttgtacccagagattccccgtaagctccgagagctggaagccgagggctacaagctggtgatcttcaccaaccagatgagcatcgggcgcgggaagctgccagccgaggagttcaaggccaaggtggaggctgtggtggagaagctgggggtccccttccaggtgctggtggccacgcacgcaggcttgtaccggaagccggtgacgggcatgtgggaccatctgcaggagcaggccaacgacggcacgcccatatccatcggggacagcatctttgtgggagacgcagccggacgcccggccaactgggccccggggcggaagaagaaagacttctcctgcgccgatcgcctgtttgccctcaaccttggcctgcccttcgccacgcctgaggagttctttctcaagtggccagcagccggcttcgagctcccagcctttgatccgaggactgtctcccgctcagggcctctctgcctccccgagtccagggccctcctgagcgccagcccggaggtggttgtcgcagtgggattccctggggccgggaagtccacctttctcaagaagcacctcgtgtcggccggatatgtccacgtgaacagggacacgctaggctcctggcagcgctgtgtgaccacgtgtgagacagccctgaagcaagggaaacgggtcgccatcgacaacacaaacccagacgccgcgagccgcgccaggtacgtccagtgtgcccgagccgcgggcgtcccctgccgctgcttcctcttcaccgccactctggagcaggcgcgccacaacaaccggtttcgagagatgacggactcctctcatatccccgtgtcagacatggtcatgtatggctacaggaagcagttcgaggccccaacgctggctgaaggcttctctgccatcctggagatcccgttccggctatgggtggagccgaggctggggcggctgtactgccagttctccgagggctgagccccgcccagctcccctccacaataaacgctgtttctccttga

SEQ ID NO: 424410 - DNA, 1915 bp, Homo sapiens
ggggacgagtcatttcaatcggccgagggaccgaccgccgccggccgggttgcaggcggggcacctcgggcaggacctccctggtcggaagtggccgtgagcccaagccgcggtcccgggccggcacccaggatgggcgaggtggaggccccgggccgcttgtggctcgagagcccccctgggggagcgccccccatcttcctgccctcggacgggcaagccctggtcctgggcaggggacccctgacccaggttacggaccggaagtgctccagaactcaagtggagctggtcgcagatcctgagacccggacagtggcagtgaaacagctgggagttaacccctcaactaccgggacccaggagttgaagccggggttggagggctctctgggggtgggggacacactgtatttggtcaatggcctccacccactgaccctgcgctgggaagagacccgcacaccagaatcccagccagatactccgcctggcacccctctggtgtcccaagatgagaagagagatgctgagctgccgaagaagcgtatgcggaagtcaaaccccggctgggagaacttggagaagttgctagtgttcaccgcagctggggtgaaaccccagggcaaggtggctggctttgatctggacgggacgctcatcaccacacgctctgggaaggtctttcccactggccccagtgactggaggatcttgtacccagagattccccgtaagctccgagagctggaagccgagggctacaagctggtgatcttcaccaaccagatgagcatcgggcgcgggaagctgccagccgaggagttcaaggccaaggtggaggctgtggtggagaagctgggggtccccttccaggtgctggtggccacgcacgcaggcttgtaccggaagccggtgacgggcatgtgggaccatctgcaggagcaggccaacgacggcacgcccatatccatcggggacagcatctttgtgggagacgcagccggacgcccggccaactgggccccggggcggaagaagaaagacttctcctgcgccgatcgcctgtttgccctcaaccttggcctgcccttcgccacgcctgaggagttctttctcaagtggccagcagccggcttcgagctcccagcctttgatccgaggactgtctcccgctcagggcctctctgcctccccgagtccagggccctcctgagcgccagcccggaggtggttgtcgcagtgggattccctggggccgggaagtccacctttctcaagaagcacctcgtgtcggccggatatgtccacgtgaacagggacacgctaggctcctggcagcgctgtgtgaccacgtgtgagacagccctgaagcaagggaaacgggtcgccatcgacaacacaaacccagacgccgcgagccgcgccaggtagcgtgaccgcggggccgtaggtggcctgcggcggggtgggcggggcctgcacatccagctccttcccccacaggtacgtccagtgtgcccgagccgcgggcgtcccctgccgctgcttcctcttcaccgccactctggagcaggcgcgccacaacaaccgggtgagcccgctcagcccggacaccccccgggctgcaccccctgacccccctcctcccctgacccctgggcctgccgcccctctgatgttccccacagtttcgagagatgacggactcctctcatatccccgtgtcagacatggtcatgtatggctacaggaagcagttcgaggccccaacgctggctgaaggcttctctgccatcctggagatcccgttccggctatgggtggagccgaggctggggcggctgtactgccagttctccgagggctgagccccgcccagctcccctccacaataaacgctgtttctccttga

SEQ ID NO: 424411 - DNA, 1980 bp, Homo sapiens
ggggacgagtcatttcaatcggccgagggaccgaccgccgccggccgggttgcaggcggggcacctcgggcaggacctccctggtcggaagtggccgtgagcccaagccgcggtcccgggccggcacccaggatgggcgaggtggaggccccgggccgcttgtggctcgagagcccccctgggggagcgccccccatcttcctgccctcggacgggcaagccctggtcctgggcaggggacccctgacccaggttacggaccggaagtgctccagaactcaagtggagctggtcgcagatcctgagacccggacagtggcagtgaaacagctgggagttaacccctcaactaccgggacccaggagttgaagccggggttggagggctctctgggggtgggggacacactgtatttggtcaatggcctccacccactgaccctgcgctgggaagagacccgcacaccagaatcccagccagatactccgcctggcacccctctggtgtcccaagatgagaagagagatgctgagctgccgaagaagcgtatgcggaagtcaaaccccggctgggagaacttggagaagttgctagtgttcaccgcagctggggtgaaaccccagggcaaggtggctggctttgatctggacgggacgctcatcaccacacgctctgggaaggtctttcccactggccccagtgactggaggatcttgtacccagagattccccgtaagctccgagagctggaagccgagggctacaagctggtgatcttcaccaaccagatgagcatcgggcgcgggaagctgccagccgaggagttcaaggccaaggtggaggctgtggtggagaagctgggggtccccttccaggtgctggtggccacgcacgcaggcttgtaccggaagccggtgacgggcatgtgggaccatctgcaggagcaggccaacgacggcacgcccatatccatcggggacagcatctttgtgggagacgcagccggacgcccggccaactgggccccggggcggaagaagaaagacttctcctgcgccgatcgcctgtttgccctcaaccttggcctgcccttcgccacgcctgaggagttctttctcaagtggccagcagccggcttcgagctcccagcctttgatccgaggactgtctcccgctcagggcctctctgcctccccgagtccagggccctcctgagcgccagcccggaggtggttgtcgcagtgggattccctggggccgggaagtccacctttctcaagaagcacctcgtgtcggccggatatgtccacgtgaacagggtatgaccaggcttttgccgccccaaatctattataaagttcccatctccacctctcaactggtttggggcggctttcctccatcattgcctccccgtccccgctcggggtcttctctccccctgggtctgccgatctgtttgtgacctctcgtgtccccaggacacgctaggctcctggcagcgctgtgtgaccacgtgtgagacagccctgaagcaagggaaacgggtcgccatcgacaacacaaacccagacgccgcgagccgcgccaggtagcgtgaccgcggggccgtaggtggcctgcggcggggtgggcggggcctgcacatccagctccttcccccacaggtacgtccagtgtgcccgagccgcgggcgtcccctgccgctgcttcctcttcaccgccactctggagcaggcgcgccacaacaaccggtttcgagagatgacggactcctctcatatccccgtgtcagacatggtcatgtatggctacaggaagcagttcgaggccccaacgctggctgaaggcttctctgccatcctggagatcccgttccggctatgggtggagccgaggctggggcggctgtactgccagttctccgagggctgagccccgcccagctcccctccacaataaacgctgtttctccttga

SEQ ID NO: 424412 - DNA, 1531 bp, Homo sapiens
ggtggggcctaagggtctgatagtggtggagaagggctgatttttccgctgggtatttgattggaggaagctcccggtgggggcggagccagtcccagctcctccctctctttctgcagctgggagttaacccctcaactaccgggacccaggagttgaagccggggttggagggctctctgggggtgggggacacactgtatttggtcaatggcctccacccactgaccctgcgctgggaagagacccgcacaccagaatcccagccagatactccgcctggcacccctctggtgtcccaagatgagaagagagatgctgagctgccgaagaagcgtatgcggaagtcaaaccccggctgggagaacttggagaagttgctagtgttcaccgcagctggggtgaaaccccagggcaaggtggctggctttgatctggacgggacgctcatcaccacacgctctgggaaggtctttcccactggccccagtgactggaggatcttgtacccagagattccccgtaagctccgagagctggaagccgagggctacaagctggtgatcttcaccaaccagatgagcatcgggcgcgggaagctgccagccgaggagttcaaggccaaggtggaggctgtggtggagaagctgggggtccccttccaggtgctggtggccacgcacgcaggcttgtaccggaagccggtgacgggcatgtgggaccatctgcaggagcaggccaacgacggcacgcccatatccatcggggacagcatctttgtgggagacgcagccggacgcccggccaactgggccccggggcggaagaagaaagacttctcctgcgccgatcgcctgtttgccctcaaccttggcctgcccttcgccacgcctgaggagttctttctcaagtggccagcagccggcttcgagctcccagcctttgatccgaggactgtctcccgctcagggcctctctgcctccccgagtccagggccctcctgagcgccagcccggaggtggttgtcgcagtgggattccctggggccgggaagtccacctttctcaagaagcacctcgtgtcggccggatatgtccacgtgaacagggacacgctaggctcctggcagcgctgtgtgaccacgtgtgagacagccctgaagcaagggaaacgggtcgccatcgacaacacaaacccagacgccgcgagccgcgccaggtacgtccagtgtgcccgagccgcgggcgtcccctgccgctgcttcctcttcaccgccactctggagcaggcgcgccacaacaaccggtttcgagagatgacggactcctctcatatccccgtgtcagacatggtcatgtatggctacaggaagcagttcgaggccccaacgctggctgaaggcttctctgccatcctggagatcccgttccggctatgggtggagccgaggctggggcggctgtactgccagttctccgagggctgagccccgcccagctcccctccacaataaacgctgtttctccttga

SEQ ID NO: 424413 - DNA, 188 bp, Homo sapiens
agcagctgcagaaggccctgagacagccccacagtcctttgcctccaggaaagacctcccgccaccaggctctaggaacaatcctagactttctacctaatttgtactagcttattccagagtcgtatagcctaacagctgggaagagcctcctgagtttctcctgctaatatacactgtcatttggt

SEQ ID NO: 424414 - DNA, 579 bp, Homo sapiens
  misc_feature (6)..(6): n is a, c, g, or t
gttacnattatccgctcctatgggatttgcctcgggccaagattcgcacgagctgaaaggccatatgcgtgtgaggtatgtgggaaattatttggtaataagaactgcgtgactatacatcagaggattcacactggagaaaggccgtatgaattgcagtgaatatgggaaatcgtttgctgaaacatcccgtctcgttaaacacaggagagttcatactggagaaaggacttatgagtgctgtcaatctgggaaacatcagaatgtctgctctccttggtcttaagagacttcgcattggaacggagtctcattctgtcacccactgcactctagcctgggcaaaagagcaaggccctgcctcaaaaaaaacaaaacttttttcttcataaactacagtttatataggcaaaactttcagtactaagcaattttagtctctgcaggctcttgtcttgaattaatacaacttttgttaattctcttatgaagttaaatcttcctgcttgtatgcaacttatatgttgaaatttttttgtacaaaagattcatacatctttcctgtttgaaattatttta

SEQ ID NO: 424415 - DNA, 821 bp, Homo sapiens
gcagtggtgcaatcttggctcactgcaacttgggcctcccaggttcaagtgattccccctcagcctcctaaagtgctgggattacaggcatctgccacggcactcggcttatccctagaaatcctatgatagcatgatgtataggcacctaaaggcatggcacttgagaaatgtgaataagattgtaagttacaaatagcaaggtacagtcagatgttaacagtctcagcccctaaatgtcaccttgtattacagcatgttatataagcacatacaggcacatacatgaaatagtgatacttcattctcagtaatatttttcatccttctcactggaaagatctttgatgatttttaatcaacataggagtttcaatgatatctagaagtttaaaagggctcgttcaaacaaattatgaccatacaccctgaagagtatgtgtctgtctcttgtggtgtaaatttttattttattacacccaattatgttcccacaaaacctttataattgggaaattaaggagccttccttggaaatggaggttgcaatcagctgagatggtaccactgcactctagcctgggcaaaagagcaaggccctgcctcaaaaaaaacaaaacttttttcttcataaactacagtttatataggcaaaactttcagtactaagcaattttagtctctgcaggctcttgtcttgaattaatacaacttttgttaattctcttatgaagttaaatcttcctgcttgtatgcaacttatatgttgaaatttttttgtacaaaagattcatacatctttcctgtttgaaattatttta

SEQ ID NO: 424416 - DNA, 836 bp, Homo sapiens
ctggagaaaagccatatgagtgtgaggattgtcagaaagtttttagcaagaaggaccacctcattgcacaccagagagttcacactggagaaaggccatatgaatgcagtgattgtgggaagtcatctacccacagctctgcattctgtgttcataagagagttcacactggtcacaccaccttatgagtgcagtgaatgtgggaaatcctttgctgaaactttcagtctcattaaacacaggagagttcacactggagtaaggtcttgtgattgcagcaaatgtgggaaaaaagttacctgaaggtcttttctccttgaatatcagagagttcacactagacaaataaaatacatttgggcaattttgtagccacacctctttgctccttcaagatcagagttaacactggatcagggccttaccagtgtgacatgtgagatatttatgtagaaatctagcttcataacacacaggagacttcccactgcagaaatgccttttgaatgtaatgaatgcaagaaagccttcagcctttttattggagcctcaaacattgacatgagaaaaacaccatagatgtatatggaatgttatttctttttcaatgtaaccctttgagagtgccacctacctagattgaatgtcatttattgagcatctgcaaaagttccaagtgtgtggcagctacagtgcatttttcactatacccaggtaccttgctagattttttttgagacaggttgtcactgtgtcgctcaggatggcgtgcagtggtgtgttcacatttcactgcacccttgatctgggcttaagtgattctgttgcctcggcct

SEQ ID NO: 424417 - DNA, 1393 bp, Homo sapiens
atttttatttatttattttgagacggagtcttgctcttgtcacccaggctccatctcaaaaaaaaaaaaaaaggaaatagttttaagttctcccatccaagtagtaaccaggcccgaccctgcttagcttccgagatcagacgagatcaggcgcgttcagggtggtatggccatagacggaaatagttttaagttctcaacttcaactgaatggttagtggtcagttttgtaatcacaatgacattcttgcaaacaaatacaatgtgtggcatctctctttgatatactggatagttaaaaattgttttaaagttttgcctaatattttgcgatttatctcaatgtaatctgtataagtagtaaaattatagatgactcctttccttttttttttttttttaagacaaggatctagctctgttgcctaggctggagggcaatggcatgatcacagcttactgcaacctctgctcctgcattcaagcgattctcttgcctcagcctcccgagtagctgggcctataggttccctccaccacgcccacctaatttttgtatttttagtagagatgggctttcactacgttagccaggctggtctcaaacttgtgacctcgtgatccacccccctcagcctcctaaagtgctgggattacaggcatctgccacggcactcggcttatccctagaaatcctatgatagcatgatgtataggcacctaaaggcatggcacttgagaaatgtgaataagattgtaagttacaaatagcaaggtacagtcagatgttaacagtctcagcccctaaatgtcaccttgtattacagcatgttatataagcacatacaggcacatacatgaaatagtgatacttcattctcagtaatatttttcatccttctcactggaaagatctttgatgatttttaatcaacataggagtttcaatgatatctagaagtttaaaagggctcgttcaaacaaattatgaccatacaccctgaagagtatgtgtctgtctcttgtggtgtaaatttttattttattacacccaattatgttcccacaaaacctttataattgggaaattaaggagccttccttggaaatggaggttgcaatcagctgagatggtaccactgcactctagcctgggcaaaagagcaaggccctgcctcaaaaaaaacaaaacttttttcttcataaactacagtttatataggcaaaactttcagtactaagcaattttagtctctgcaggctcttgtcttgaattaatacaacttttgttaattctcttatgaagttaaatcttcctgcttgtatgcaacttatatgttgaaatttttttgtacaaaagattcatacatctttcctgtttgaaattatttta

SEQ ID NO: 424418 - DNA, 1281 bp, Homo sapiens
aattttgattccaaaaggtcctgttagaaagaaaagagagaacatatttatatttacctccctcccctttatacttattatatttaccctcccaaattgtgattgaactttgagccatagctaatttccataatcctgaatgttcctgtcctatggcaggagatatcatttttggaataggggtgataatgccaccagggctccatataataggaacatcagcttccgtctgaatgtaccgtgtatggttctctttccaatgagtccatcagcttattttataagaaggcccttcagtgcaatttttcttaaccccagccttacttgctacacaatttccccaatgccaagcgtccacaccttcaaaccaaactctattttgtttacattcgagtttgtctggtcagaactgctgagtttcagggctggaatggttatattttaaactttgccctgaaatcatatataaagtagcctgtgatttattttttccagggattactgccaaccatacttgtgtgccaatttgtaagcatccagcagcaggtcctaggcatattggaggatatttatatcctattgatatattcattttcatcccttcctcattaggatgcatcggcactctgttatctatgggctcaggcatcgaggttctgtcattgttgtacacctcaataatagggtccatccaactcacagacctaattaaaggaggaaatgggacataagtccaataagtaaaattttgagttgcttttacagtagggaggcttaccgccacagtaagtaccaccatcatagccaccattaggttactagttgtttttgatttgttctgtgctctcagattgtcctctgccatctgtgccagtttcctgatttgtccccatgttggagggtctgcctggtgagtattcttggtcttttcctttgtctctgagattttcattcatgccatcactcgtatagggagttctggctcttcccagagtcctctcttcctggtgtggctcatgatagaccttcagatgtttggtgggcacccacagaggcacctgattgtcacttggagagacagaagcaaatcctcttccccatgtaattatttttcctttttcccaactctttgtatgtgcatccctccactgtatatcttgtctggcatttttattttccttttgtcctgttaagtgttgttcagctgctgtcatgggctgatccttttgtaaatttaaaaaatttaatgttaataaagcgaggtgtaattgtatatgtagg

SEQ ID NO: 424419 - DNA, 1707 bp, Homo sapiens
gtatcggtgacgcgggtgtttccccagtttgtggcccctgagtgctggggggggaccgcggtgactgaacctagaaggtggagaggaatcgtcctcggtgcccagaggcggctctgcagccccgtgacggcgaccactgctcccgggccgtgcttccccaagtagtccgatggcagcggctgcgccgaggcgcccgactcagcagggcactgtgacctttgaagatgtggctgtgaacttttcccaggaggagtggtgtcttcttagtgaggctcagaggtgcttgtaccgtgatgtgatgctagagaacctggctctcatatcctcgctgggttgttggtgtggatcaaaagatgaggaggcaccttgtaagcagagaatttctgtacaaagagagtctcagagcaggactcctagggcaggtgtttctcctaagaaggctcacccctgtgaaatgtgtggcctcatcttggaggatgtttttcactttgctgaccaccaggaaactcatcacaagcagaagctgaacaggagtggagcatgtggaaaaaacttggatgacactgcataccttcatcagcaccagaagcagcatattggagagaaattctacagaaagagtgtcagagaagcatcgtttgtaaagaaacgtaagctcagggtgtcacaggagccatttgtcttccgcgagtttgggaaggacgttctgcccagttcaggattgtgccaagaagcagctgctgtagagaagacagacagtgaaactatgcatggcccaccctttcaggagggaaaaactaattacagttgtggaaaacgcacaaaagccttcagcaccaaacactcagttattccacaccagaaacttttcactagagatggatgttatgtgtgcagtgattgtggaaaatcctttagcagatatgtcagcttcagtaatcatcagcgagatcacactgcaaaaggaccttatgattgtggagagtgtgggaaatcttatagtcgaaagagcagccttattcaacatcagcgagtccacactggaaagacagcttatccctgtgaggagtgcgggaaatcttttagtcagaagggcagccttattagccatcagcgtgttcacactggagaaaggccttatgagtgtagagaatgtgggaaaaaagttacctgaaggtcttttctccttgaatatcagagagttcacactagacaaataaaatacatttgggcaattttgtagccacacctctttgctccttcaagatcagagttaacactggatcagggccttaccagtgtgacatgtgagatatttatgtagaaatctagcttcataacacacaggagacttcccactgcagaaatgccttttgaatgtaatgaatgcaagaaagccttcagcctttttattggagcctcaaacattgacatgagaaaaacaccatagatgtatatggaatgttatttctttttcaatgtaaccctttgagagtgccacctacctagattgaatgtcatttattgagcatctgcaaaagttccaagtgtgtggcagctacagtgcatttttcactatacccaggtaccttgctagattttttttgagacaggttgtcactgtgtcgctcaggatggcgtgcagtggtgtgttcacatttcactgcacccttgatctgggcttaagtgattctgttgcctcggcct

SEQ ID NO: 424420 - DNA, 614 bp, Homo sapiens
gtatcggtgacgcgggtgtttccccagtttgtggcccctgagtgctggggggggaccgcggtgactgaacctagaaggtggagaggaatcgtcctcggtgcccagaggcggctctgcagccccgtgacggcgaccactgctcccgggccgtgcttccccaagtagtccgatggcagcggctgcgccgaggcgcccgactcagcagggcactgtgacctttgaagatgtggctgtgaacttttcccaggaggagtggtgtcttcttagtgaggctcagaggtgcttgtaccgtgatgtgatgctagagaacctggctctcatatcctcgctggattgtcctctgccatctgtgccagtttcctgatttgtccccatgttggagggtctgcctggataagccgtatctttttctgaggcctgcagcattaagatgggttaaggaatggaacgtttgtgcatcggcaaaagctgcagaaaccagtgcatccgccctttgattaagttaaaaggaccagggaggttagtatgtgctctcatatgagtaatatagaaaggggaatgtctttgttgtactgcttgttgtaaagaatgaaataaaagattaagttgttcat

SEQ ID NO: 424421 - DNA, 813 bp, Homo sapiens
ggtggtcggacacaattttgattccaaaaggtcctgttagaaagaaaagagagaacatatttatatttacctccctcccctttatacttattatatttaccctcccaaattgtgattgaactttgagccatagctaatttccataatcctgaatgttcctgtcctatggcaggagatatcatttttggaataggggtgataatgccaccagggctccatataataggaacatcagcttccgtctgaatgtaccgtgtatggttctctttccaatgagtccatcagcttattttataagaaggcccttcagtgcaatttttcttaaaaatccccttaggggaccagtcaatgacgattccataggaattattttgtagcaccccagccttacttgctacacaatttccccaatgccaagcgtccacaccttcaaaccaaactctattttgtttacattcgagtttgtctggtcagaactgctgagtttcagggctggaatggttatattttaaactttgccctgaaatcatatataaagtagcctgtgatttattttttccagggattactgccaaccatacttgtgtgccaatttgtaagcatccagcagcaggtcctaggcatattggaggatatttatatcctattgatatattcattttcatcccttcctcattaggatgcatcggcactctgttatctatgggctcaggcatcgaggttctgtcattgttgtacacctcaataatagggtccatccaactcacagacctaattaaaggaggaaatgggacataagtccaataagtaaaa

SEQ ID NO: 424422 - DNA, 349 bp, Homo sapiens
aagccttcagcctttttattggagcctcaaacattgacatgagaaaaacaccatagatgtatatggaatgttatttctttttcaatgtaaccctttgagagtgccacctacctagattgaatgtcatttattgagcatctgcaaaagttccaagtgtgtggcagctacagtgcatttttcactatacccaggtaccttgctagattttttttgagacaggttgtcactgtgtcgctcaggatggcgtgcagtggtgtgttcacatttcactgcacccttgatctgggcttaagtgattctgttgcctcggcctcctgagtagctgaaaccacaggcatgcactaccatg

SEQ ID NO: 424423 - DNA, 528 bp, Homo sapiens
gcagtggtgcaatcttggctcactgcaacttgggcctcccaggttcaagtgattctcctacctcagcctcccaaggagctgagattacgagtacaccacaccatgcccggccaaatacttggttttcagtaccacaagagctatgagctggttatccacttcatgtggaatcataagtgtccccaagtgacaatacgtatagattgctgggcagtgaaacagttaagatgtcaccgtagcttgctttctattcaacatctttctaagattaccttactatttcttttgttccaagtttgtatttcctcagagttctcacatatggaaaggatacacactttgtagaaacaagaactttatgttatccaagttctgggatagccatgagctccaattacctcagagctccgagtcctctactcagtacccgttgagatttatgtgttctgaggcttttgtcttctagctacttacttcattctccatgggtaacgtcattcatccacattaactaatttcctcactcca

SEQ ID NO: 424424 - DNA, 1538 bp, Homo sapiens
gtatcggtgacgcgggtgtttccccagtttgtggcccctgagtgctggggggggaccgcggtgactgaacctagaaggtggagaggaatcgtcctcggtgcccagaggcggctctgcagccccgtgacggcgaccactgctcccgggccgtgcttccccaagtagtccgatggcagcggctgcgccgaggcgcccgactcagcagggcactgtgacctttgaagatgtggctgtgaacttttcccaggaggagtggtgtcttcttagtgaggctcagaggtgcttgtaccgtgatgtgatgctagagaacctggctctcatatcctcgctgggttgttggtgtggatcaaaagatgaggaggcaccttgtaagcagagaatttctgtacaaagagagtctcagagcaggactcctagggcaggtgtttctcctaagaaggctcacccctgtgaaatgtgtggcctcatcttggaggatgtttttcactttgctgaccaccaggaaactcatcacaagcagaagctgaacaggagtggagcatgtggaaaaaacttggatgacactgcataccttcatcagcaccagaagcagcatattggagagaaattctacagaaagagtgtcagagaagcatcgtttgtaaagaaacgtaagctcagggtgtcacaggagccatttgtcttccgcgagtttgggaaggacgttctgcccagttcaggattgtgccaagaagcagctgctgtagagaagacagacagtgaaactatgcatggcccaccctttcaggagggaaaaactaattacagttgtggaaaacgcacaaaagccttcagcaccaaacactcagttattccacaccagaaacttttcactagagatggatgttatgtgtgcagtgattgtggaaaatcctttagcagatatgtcagcttcagtaatcatcagcgagatcacactgcaaaaggaccttatgattgtggagagtgtgggaaatcttatagtcgaaagagcagccttattcaacatcagcgagtccacactggaaagacagcttatccctgtgaggagtgcgggaaatcttttagtcagaagggcagccttattagccatcagcgtgttcacactggagaaaggccttatgagtgtagagaatatgggaaatcttttggtcaaaagggtaacctcattcaacatcagcaaggtcacactggagagagagcttatcactgtggggaatgtgggaaatcttttcgtcagaagttctgctttattaaccatcagcgtgttcacactggagaaaggccttacaagtgtggagaatgtggaaaatcttttggtcaaaagggcaacctcgttcaacatcagcgaggtcatactggagaaaggccctatgagtgcaaggaatgtgggaaatcatttaggtacagatcccacctcactgaacaccagagacttcacactggggaaagaccttacaattgtagggaatgtgggaaattatttaacaggaagtatcatcttctcgttcatgagagag

SEQ ID NO: 424425 - DNA, 527 bp, Homo sapiens
tggagaatgtggaaaatcttttggtcaaaagggcaacctcgttcaacatcagcgaggtcatactggagaaaggccctatgagtgcaaggaatgtgggaaatcatttaggtacagatcccacctcactgaacaccagagacttcacactggggaaagaccttacaattgtagggaatgtgggaaattatttaacaggaagtatcatcttctcgttcatgagagagttcacactggagaaaggccatatgcgtgtgaggtatgtgggaaattatttggtaataagaactgcgtgactatacatcagaggattcacactggagaaaggccgtatgaatgcaatgaatgtgggaaatcatttctttccagctctgcgcttcatgttcataaaagagttcattctggacaaaagccttataagtgcagtgaatgtggaaaatcctttgctgaatgttccagtctcattaaacacaggagaattcacactggagaaaggccttatgaatgtaccaaatgtggaaaaacatttc

SEQ ID NO: 424426 - DNA, 2977 bp, Homo sapiens
ggcacgaggaggtaggctgcatccgcccctctgtctgtctgtcaacatcgccctaggaccgagctgctgggtgccccggaagaagggcaggcaggaaggggaggggcagtgaggttggctccccccaccacctcaccctggtgcccccagcccagcccaagacaccagggcatttgctgacatctgaggcccttcccaggaagacatggcctcgttcttggtgtggccactgaggacggcgctgagagggggaaagtcatgggcaggacctggtgtgggatgtggaggagacggcgcccggggaggaggagcgctgtgcccaggtggcctcacttgtcatctcaaagtggcgtcgaaccccctgacaggtggacgggaacccccggctggccctccagagaccaggaggcccctggctcaatgatgccacctgcagctgcccaaccctccgcccatggtgcccttgttccacctgccaccgctcatgaacctgtggatcacccagctctgcactggcttgcctgctgctgctgtctcagtttacctgggcagttgcccctggctatccggctgggatgggacttggacttagaagcaggcccctcctctggaaagctgtgtcctcgggccaggaggtggcagcctctaccttcctgagacagggacccttttctgtccatcagaggacagctgtatgaagacacagagagaaggcagccatctgtaagccaggaagagagccctcaccaagactggaatcagcagcaccttgatattggacttccagcctccagaactgcaagaaataagcacctgctgtttacatgcccagcctgcagtgcttccttatggcagattggagctaactgagacagctcccagcactcattcattcattcattcattcactcacctcatgtctactaaacagctctgggctggctctgggaagcagtgagtcacacacactgcccccagcaacgtgtgaaatatgtttagagacagtgggctacagcggaaagggtagatgccctgagaaccccagcggtgctggtcagaagcacaggccttgttgggctgaggctggcatggggtgaacctggggagcctcgggggcagaggtgatagatgtggggtgtttcaaggcagtgagacaaagaagggagatgggtggtgccccccaatgccaggcttcaccagcctcccaacacacgagtgttcacccgcctggatgagacacctctgtggacttgggagtgaaggcagtgaatttgggcaatgctggaggccgtgcaggtgggaggtgggacaggggcaagaggccggggcccaggcaggagctgacagcccaccagtggtgctcccctgagaagcaacctcagtgggtggcttggggtctgctgggctgtccccacactgacaccctggctgcagggcccccctgtgtccccagtgaggggtctcgggagctgtgtgtcctactcagggccatccctgcagcccatgctctctgggtgaccagttgccagcagtgtcccccctgccttgggcggaggctgaggaccccagggtgggagggaaggtgcggtgggggctcagccaatgctgcccagcctgagggtccctcacatgtgggccgcacccctgcgtcagccggagtgatctctgcttagggtggtttgaggtgagttctgatatctcaaacaccagcatcagggccagggcagacaaaataagagtgagctggtcaggggtgtcccagttgggagctcgctcacagtctttaaggaggcagggcacagcccagtgggggtggccacgaggccccgggcctgtggctgagatggcaactggcaccggcagtgattggaacagtccagcccatggagccctgtggccttggccggtggctcacggtgccacgggagctggagcaatgggtggcctcccttgcctggtgcctgagtgaaggaggactgggttgcccttgaggaaggaccttgccatactcctacaaacttacattattcttctttccccagtctcccctcagggacctgcagccatttgctggggtggctagtggaaagggggatcatcagactcagggggattactggactctaactctaacctgacacccactcctggggacacaaacacccatcggatctaatagtcagaggaggggcgtatggaggtcagtgggctcacggagttctagctcaggtccaaccctcggtgggtgcagaggtcacttccctagcctcagatgggtgagtaaacagacgtatgtggcagccagcagagcccccacatttgttccctgacctgagggtgggggctactatgctgggaaaggccaggtggaagccattggggtgaactctgcctaggaaaattgtcagtcaaaagcaacctgcagccctggagggactgcaaaggtcagtgccgccatcgaggacttggaagatgcagggtggtgacccccactgcagcctcgttccactcgtctaattggcttgtgtggaagacaggggggtcccggagaaagaaggacagtgaatcctggtaaacttaaccaggactccaattgcaactgctgttccagatatgactactgatcactggggcaaatcaaagcatccccggacacctggtctacagccattgatctggtgaaagctttaatttttaatatagattttattttttagagcagtttcatgtttacagagaaattgagcatatttgagagtcctcatatagcatctctccctacacacagtttcccttattattcatatcttgaattactgtgatacatctttgcaattgatgaaccaatattgacctagtcattgatcaggttacatgagggttcactcttcttgttgtacatgctgtgagttcgggcaaatgtgtaatggcatatctccactattacagtgtcacacagaattattttactgcccta

SEQ ID NO: 424427 - DNA, 2692 bp, Homo sapiens
cgtggatgtgtgtcatgcatatgtgtttacccgccagggacttcctttttcctctctccttcctgtgaattcctgggtcccaggtgcgcccgctcactctacaatgtccttacccaccaggaggcccctggctcaatgatgccacctgcagctgcccaaccctccgcccatggtgcccttgttccacctgccaccgctcatgaacctgtggatcacccagctctgcactggcttgcctgctgctgctgtctcagtttacctgggcagttgcccctggctatccggctgggatgggacttggacttagaagcaggcccctcctctggaaagctgtgtcctcgggccaggaggtggcagcctctaccttcctgagacagggacccttttctgtccatcagaggacagctgtatgaagacacagagagaaggcagccatctgtaagccaggaagagagccctcaccaagactggaatcagcagcaccttgatattggacttccagcctccagaactgcaagaaataagcacctgctgtttacatgcccagcctgcagtgcttccttatggcagattggagctaactgagacagctcccagcactcattcattcattcattcattcactcacctcatgtctactaaacagctctgggctggctctgggaagcagtgagtcacacacactgcccccagcaacgtgtgaaatatgtttagagacagtgggctacagcggaaagggtagatgccctgagaaccccagcggtgctggtcagaagcacaggccttgttgggctgaggctggcatggggtgaacctggggagcctcgggggcagaggtgatagatgtggggtgtttcaaggcagtgagacaaagaagggagatgggtggtgccccccaatgccaggcttcaccagcctcccaacacacgagtgttcacccgcctggatgagacacctctgtggacttgggagtgaaggcagtgaatttgggcaatgctggaggccgtgcaggtgggaggtgggacaggggcaagaggccggggcccaggcaggagctgacagcccaccagtggtgctcccctgagaagcaacctcagtgggtggcttggggtctgctgggctgtccccacactgacaccctggctgcagggcccccctgtgtccccagtgaggggtctcgggagctgtgtgtcctactcagggccatccctgcagcccatgctctctgggtgaccagttgccagcagtgtcccccctgccttgggcggaggctgaggaccccagggtgggagggaaggtgcggtgggggctcagccaatgctgcccagcctgagggtccctcacatgtgggccgcacccctgcgtcagccggagtgatctctgcttagggtggtttgaggtgagttctgatatctcaaacaccagcatcagggccagggcagacaaaataagagtgagctggtcaggggtgtcccagttgggagctcgctcacagtctttaaggaggcagggcacagcccagtgggggtggccacgaggccccgggcctgtggctgagatggcaactggcaccggcagtgattggaacagtccagcccatggagccctgtggccttggccggtggctcacggtgccacgggagctggagcaatgggtggcctcccttgcctggtgcctgagtgaaggaggactgggttgcccttgaggaaggaccttgccatactcctacaaacttacattattcttctttccccagtctcccctcagggacctgcagccatttgctggggtggctagtggaaagggggatcatcagactcagggggattactggactctaactctaacctgacacccactcctggggacacaaacacccatcggatctaatagtcagaggaggggcgtatggaggtcagtgggctcacggagttctagctcaggtccaaccctcggtgggtgcagaggtcacttccctagcctcagatgggtgagtaaacagacgtatgtggcagccagcagagcccccacatttgttccctgacctgagggtgggggctactatgctgggaaaggccaggtggaagccattggggtgaactctgcctaggaaaattgtcagtcaaaagcaacctgcagccctggagggactgcaaaggtcagtgccgccatcgaggacttggaagatgcagggtggtgacccccactgcagcctcgttccactcgtctaattggcttgtgtggaagacaggggggtcccggagaaagaaggacagtgaatcctggtaaacttaaccaggactccaattgcaactgctgttccagatatgactactgatcactggggcaaatcaaagcatccccggacacctggtctacagccattgatctggtgaaagctttaatttttaatatagattttattttttagagcagtttcatgtttacagagaaattgagcatatttgagagtcctcatatagcatctctccctacacacagtttcccttattattcatatcttgaattactgtgatacatctttgcaattgatgaaccaatattgacctagtcattgatcaggttacatgagggttcactcttcttgttgtacatgctgtgagttcgggcaaatgtgtaatggcatatctccactattacagtgtcacacagaattattttactgcccta

SEQ ID NO: 424428 - DNA, 375 bp, Homo sapiens
tctctccttcctgtgaattcctgggtcccaggtgcgcccgctcactctacaatgtccttacccaccaggaggcccctggctcaatgatgccacctgcagctgcccaaccctccgcccatggtgcccttgttccacctgccaccgctcatgaacctgtggatcacccagctctgcactggcttgcctgctgctgctgtctcagtttacctgggcagttgcccctggctatccggctgggatgggacttggacttagaagcaggcccctcctctggaaagctgtgtcctcgggccaggaggtggcagcctctaccttcctgagacagggacccttttctgtccatcagaggtgagcagccgggctctgaggctggag

SEQ ID NO: 424429 - DNA, 708 bp, Homo sapiens
cccaggaagacatggcctcgttcttggtgtggccactgaggacggcgctgagagggggaaagtcatgggcaggacctggtgtgggatgtggaggagacggcgcccggggaggaggaggtgagctccccgtcctgggagtgagcaagtgtggactgggccttgggggcgtaatccttggaggaatttggatggggtctccttggaacatcattattgaggtgttcttaggaaacaccctttgaaatgtcctgtgacagcttaagttttgagaaggtcgttggttttaatgccttcgtgggcggcactcatggatattttgtcgcagagccttcttggggccacaggggtgggctggggcctcgctcacactcacgtggggcctccagggggaggctttgtaaacctcgaatttgcaattacaccgagccgtgtaattacgtatgggtgggggcagcgctgcggccccagtacaggcagggtttccgtgggcctctggggcagggtgggcctgaagagggtgaaaatgttccaggtgaatccatcattcagggaccactccgggccctcccaggagtgctaacaggcggctctgctcgcccctcggtgctggaattgctcctcctgcatttggtcaggacctcatcaagggggagggggccccaagacctgcaggcatggcaaccccagcgtggctgtgggaagagggcc

SEQ ID NO: 424430 - DNA, 538 bp, Homo sapiens
gcacgaggactcacgtaaggctttttctgaatgtaattgtgaatacaaagccttgctggtcctttttatcattacccaatggatgactgtttattagctatcagcagaattccgtaggcgaaagcaagccgtgaacgatgtacattttgctttaatagcatgttagcgaacaaacttccatggacttttgtggacaaggtgctgctttttctcatgaccctgtagaattgctatcgaccacatcttctgtagcactgacctgtgtgaactcagggaagaatttgtgcatacaaatgagtggaaacagagcaggattcatgaatatgaatgagaatgtgaatcattttggagaatgccctgggcacacgggtcaactggaaatttcatttctctaagaaagtagccctaccagcggcacggactgttcctgttcctcatacctgtggggattcctccatattggaactgtttcatgtatcttttttgcattgtaactagccaaacctgaagtcagtaaataaaatgagattagcacttt

SEQ ID NO: 424431 - DNA, 3191 bp, Homo sapiens
gcacgaggactcacgtaaggctttttctgaatgtaattgtgaatacaaagccttgctggtcctttttatcattacccaatggatgactgtttattagctatcagcagaattccgtaggcgaaagcaagccgtgaacgatgtacattttgctttaatagcatgttagcgaacaaacttccatggacttttgtggacaaggtgctgctttttctcatgaccctgtagaattgctatcgaccacatcttctgtagcactgacctgtgtgaactcagggaagaatttgtgcatacaaatgagtggaaacagagcaggattcatgaatatgaatgagaatgtgaatcattttggagaatgccctgggcacacgggtcaactggaaatttcatttctctaagaaagtagccctaccagcggcacggactgttcctgttcctcatacctgtggggattcctccatattggaactgtttcatgtatcttttttgcattgtaactagccaaacctgaagtcagtaaataaaatgagattagcactttttttaggtaccagttgtatcactgagtaatgcacaccaatagagcaagaaagtataaaatgtatttaagaccaactggtttgcttattatgactgactttgaaaaagcccatatccaatgatatacatgctttaaaaggtatatctatcgtaggaccaggaaccaaaatgggaattttacttctggtcctgttttgtaaatagttcctttttttgaagacaatctcatgttttataacttttgttgtgggtctgagaatcacaatggtaatatgtcttggcaaaacataacctttaaatacaaaaacaattataacttaattttccaaataaaacaagaaatacactgattaggcttctacagttctaagagacatgacactttggtaataagcgtcagtactctacttctcaagttaactggaaatattttacaagatgcagtgttttgtaatcacaaagaacgcagacattttgtgagaaatgaccttggttttatacattgtagcttattttttaaaatatagtattttaccaggcaggaagtattaatattataagtaattcttgctcaccaaacaaagggctatgtctcttttaagcaaatgttttgatgcatatctttttaattaaccctctgcagcaagggtagaaatacagatcagatggaatgggtattataggagaatcaagatagcaacagctactccttttaccattactagtgtgttttcaaagtatggaaaaagatgcctgaagagtcattttatatattttaaatctaaaaagtgttaacaggtatgcttataggccatgggagaaatattcttataaattttttagtgtaaaatgataaattctgtgtcacaaagacaagtttaccacttgacctaccagaatcacagatacttgcatttaactagcaagtatcatttggtggaaatttctaaaatcatagtagacaggcccaaagatagaattcttaggtgatcagtagtgtttaaaataattttgtcctcagcactaactatataactgtaatttctacataagaacaagtgcttccaaaatatagtggagggaaaaaataaaaaaggaaaataaaaaaacaaaacaaaaagaacaagtgcttgatttttcactgtgaagaactagcaggcacatgaggttgtgatcagaaagtgactgagttcccaagaaccaggaaacagaggggagttgtgaagagtttattaaaactgtacaaataattcagagctttgccaaaaccatttcataatgctgtacagttttttcaagcccactcactgttaaaacaagaaagcaccttttctttctaagattttagtaatccaaaagctagcctaattagccaagtatgcagataacatcaaaagcaaagctgagatagaacagccatacacccgttgggcagctcttatgaggtggtcagaaggtcactcagaccttggtttcaaataggctttagaatctgcacacttgaggactagaaatgcacagagttagggaaagccatgtacaggcttggctcctagtctttgagatgaggcgtcttgcaaatctctgttttcactccttggaatgtctccattgttagcattaaagtccccaagaagtttttattgctgtacggttttgaacccaatgagtctcatttccaaaagattcctaattctatataggagaggttgcaaatgtcagtgcctcagaaggaccaggcaagttctgtaaatgattgatgtggataaggcaaagaggaacacaagaatggtggagaccaggttgaactgcagaacacatgccctctttgaaggggtgcccacactcagctctagacaatcagaaccatgcagaaatcaggcccagggctgctagatcttctgacgtggaagtattgatattacctgacacgtaagttttgacaactaactcaaactcttggccaacactgtgcagaccaaagagaagctgtacacagacaggtgcagcctgcagcccccagtttcaactattgggaaaagtggatttcacattccacagttgtcaggtcaggttcatccatcagccccacaaactcacatgtcggcactatctgggcaactaaaataaaagaggggaaagagatcatttctccccagatatcattctcatggcagacttgaatatagatacgctgagttatccagctctctcactctgcctccttttggcatgcccaggctgtgccccgtaaagtgttgaatcactgttatcctaattttcttagtgttttctaccgtggccactgtgatgaggggctggcaaagagcagcctcgtgccttccgagaaggctgccaggagcctctgaagcttgaagcgagcacacattgcctccttgtgccaaagcccttggccagcctccccacactccttccctctccatccggcctcatgagtcttcgttaccaagtaaaattaccactgcttcacctctgatacagcagaagccttgcttcagaactggtaggcatttaggctatttcagagtgtccactaacctcaaaaggaggtttttccacatacaaaaccctagcatctttgaggggaaagcaaaatgagaataaattatgtcatgaaaaaaattagaagttgc

SEQ ID NO: 424432 - DNA, 3844 bp, Homo sapiens
gagttatttctcctatacctatgcaaagtaggaagagcaccttataggaggcactgtatagggacaggggacatgggatcagccataggaatgttaaatgaaattgcacagaggaaagtttaatatatgtctagagattatacatacacttttttaagcgtaaaaagaagacatctagtaatgacagatattctttttatatacaagcaaaagaaagtataaggaggttctacagtgcaacatccacaatctgtgcattcacatattatgggacttttattttttaaactctcatataaattttttaaaattactccttggaagagatcctggtttttttcttcatttatttttttctttaaaaacatttattttaagagaagagaaaaagagcttcatctaattttgcatcttgattaccaatcagtactagtcacagcaccagcaatactgtatgttttagactgacaaggtcagccaggaaatggcatttttttaaacgcagaaatgtgtttgtttcctctactctaacacgtcctttctcctcctggtgtcctgtcaccccccatgcagcaccactgatgcgagatgatgctctggcctggtccaggaagccctgagccatgggcagattgcccagtggccttgggcggccagagcttgtcacctgtttaaacaagttcaccatgtgtttaaatgacagggtacagtcctggaccagaggtttttctcttcagcaaagctccctggcccttgatcgttggactgttactaatagaaaaagattcaagtcatgaagtataaaatccatcccccatcccagaactttgaaacacaaggagggagagatctttgctatggagcagtcctggagcaaagccccgtggcttccacccccagatatataccccataagtagtgctgagctccagcttagctgagccaagctcagtccttatctggtgttcagccagtgcacaggtataagcagaactacagagctgaatgtagcttccctgggatctcttctcctttctaaagcatttttcacacagttctgtacagcggcacggactgttcctgttcctcatacctgtggggattcctccatattggaactgtttcatgtatcttttttgcattgtaactagccaaacctgaagtcagtaaataaaatgagattagcactttttttaggtaccagttgtatcactgagtaatgcacaccaatagagcaagaaagtataaaatgtatttaagaccaactggtttgcttattatgactgactttgaaaaagcccatatccaatgatatacatgctttaaaaggtatatctatcgtaggaccaggaaccaaaatgggaattttacttctggtcctgttttgtaaatagttcctttttttgaagacaatctcatgttttataacttttgttgtgggtctgagaatcacaatggtaatatgtcttggcaaaacataacctttaaatacaaaaacaattataacttaattttccaaataaaacaagaaatacactgattaggcttctacagttctaagagacatgacactttggtaataagcgtcagtactctacttctcaagttaactggaaatattttacaagatgcagtgttttgtaatcacaaagaacgcagacattttgtgagaaatgaccttggttttatacattgtagcttattttttaaaatatagtattttaccaggcaggaagtattaatattataagtaattcttgctcaccaaacaaagggctatgtctcttttaagcaaatgttttgatgcatatctttttaattaaccctctgcagcaagggtagaaatacagatcagatggaatgggtattataggagaatcaagatagcaacagctactccttttaccattactagtgtgttttcaaagtatggaaaaagatgcctgaagagtcattttatatattttaaatctaaaaagtgttaacaggtatgcttataggccatgggagaaatattcttataaattttttagtgtaaaatgataaattctgtgtcacaaagacaagtttaccacttgacctaccagaatcacagatacttgcatttaactagcaagtatcatttggtggaaatttctaaaatcatagtagacaggcccaaagatagaattcttaggtgatcagtagtgtttaaaataattttgtcctcagcactaactatataactgtaatttctacataagaacaagtgcttccaaaatatagtggagggaaaaaataaaaaaggaaaataaaaaaacaaaacaaaaagaacaagtgcttgatttttcactgtgaagaactagcaggcacatgaggttgtgatcagaaagtgactgagttcccaagaaccaggaaacagaggggagttgtgaagagtttattaaaactgtacaaataattcagagctttgccaaaaccatttcataatgctgtacagttttttcaagcccactcactgttaaaacaagaaagcaccttttctttctaagattttagtaatccaaaagctagcctaattagccaagtatgcagataacatcaaaagcaaagctgagatagaacagccatacacccgttgggcagctcttatgaggtggtcagaaggtcactcagaccttggtttcaaataggctttagaatctgcacacttgaggactagaaatgcacagagttagggaaagccatgtacaggcttggctcctagtctttgagatgaggcgtcttgcaaatctctgttttcactccttggaatgtctccattgttagcattaaagtccccaagaagtttttattgctgtacggttttgaacccaatgagtctcatttccaaaagattcctaattctatataggagaggttgcaaatgtcagtgcctcagaaggaccaggcaagttctgtaaatgattgatgtggataaggcaaagaggaacacaagaatggtggagaccaggttgaactgcagaacacatgccctctttgaaggggtgcccacactcagctctagacaatcagaaccatgcagaaatcaggcccagggctgctagatcttctgacgtggaagtattgatattacctgacacgtaagttttgacaactaactcaaactcttggccaacactgtgcagaccaaagagaagctgtacacagacaggtgcagcctgcagcccccagtttcaactattgggaaaagtggatttcacattccacagttgtcaggtcaggttcatccatcagccccacaaactcacatgtcggcactatctgggcaactaaaataaaagaggggaaagagatcatttctccccagatatcattctcatggcagacttgaatatagatacgctgagttatccagctctctcactctgcctccttttggcatgcccaggctgtgccccgtaaagtgttgaatcactgttatcctaattttcttagtgttttctaccgtggccactgtgatgaggggctggcaaagagcagcctcgtgccttccgagaaggctgccaggagcctctgaagcttgaagcgagcacacattgcctccttgtgccaaagcccttggccagcctccccacactccttccctctccatccggcctcatgagtcttcgttaccaagtaaaattaccactgcttcacctctgatacagcagaagccttgcttcagaactggtaggcatttaggctatttcagagtgtccactaacctcaaaaggaggtttttccacatacaaaaccctagcatctttgaggggaaagcaaaatgagaataaattatgtcatgaaaaaaattagaagttgc

SEQ ID NO: 424433 - DNA, 3355 bp, Homo sapiens
cttggtgctgatcagctggtggtcaccatccctaagtacctcccagggagctgccattttctcctctgggagcagctgcctgaagcaaggagagaatgacctgaagggaagtacctccggccaagagtgcagggctgctgtgcctagcctgagcgggccatctctagcagatatggacttctctccaccacactagctgaaaagttttctcccttggttggcaaaagccagtgtcaggaaaaaagctgtgggtttctgaccaagaatgtgtgcgcttagctgcaaagtgcctgtcagcagctccaggcaccaacaaggtgcccttttattagacaattcctgcccgaacataaccatattgcagatgaaaattttcaatagagaatgacacaattcttgacctttctaaaaacttttcaaagagatagtcacatgtgtatatgttgcaaaagatttttgaaactgaaatgtcctccattaaatctcaagagcactcgagttttaagtctgctgtttctggtgtcacactaagacacacttttgaaagcagccctgggttctgaattagttggcaagcggcacggactgttcctgttcctcatacctgtggggattcctccatattggaactgtttcatgtatcttttttgcattgtaactagccaaacctgaagtcagtaaataaaatgagattagcactttttttaggtaccagttgtatcactgagtaatgcacaccaatagagcaagaaagtataaaatgtatttaagaccaactggtttgcttattatgactgactttgaaaaagcccatatccaatgatatacatgctttaaaaggtatatctatcgtaggaccaggaaccaaaatgggaattttacttctggtcctgttttgtaaatagttcctttttttgaagacaatctcatgttttataacttttgttgtgggtctgagaatcacaatggtaatatgtcttggcaaaacataacctttaaatacaaaaacaattataacttaattttccaaataaaacaagaaatacactgattaggcttctacagttctaagagacatgacactttggtaataagcgtcagtactctacttctcaagttaactggaaatattttacaagatgcagtgttttgtaatcacaaagaacgcagacattttgtgagaaatgaccttggttttatacattgtagcttattttttaaaatatagtattttaccaggcaggaagtattaatattataagtaattcttgctcaccaaacaaagggctatgtctcttttaagcaaatgttttgatgcatatctttttaattaaccctctgcagcaagggtagaaatacagatcagatggaatgggtattataggagaatcaagatagcaacagctactccttttaccattactagtgtgttttcaaagtatggaaaaagatgcctgaagagtcattttatatattttaaatctaaaaagtgttaacaggtatgcttataggccatgggagaaatattcttataaattttttagtgtaaaatgataaattctgtgtcacaaagacaagtttaccacttgacctaccagaatcacagatacttgcatttaactagcaagtatcatttggtggaaatttctaaaatcatagtagacaggcccaaagatagaattcttaggtgatcagtagtgtttaaaataattttgtcctcagcactaactatataactgtaatttctacataagaacaagtgcttccaaaatatagtggagggaaaaaataaaaaaggaaaataaaaaaacaaaacaaaaagaacaagtgcttgatttttcactgtgaagaactagcaggcacatgaggttgtgatcagaaagtgactgagttcccaagaaccaggaaacagaggggagttgtgaagagtttattaaaactgtacaaataattcagagctttgccaaaaccatttcataatgctgtacagttttttcaagcccactcactgttaaaacaagaaagcaccttttctttctaagattttagtaatccaaaagctagcctaattagccaagtatgcagataacatcaaaagcaaagctgagatagaacagccatacacccgttgggcagctcttatgaggtggtcagaaggtcactcagaccttggtttcaaataggctttagaatctgcacacttgaggactagaaatgcacagagttagggaaagccatgtacaggcttggctcctagtctttgagatgaggcgtcttgcaaatctctgttttcactccttggaatgtctccattgttagcattaaagtccccaagaagtttttattgctgtacggttttgaacccaatgagtctcatttccaaaagattcctaattctatataggagaggttgcaaatgtcagtgcctcagaaggaccaggcaagttctgtaaatgattgatgtggataaggcaaagaggaacacaagaatggtggagaccaggttgaactgcagaacacatgccctctttgaaggggtgcccacactcagctctagacaatcagaaccatgcagaaatcaggcccagggctgctagatcttctgacgtggaagtattgatattacctgacacgtaagttttgacaactaactcaaactcttggccaacactgtgcagaccaaagagaagctgtacacagacaggtgcagcctgcagcccccagtttcaactattgggaaaagtggatttcacattccacagttgtcaggtcaggttcatccatcagccccacaaactcacatgtcggcactatctgggcaactaaaataaaagaggggaaagagatcatttctccccagatatcattctcatggcagacttgaatatagatacgctgagttatccagctctctcactctgcctccttttggcatgcccaggctgtgccccgtaaagtgttgaatcactgttatcctaattttcttagtgttttctaccgtggccactgtgatgaggggctggcaaagagcagcctcgtgccttccgagaaggctgccaggagcctctgaagcttgaagcgagcacacattgcctccttgtgccaaagcccttggccagcctccccacactccttccctctccatccggcctcatgagtcttcgttaccaagtaaaattaccactgcttcacctctgatacagcagaagccttgcttcagaactggtaggcatttaggctatttcagagtgtccactaacctcaaaaggaggtttttccacatacaaaaccctagcatctttgaggggaaagcaaaatgagaataaattatgtcatgaaaaaaattagaagttgc

SEQ ID NO: 424434 - DNA, 3369 bp, Homo sapiens
ctcctggtgtcctgtcaccaggaggagaaaggacgtgttagagtagaggaaacaaacacgtcctttctcctcctggtgtcctgtcaccccccatgcagcaccactgatgcgagatgatgctctggcctggtccaggaagccctgagccatgggcagattgcccagtggccttgggcggccagagcttgtcacctgtttaaacaagttcaccatgtgtttaaatgacagggtacagtcctggaccagaggtttttctcttcagcaaagctccctggcccttgatcgttggactgttactaatagaaaaagattcaagtcatgaagtataaaatccatcccccatcccagaactttgaaacacaaggagggagagatctttgctatggagcagtcctggagcaaagccccgtggcttccacccccagatatataccccataagtagtgctgagctccagcttagctgagccaagctcagtccttatctggtgttcagccagtgcacaggtataagcagaactacagagctgaatgtagcttccctgggatctcttctcctttctaaagcatttttcacacagttctgtacagcggcacggactgttcctgttcctcatacctgtggggattcctccatattggaactgtttcatgtatcttttttgcattgtaactagccaaacctgaagtcagtaaataaaatgagattagcactttttttaggtaccagttgtatcactgagtaatgcacaccaatagagcaagaaagtataaaatgtatttaagaccaactggtttgcttattatgactgactttgaaaaagcccatatccaatgatatacatgctttaaaaggtatatctatcgtaggaccaggaaccaaaatgggaattttacttctggtcctgttttgtaaatagttcctttttttgaagacaatctcatgttttataacttttgttgtgggtctgagaatcacaatggtaatatgtcttggcaaaacataacctttaaatacaaaaacaattataacttaattttccaaataaaacaagaaatacactgattaggcttctacagttctaagagacatgacactttggtaataagcgtcagtactctacttctcaagttaactggaaatattttacaagatgcagtgttttgtaatcacaaagaacgcagacattttgtgagaaatgaccttggttttatacattgtagcttattttttaaaatatagtattttaccaggcaggaagtattaatattataagtaattcttgctcaccaaacaaagggctatgtctcttttaagcaaatgttttgatgcatatctttttaattaaccctctgcagcaagggtagaaatacagatcagatggaatgggtattataggagaatcaagatagcaacagctactccttttaccattactagtgtgttttcaaagtatggaaaaagatgcctgaagagtcattttatatattttaaatctaaaaagtgttaacaggtatgcttataggccatgggagaaatattcttataaattttttagtgtaaaatgataaattctgtgtcacaaagacaagtttaccacttgacctaccagaatcacagatacttgcatttaactagcaagtatcatttggtggaaatttctaaaatcatagtagacaggcccaaagatagaattcttaggtgatcagtagtgtttaaaataattttgtcctcagcactaactatataactgtaatttctacataagaacaagtgcttccaaaatatagtggagggaaaaaataaaaaaggaaaataaaaaaacaaaacaaaaagaacaagtgcttgatttttcactgtgaagaactagcaggcacatgaggttgtgatcagaaagtgactgagttcccaagaaccaggaaacagaggggagttgtgaagagtttattaaaactgtacaaataattcagagctttgccaaaaccatttcataatgctgtacagttttttcaagcccactcactgttaaaacaagaaagcaccttttctttctaagattttagtaatccaaaagctagcctaattagccaagtatgcagataacatcaaaagcaaagctgagatagaacagccatacacccgttgggcagctcttatgaggtggtcagaaggtcactcagaccttggtttcaaataggctttagaatctgcacacttgaggactagaaatgcacagagttagggaaagccatgtacaggcttggctcctagtctttgagatgaggcgtcttgcaaatctctgttttcactccttggaatgtctccattgttagcattaaagtccccaagaagtttttattgctgtacggttttgaacccaatgagtctcatttccaaaagattcctaattctatataggagaggttgcaaatgtcagtgcctcagaaggaccaggcaagttctgtaaatgattgatgtggataaggcaaagaggaacacaagaatggtggagaccaggttgaactgcagaacacatgccctctttgaaggggtgcccacactcagctctagacaatcagaaccatgcagaaatcaggcccagggctgctagatcttctgacgtggaagtattgatattacctgacacgtaagttttgacaactaactcaaactcttggccaacactgtgcagaccaaagagaagctgtacacagacaggtgcagcctgcagcccccagtttcaactattgggaaaagtggatttcacattccacagttgtcaggtcaggttcatccatcagccccacaaactcacatgtcggcactatctgggcaactaaaataaaagaggggaaagagatcatttctccccagatatcattctcatggcagacttgaatatagatacgctgagttatccagctctctcactctgcctccttttggcatgcccaggctgtgccccgtaaagtgttgaatcactgttatcctaattttcttagtgttttctaccgtggccactgtgatgaggggctggcaaagagcagcctcgtgccttccgagaaggctgccaggagcctctgaagcttgaagcgagcacacattgcctccttgtgccaaagcccttggccagcctccccacactccttccctctccatccggcctcatgagtcttcgttaccaagtaaaattaccactgcttcacctctgatacagcagaagccttgcttcagaactggtaggcatttaggctatttcagagtgtccactaacctcaaaaggaggtttttccacatacaaaaccctagcatctttgaggggaaagcaaaatgagaataaattatgtcatgaaaaaaattagaagttgc

SEQ ID NO: 424435 - DNA, 1427 bp, Homo sapiens
gagttatttctcctatacctatgcaaagtaggaagagcaccttataggaggcactgtatagggacaggggacatgggatcagccataggaatgttaaatgaaattgcacagaggaaagtttaatatatgtctagagattatacatacacttttttaagcgtaaaaagaagacatctagtaatgacagatattctttttatatacaagcaaaagaaagtataaggaggttctacagtgcaacatccacaatctgtgcattcacatattatgggacttttattttttaaactctcatataaattttttaaaattactccttggaagagatcctggtttttttcttcatttatttttttctttaaaaacatttattttaagagaagagaaaaagagcttcatctaattttgcatcttgattaccaatcagtactagtcacagcaccagcaatactgtatgttttagactgacaaggtcagccaggaaatggcatttttttaaacgcagaaatgtgtttgtttcctctactctaacacgtcctttctcctcctggtgtcctgtcaccccccatgcagcaccactgatgcgagatgatgctctggcctggtccaggaagccctgagccatgggcagattgcccagtggccttgggcggccagagcttgtcacctgtttaaacaagttcaccatgtgtttaaatgacagggtacagtcctggaccagaggtttttctcttcagcaaagctccctggcccttgatcgttggactgttactaatagaaaaagattcaagtcatgaagtataaaatccatcccccatcccagaactttgaaacacaaggagggagagatctttgctatggagcagtcctggagcaaagccccgtggcttccacccccagatatataccccataagtagtgctgagctccagcttagctgagccaagctcagtccttatctggtgttcagccagtgcacaggtataagcagaactacagagctgaatgtagcttccctgggatctcttctcctttctaaagcatttttcacacagttctgtacctcctacccaagttggggctgctttctgcctgctagcccacggctctgtgtactttcttttctggcttcaggtgcagacagaccctcagtaccttcctggacacagacacatattccctggaccaaggcgtggaataactagtagaccaccaagccacaggtggctggtcttgaagaaaagggattatactccttacaggccacccagaaagctatgaattccaatatacaccactgatcgtgcaagttagggttttttttttttaaacgtagcattattttgttatattttggaactaaatgaagtgccaaattaaccagacattcgtttgatgccatctctgtggaaccaagttctctgtgt

SEQ ID NO: 424436 - DNA, 1147 bp, Homo sapiens
ggatatccacagttcgatcaaggtaataatcaaggtcttccgacgtgaacattgcacgccttttgtggatttttagaattccttctttctttctgccatatatctgtctgtttcttttgaattttttcttgtctgtatttcttcttcgtgtttgtagaaagctgatgttgttatacatgtattgtgttttttatgtttcgtcaaggagggatggacgctccttcccccagaaaagacagaaatggaaagctggaagttggcaatgattttcatcagagaagtctacagtgatttgtataggctttatggtagaaagtttgcaatgctctttttgaaagagacctattgaagaggtagaaagttatactctgtttgttgtcctggaaggattggggtcctaggtcccaaagggctcaaggggaagaatagaaaagatgttcagttttatttttacatgcatgaaatctgtgcttcattgcaatcgccaatttactcttttctgtctcaggttgtagatatggtggtagaattgagttgaattaggcaggtgtttagaaagtttcttaggaataggaattaactcattcaatgtttatgcatagaaatatagctgaggtggatgtggttgctgtcagctattcaggtttgctacctgatcacctcctgaagatgtagggtaaggacagaatccaagcctaaaagaaaaaacaaggagagaattgaaagttataggggtgggcagttatatttcttaaaaggctggtagaaatcattttcctaagaatgtgtttagagtacagatattcattttaatctttgatttctttaagttttttgatgtttgattttctaccagtatgacactcagcctctcaaaacaagaaggacattccccaaagttgaaatgaatctgtataagatttcattcaaatgcagaataaattcaaatgattcctaacccctcctcatctactttggagataaaaactgctatgattgttttaagtaaacagagaagtggagatgacaggaaatcatttttcatttgttaaaaatcagaaaacctttgacacacttttagataaatacacctactcctttgatcctttgtgtatgtattaccacagggcttaaatatcttaagatt

SEQ ID NO: 424437 - DNA, 3014 bp, Homo sapiens
tctcagattcagctctgtgtaaagattctctagcgggctgcgctcccaagttcccctgctctgtgaaagtgaagaattagtacagctgtgttttttaaagccacctctctgtctccaccccatgggcccacacccaggtgggggaggaggaagccactgcatctgttggctcagggccccagcctgtgcgagcagggcgcctgggctgttgtgtctcctgtctgtgccgatctctattaaaggactccctcttggtgggcctggccgagtccctcctttgtgctcccagggactattttctcctcgtaagccagcgacctgcctaaagcttgggctgtgcctgcaaagcttgtgcaggacctgggggccaggtcgaccttcaagtggcttttggggccccaggttgagctctggatgtttcaagccaaggctcggctattcccgccccatagtaaatttccttttccctggaattttccaagttggcttcagctgaagagctgttttgtgaagcatcccaggcttgcccaggagagacatttgccactatgtcaccttatctgggcttgccctggggcactgagacagttgtttggcagccccagcccagccaggggctcatccttctcagctcttgtccctgggaggcctctgcttgtcacttcccagagattgcagagctcttccgccctctctggatgagggaacagaagtggaggaaacaaaagaagcagcagcacgcacagtcctgtcgctgggtgcggagacagcctggcaaagtcccactcagccatggcctgatgcaggccccaggccctcctttcttgggtgtcaaatgactgtgtcctggacatctgatgcaccacctgccctgcctgttgcaaacgtgatgctcccggatggagtggagaaactaggagactgggacaagcaaaaggctgcaaacaacccagaagcccatcctcagaagactggagaaatgattgaggaatgcatgggcaccgtggccctgtgctccatcacaaacacctctcagaaacaacgtgggatgaaaaagcaagacagttcatacagtatgatgccatttttataaagctcaaaaccaaatatgtgtggaattcatacccaggtgctaaagtcatcagggagggcagggagtcagtacaacacagtgctcacccgtggggaggggacggagctgtgcttagggaagagcagagatgctggaggttttgaacctcagggtcagtggtggcttcgtgggtttcactttgtcgtactttctgtttcacacattttcttgtgaatgtgccaagtattacataaaaaccaaaaggctgaccagacttaacagtgctccacccaatagcagcagaacacacgtttctaagtgcacagggaacattctccaggacagaccacacgttagtgcacaaagcaagtctcagtaaattagagatcggaatcctgcaaaccaccttctccaatcacaatggaataaaaccagaaatccataccagaaggaaaatgaaaattcacacatacatagaaattgaacacactttttaacagccaaagggtcaaaggagaaatcacgagaaaaattaggaaatagagatggatgaaaacaacataccagaacttaaggaatgcggcaaaaactgctctgagggaaatttatagctgcaaatgccaacatttaaaaagatgcgacatcttggctgggtgtggtggctcacgcctgtaatcgcggcactttgggaggccgaggcaggcagatcacctgaggtcagaagttcgagaccaacctggccaaagtggtgaaaccctgtctctactaaaaacacaaaaattagccaggcgtggtggctcacacctgtaatcccagctattcacgaggctgaggcaggaaaatcacttgaacccaggaggcagaggttgcagtgagctgagatcatgccattgcactccagcttgggtgacagagtgagactctgtctcaaaacaacaacaaaaaaattcctagaaagatacaaatgaccaaaattgtcccaggaaaaatagaaaatctgaacagggccaggtgcagtggctcacacctgtgatcccagcacttggggagaactagttaggaggatggcctgaggccaggagttcgagaccagcctgggcaacagagaccctgcctcgacaaaatctttagaaatcaaccaggtgtcatggcacgtgcctgtagccccagctacttgggaggctgaagcaggaggatagctagagcccaggagttcaaagctgcaacgacctatgacagcaccactgcactccagccaggaatgaggcagagacagagaccttacctcaaaaaaagaagaaaaaggaaaaaatctgaaccaacctaaaacacataggtagaaccagtcatcaaaagcttcccaacaaaagaaaagcccaggaccagatggtgaattctaccaaatgctaaagaatggacataaatccccaaattctcccaaacattgtggaggagaaaacacttcctaattccccgtattcatgtgaggggccagcttccctcccattctgccccagcttcctccagtggccttccccagcaggcagtggcccccacttctgacccctgtaactctacccactgtgggtttcctccttgccacccttccagccttccaggctttgggggccattgagacagcccatcctgcctgccctgagtgggagggcaagacatgactggctcaggatggcctgtcacccaagttgcctcaaagaagccagggacatcagtgcagtcggatgcacagtgcagtaggttttggtaagtgcacacgtgtgtgtacctgcccttccaaacctcacaggagagaccaacccacaccccaccccaggtcatcactgttctggcccctgtcaccagagattaattttgccctttctgaaactttatgtcagtgaatattagagtctgtgtcttgttgttaactgaaaaaaaaaac

SEQ ID NO: 424438 - DNA, 3354 bp, Homo sapiens
tctcagattcagctctgtgtaaagattctctagcgggctgcgctcccaagttcccctgctctgtgaaagtgaagaattagtacagctgtgttttttaaagccacctctctgtctccaccccatgggcccacacccaggtgggggaggaggaagccactgcatctgttggctcagggccccagcctgtgcgagcagggcgcctgggctgttgtgtctcctgtctgtgccgatctctattaaaggactccctcttggtgggcctggccgagtccctcctttgtgctcccagggactattttctcctcgtaagccagcgacctgcctaaagcttgggctgtgcctgcaaagcttgtgcaggacctgggggccaggtcgaccttcaagtggcttttggggccccaggttgagctctggatgtttcaagccaaggctcggctattcccgccccatagtaaatttccttttccctggaattttccaagttggcttcagctgaagagctgttttgtgaagcatcccaggcttgcccaggagagacatttgccactatgtcaccttatctgggcttgccctggggcactgagacagttgtttggcagccccagcccagccaggggctcatccttctcagctcttgtccctgggaggcctctgcttgtcacttcccagagattgcagaggtgtgtcctgcctaccatctgcctgtccagcttggtgggggtccgggtcaccatttcctccagtcctgggccccatccttgagggccttcccagccagccagcaggagaggcaagaactgggggaacacaggaacctaggggaggaggggagcgctgggcatcctcaggctggcggccaaggcctgcccctggaggcactagaggagggcatctgtctgtgggagcccagaggctgcagggaggaggaggagggaggtatctggtgtgagcgttgcccctgcgacatttgggaccacacaggtgggcttccttattccctgacaaagcctctgtttccagctcttccgccctctctggatgagggaacagaagtggaggaaacaaaagaagcagcagcacgcacagtcctgtcgctgggtgcggagacagcctggcaaagtcccactcagccatggcctgatgcaggccccaggccctcctttcttgggtgtcaaatgactgtgtcctggacatctgatgcaccacctgccctgcctgttgcaaacgtgatgctcccggatggagtggagaaactaggagactgggacaagcaaaaggctgcaaacaacccagaagcccatcctcagaagactggagaaatgattgaggaatgcatgggcaccgtggccctgtgctccatcacaaacacctctcagaaacaacgtgggatgaaaaagcaagacagttcatacagtatgatgccatttttataaagctcaaaaccaaatatgtgtggaattcatacccaggtgctaaagtcatcagggagggcagggagtcagtacaacacagtgctcacccgtggggaggggacggagctgtgcttagggaagagcagagatgctggaggttttgaacctcagggtcagtggtggcttcgtgggtttcactttgtcgtactttctgtttcacacattttcttgtgaatgtgccaagtattacataaaaaccaaaaggctgaccagacttaacagtgctccacccaatagcagcagaacacacgtttctaagtgcacagggaacattctccaggacagaccacacgttagtgcacaaagcaagtctcagtaaattagagatcggaatcctgcaaaccaccttctccaatcacaatggaataaaaccagaaatccataccagaaggaaaatgaaaattcacacatacatagaaattgaacacactttttaacagccaaagggtcaaaggagaaatcacgagaaaaattaggaaatagagatggatgaaaacaacataccagaacttaaggaatgcggcaaaaactgctctgagggaaatttatagctgcaaatgccaacatttaaaaagatgcgacatcttggctgggtgtggtggctcacgcctgtaatcgcggcactttgggaggccgaggcaggcagatcacctgaggtcagaagttcgagaccaacctggccaaagtggtgaaaccctgtctctactaaaaacacaaaaattagccaggcgtggtggctcacacctgtaatcccagctattcacgaggctgaggcaggaaaatcacttgaacccaggaggcagaggttgcagtgagctgagatcatgccattgcactccagcttgggtgacagagtgagactctgtctcaaaacaacaacaaaaaaattcctagaaagatacaaatgaccaaaattgtcccaggaaaaatagaaaatctgaacagggccaggtgcagtggctcacacctgtgatcccagcacttggggagaactagttaggaggatggcctgaggccaggagttcgagaccagcctgggcaacagagaccctgcctcgacaaaatctttagaaatcaaccaggtgtcatggcacgtgcctgtagccccagctacttgggaggctgaagcaggaggatagctagagcccaggagttcaaagctgcaacgacctatgacagcaccactgcactccagccaggaatgaggcagagacagagaccttacctcaaaaaaagaagaaaaaggaaaaaatctgaaccaacctaaaacacataggtagaaccagtcatcaaaagcttcccaacaaaagaaaagcccaggaccagatggtgaattctaccaaatgctaaagaatggacataaatccccaaattctcccaaacattgtggaggagaaaacacttcctaattccccgtattcatgtgaggggccagcttccctcccattctgccccagcttcctccagtggccttccccagcaggcagtggcccccacttctgacccctgtaactctacccactgtgggtttcctccttgccacccttccagccttccaggctttgggggccattgagacagcccatcctgcctgccctgagtgggagggcaagacatgactggctcaggatggcctgtcacccaagttgcctcaaagaagccagggacatcagtgcagtcggatgcacagtgcagtaggttttggtaagtgcacacgtgtgtgtacctgcccttccaaacctcacaggagagaccaacccacaccccaccccaggtcatcactgttctggcccctgtcaccagagattaattttgccctttctgaaactttatgtcagtgaatattagagtctgtgtcttgttgttaactgaaaaaaaaaac

SEQ ID NO: 424439 - DNA, 3124 bp, Homo sapiens
tctcagattcagctctgtgtaaagattctctagcgggctgcgctcccaagttcccctgctctgtgaaagtgaagaattagtacagctgtgttttttaaagccacctctctgtctccaccccatgggcccacacccaggtgggggaggaggaagccactgcatctgttggctcagggccccagcctgtgcgagcagggcgcctgggctgttgtgtctcctgtctgtgccgatctctattaaaggactccctcttggtgggcctggccgagtccctcctttgtgctcccagggactattttctcctcgtaagccagcgacctgcctaaagcttgggctgtgcctgcaaagcttgtgcaggacctgggggccaggtcgaccttcaagtggcttttggggccccaggttgagctctggatgtttcaagccaaggctcggctattcccgccccatagtaaatttccttttccctggaattttccaagttggcttcagctgaagagctgttttgtgaagcatcccaggcttgcccaggagagacatttgccactatgtcaccttatctgggcttgccctggggcactgagacagttgtttggcagccccagcccagccaggggctcatccttctcagctcttgtccctgggaggcctctgcttgtcacttcccagagattgcagaggtgtgtcctgcctaccatctgcctgtccagcttggtgggggtccgggtcaccatttcctccagtcctgggccccatccttgagggccttcccagccagccagcaggagagctcttccgccctctctggatgagggaacagaagtggaggaaacaaaagaagcagcagcacgcacagtcctgtcgctgggtgcggagacagcctggcaaagtcccactcagccatggcctgatgcaggccccaggccctcctttcttgggtgtcaaatgactgtgtcctggacatctgatgcaccacctgccctgcctgttgcaaacgtgatgctcccggatggagtggagaaactaggagactgggacaagcaaaaggctgcaaacaacccagaagcccatcctcagaagactggagaaatgattgaggaatgcatgggcaccgtggccctgtgctccatcacaaacacctctcagaaacaacgtgggatgaaaaagcaagacagttcatacagtatgatgccatttttataaagctcaaaaccaaatatgtgtggaattcatacccaggtgctaaagtcatcagggagggcagggagtcagtacaacacagtgctcacccgtggggaggggacggagctgtgcttagggaagagcagagatgctggaggttttgaacctcagggtcagtggtggcttcgtgggtttcactttgtcgtactttctgtttcacacattttcttgtgaatgtgccaagtattacataaaaaccaaaaggctgaccagacttaacagtgctccacccaatagcagcagaacacacgtttctaagtgcacagggaacattctccaggacagaccacacgttagtgcacaaagcaagtctcagtaaattagagatcggaatcctgcaaaccaccttctccaatcacaatggaataaaaccagaaatccataccagaaggaaaatgaaaattcacacatacatagaaattgaacacactttttaacagccaaagggtcaaaggagaaatcacgagaaaaattaggaaatagagatggatgaaaacaacataccagaacttaaggaatgcggcaaaaactgctctgagggaaatttatagctgcaaatgccaacatttaaaaagatgcgacatcttggctgggtgtggtggctcacgcctgtaatcgcggcactttgggaggccgaggcaggcagatcacctgaggtcagaagttcgagaccaacctggccaaagtggtgaaaccctgtctctactaaaaacacaaaaattagccaggcgtggtggctcacacctgtaatcccagctattcacgaggctgaggcaggaaaatcacttgaacccaggaggcagaggttgcagtgagctgagatcatgccattgcactccagcttgggtgacagagtgagactctgtctcaaaacaacaacaaaaaaattcctagaaagatacaaatgaccaaaattgtcccaggaaaaatagaaaatctgaacagggccaggtgcagtggctcacacctgtgatcccagcacttggggagaactagttaggaggatggcctgaggccaggagttcgagaccagcctgggcaacagagaccctgcctcgacaaaatctttagaaatcaaccaggtgtcatggcacgtgcctgtagccccagctacttgggaggctgaagcaggaggatagctagagcccaggagttcaaagctgcaacgacctatgacagcaccactgcactccagccaggaatgaggcagagacagagaccttacctcaaaaaaagaagaaaaaggaaaaaatctgaaccaacctaaaacacataggtagaaccagtcatcaaaagcttcccaacaaaagaaaagcccaggaccagatggtgaattctaccaaatgctaaagaatggacataaatccccaaattctcccaaacattgtggaggagaaaacacttcctaattccccgtattcatgtgaggggccagcttccctcccattctgccccagcttcctccagtggccttccccagcaggcagtggcccccacttctgacccctgtaactctacccactgtgggtttcctccttgccacccttccagccttccaggctttgggggccattgagacagcccatcctgcctgccctgagtgggagggcaagacatgactggctcaggatggcctgtcacccaagttgcctcaaagaagccagggacatcagtgcagtcggatgcacagtgcagtaggttttggtaagtgcacacgtgtgtgtacctgcccttccaaacctcacaggagagaccaacccacaccccaccccaggtcatcactgttctggcccctgtcaccagagattaattttgccctttctgaaactttatgtcagtgaatattagagtctgtgtcttgttgttaactgaaaaaaaaaac

SEQ ID NO: 424440 - DNA, 1445 bp, Homo sapiens
tctcagattcagctctgtgtaaagattctctagcgggctgcgctcccaagttcccctgctctgtgaaagtgaagaattagtacagctgtgttttttaaagccacctctctgtctccaccccatgggcccacacccaggtgggggaggaggaagccactgcatctgttggctcagggccccagcctgtgcgagcagggcgcctgggctgttgtgtctcctgtctgtgccgatctctattaaaggactccctcttggtgggcctggccgagtccctcctttgtgctcccagggactattttctcctcgtaagccagcgacctgcctaaagcttgggctgtgcctgcaaagcttgtgcaggacctgggggccaggtcgaccttcaagtggcttttggggccccaggttgagctctggatgtttcaagccaaggctcggctattcccgccccatagtaaatttccttttccctggaattttccaagttggcttcagctgaagagctgttttgtgaagcatcccaggcttgcccaggagagacatttgccactatgtcaccttatctgggcttgccctggggcactgagacagttgtttggcagccccagcccagccaggggctcatccttctcagctcttgtccctgggaggcctctgcttgtcacttcccagagattgcagaggtgtgtcctgcctaccatctgcctgtccagcttggtgggggtccgggtcaccatttcctccagtcctgggccccatccttgagggccttcccagccagccagcaggagaggcaagaactgggggaacacaggaacctaggggaggaggggagcgctgggcatcctcaggctggcggccaaggcctgcccctggaggcactagaggagggcatctgtctgtgggagcccagaggctgcagggaggaggaggagggaggtatctggtgtgagcgttgcccctgcgacatttgggaccacacaggtgggcttccttattccctgacaaagcctctgtttccagctcttccgccctctctggatgagggaacagaagtggaggaaacaaaagaagcagcagcacgcacagtcctgtcgctgggtgcggagacagcctggcaaagtcccactcagccatggcctgatgcaggccccaggccctcctttcttgggtgtcaaatgactgtgtcctggacatctgatgcaccacctgccctgcctgttgcaaacgtgatgctcccggatggagtggagaaactaggagactgggacaagcaaaaggctgcaaacaacccagaagcccatcctcagaagactggagaaatgattgaggaatgcatgggcaccgtggccctgtgctccatcacaaacacctctcagaaacaacgtgggatgaaaaagcaagacagttcatacagtatgatgccatttttataaagctcaaaacca

SEQ ID NO: 424441 - DNA, 1105 bp, Homo sapiens
tctcagattcagctctgtgtaaagattctctagcgggctgcgctcccaagttcccctgctctgtgaaagtgaagaattagtacagctgtgttttttaaagccacctctctgtctccaccccatgggcccacacccaggtgggggaggaggaagccactgcatctgttggctcagggccccagcctgtgcgagcagggcgcctgggctgttgtgtctcctgtctgtgccgatctctattaaaggactccctcttggtgggcctggccgagtccctcctttgtgctcccagggactattttctcctcgtaagccagcgacctgcctaaagcttgggctgtgcctgcaaagcttgtgcaggacctgggggccaggtcgaccttcaagtggcttttggggccccaggttgagctctggatgtttcaagccaaggctcggctattcccgccccatagtaaatttccttttccctggaattttccaagttggcttcagctgaagagctgttttgtgaagcatcccaggcttgcccaggagagacatttgccactatgtcaccttatctgggcttgccctggggcactgagacagttgtttggcagccccagcccagccaggggctcatccttctcagctcttgtccctgggaggcctctgcttgtcacttcccagagattgcagagctcttccgccctctctggatgagggaacagaagtggaggaaacaaaagaagcagcagcacgcacagtcctgtcgctgggtgcggagacagcctggcaaagtcccactcagccatggcctgatgcaggccccaggccctcctttcttgggtgtcaaatgactgtgtcctggacatctgatgcaccacctgccctgcctgttgcaaacgtgatgctcccggatggagtggagaaactaggagactgggacaagcaaaaggctgcaaacaacccagaagcccatcctcagaagactggagaaatgattgaggaatgcatgggcaccgtggccctgtgctccatcacaaacacctctcagaaacaacgtgggatgaaaaagcaagacagttcatacagtatgatgccatttttataaagctcaaaacca

SEQ ID NO: 424442 - DNA, 1804 bp, Homo sapiens
accactggatctataaaacaactaaaggtaatttttagtcttagccaagaaaagctaaccaaacaagctgcaaaaaacacagatccccaaactttctttattaaagagatttggaatatttttgtcaatgtatgacttttcagccacaattacatgtcatcattttaggatggcaccaatacttgggacacgatgatttaggcaccccaccaggtaagcaaactcagcattaaggatgtagttataaaattagcgcataatggtaggtaatgcagtttgaaaccatttcactcaggtaaaatgcaacctgaccacattatttaaaaatcagcagaattttctaataactactctgagtgcaacaacaagtgaaaaaggagctcaaagagtgctcattaagagtaacaataatttctagggaccttgactttgcatttgaggaaaatcttgtgtaactttattccattatgctcctaatatgctttctaatcccaaattaaaactctaatacaaattcattttgtagaagtcttaaaatcagtcctctttctttttgaaaacattattttagtatttattttaattaattggtttcttaaaaaatcatacactagtcattgacatatgtaatacttcctttaccagagaagactcaaccaatgctgccttaagatttaatgttattccctttttagtcactgtgcatttataagtttgtttactagttgacctttcctgaatagagattagtttcggcatttctccatctgtatataaataacaggtaatatttaatcatcagtgtatgacttgatatcacataacgttctggtgtggtttcctgtagtgatcttagggttttgatttaaaagaaatacacaaaacattaggtacaatttcctttagtttgctaaacacccaaaggatattttgttttgttggttctgcacttaaactgaaatacaacctatgtgaactattgggcaaagcctgcagcctaattaattaaaacctccatttttatttgaatagattcaagtagaaattgccgttaggaatcactgggatcttttcggattttgaccttttcaaaggtagcaataactactccagaggttgtaatctttctgttggtagtggcttttcatcagctaaataatcatctctgcctcaaatgtgttgcctgtcacctagttgatgttccataaaatccctgggttctgaagtgaattattataattaataatcaggagggcgaatcttcagtggcatctgatggaatgaaagaactgtgtctgagcagcctaaaagctgtttgtgacatgccaccttgggaaacaagagtgaggaagaaaacacagtcatcaagtgccagcgtgtgccacccattgtactaggtactttattatgcatttatgtatatgtgtgtgtgtctgtgtatacacacaaacacatatacataagtgtttacacacacacacgcacaatatgtggttaagcctggtaagcctgctaaaatggcaaagcggcctggcgcgtggctcacgcctataatcccagcactttgggaggccaaggtgggcagatcacttgaggtcaggagttcaagatcaggaccaacatggtgaaaccccatctctactaaaaatacaaaaattagccgggcgtggtggcaggtgcctgtaatcccagctacttgagagtctgaagcaggagaattgcttgaacctgggaggcggaggttgcagtgagccgagaccatgccactgcactccagcctgggcaacaaagctagactccatct

SEQ ID NO: 424443 - DNA, 1546 bp, Homo sapiens
  misc_feature (1538)..(1538): n is a, c, g, or t
  misc_feature (1542)..(1546): n is a, c, g, or t
gggactgagcatggatttcggactggccctcctgctggcggggcttctggggctcctcctcggccagtccctccaggtgaagcccctgcaggtggagcccccggagccggtggtggccgtggccttgggcgcctcgcgccagctcacctgccgcctggcctgcgcggaccgcggggcctcggtgcagtggcggggcctggacaccagcctgggcgcggtgcagtcggacacgggccgcagcgtcctcaccgtgcgcaacgcctcgctgtcggcggccgggacccgcgtgtgcgtgggctcctgcgggggccgcaccttccagcacaccgtgcagctccttgtgtacgccttcccggaccagctgaccgtctccccagcagccctggtgcctggtgacccggaggtggcctgtacggcccacaaagtcacgcccgtggaccccaacgcgctctccttctccctgctcgtcgggggccaggaactggagggggcgcaagccctgggcccggaggtgcaggaggaggaggaggagccccagggggacgaggacgtgctgttcagggtgacagagcgctggcggctgccgcccctggggacccctgtcccgcccgccctctactgccaggccacgatgaggctgcctggcttggagctcagccaccgccaggccatccccgtcctgcacagcccgacctccccggagcctcccgacaccacctccccggagtctcccgacaccacctccccggagtctcccgacaccacctcccaggagcctcccgacaccacctccccggagcctcccgacaagacctccccggagcccgccccccagcagggctccacacacacccccaggagcccaggctccaccaggactcgccgccctgagatctcccaggctgggcccacgcagggagaagtgatcccaacaggctcgtccaaacctgcgggtgaccagctgcccgcggctctgtggaccagcagtgcggtgctgggactgctgctcctggccttgcccacgtatcacctctggaaacgctgccggcacctggctgaggacgacacccacccaccagcttctctgaggcttctgccccaggtgtcggcctgggctgggttaagggggaccggccaggtcgggatcagcccctcctgagtggccagcctttccccctgtgaaagcaaaatagcttggaccccttcaagttgagaactggtcagggcaaacctgcctcccattctactcaaagtcatccctctgctcacagagatggatgcatgttctgattgcctctttggagaagctcatcagaaactcaaaagaaggccactgtttgtctcacctacccatgacctgaagcccctccctgagtggtccccacctttctggacggaaccacgtactttttacatacattgattcatgtctcacgtctccctaaaaatgcgtaagaccaagctgtgccctgaccaccctgggcccctgtcgtcaggacctcctgaggctttggcaaataaacctcctaaaatgatanaaannnnn
